United States Patent Application Publication US 2024/0131193 A1 - sequence listing, part 5

SEQ ID NO: 4771 - protein, 936 aa, Homo sapiens
MEPDIIRMYSSSPPPLDNGAEDDDDDEFGEFGGFSEVSPSGVGFVDFDTPDYTRPKEEFVPSNHFMPIHEFSENVDSLTSFKSIKNGNDKDITAELSAPVKGQSDVLLSTTSKEIISSEMLATSIDGMERPGNLNKVVEQRQNVGTLESFSPGDFRTNMNVVHQNKQLESCNGEKPPCLEILTNGFAVLETVNPQGTDDLDNVADSKGRKPLSTHSTEYNLDSVPSPAEEFADFATFSKKERIQLEEIECAVLNDREALTIRENNKINRVNELNSVKEVALGRSLDNKGDTDGEDQVCVSEISIVTNRGFSVEKQGLPTLQQDEFLQSGVQSKAWSLVDSADNSEAIRREQCKTEEKLDLLTSKCAHLCMDSVKTSDDEVGSPKEESRKFTNFQSPNIDPTEENDLDDSLSVKNGDSSNDFVTCNDINEDDFGDFGDFGSASGSTPPFVTGTQDSMSDATFEESSEHFPHFSEPGDDFGEFGDINAVSCQEETILTKSDLKQTSDNLSEECQLARKSSGTGTEPVAKLKNGQEGEIGHFDSVPNIQDDCNGFQDSDDFADFSSAGPSQVVDWNAFEDEQKDSCSWAAFGDQQATESHHRKEAWQSHRTDENIDTPGTPKTHSVPSATSKGAVASGHLQESATSVQTALLNRLERIFEACFPSILVPDAEEEVTSLKHLLETSTLPIKTREALPESGELLDVWTELQDIHDAHGLRYQWGGSHSNKKLLSSLGIDTRNILFTGNKKQPVIVPMYAAGLGMLEPTKEPLKPLSAAEKIASIGQTATMSPDMNTCTSDQFQESLPPVQFDWSSSGLTNPLDASGGSTLLNLDFFGPVDDSSSSSSTTIPGVDPELYELTTSKLEISTSSLKVTDAFARLMSTVEKTSTSTRKPKREEHLSEEAIKVIAGLPDLTFMHAKVLMFPATLTPSTSSQEKADG

SEQ ID NO: 4772 - protein, 909 aa, Homo sapiens
MEPDIIRMYSSSPPPLDNGAEDDDDDEFGEFGGFSEVSPSGVGFVDFDTPDYTRPKEEFVPSNHFMPIHEFSENVDSLTSFKSIKNGNDKDITAELSAPVKGQSDVLLSTTSKEIISSEMLATSIDGMERPGNLNKVVEQRQNVGTLESFSPGDFRTNMNVVHQNKQLESCNGEKPPCLEILTNGFAVLETVNPQGTDDLDNVADSKGRKPLSTHSTEYNLDSVPSPAEEFADFATFSKKERIQLEEIECAVLNDREALTIRENNKINRVNELNSVKEVALGRSLDNKGDTDGEDQVCVSEISIVTNRGFSVEKQGLPTLQQDEFLQSGVQSKAWSLVDSADNSEAIRREQCKTEEKLDLLTSKCAHLCMDSVKTSDDEVGSPKEESRKFTNFQSPNIDPTEENDLDDSLSVKNGDSSNDFVTCNDINEDDFGDFGDFGSASGSTPPFVTGTQDSMSDATFEESSEHFPHFSEPGDDFGEFGDINAVSCQEETILTKSDLKQTSDNLSEECQLARKSSGTGTEPVAKLKNGQEGEIGHFDSVPNIQDDCNGFQDSDDFADFSSAGPSQVVDWNAFEDEQKDSCSWAAFGDQQATESHHRKEAWQSHRTDENIDTPGTPKTHSVPSATSKGAVASGHLQESATSVQTALLNRLERIFEACFPSILVPDAEEEVTSLKHLLETSTLPIKTREALPESGELLDVWTELQDIHDAHGLRYQWGGSHSNKKLLSSLGIDTRNILFTGNKKQPVIVPMYAAGLGMLEPTKEPLKPLSAAEKIASIGQTATMSPDMNTCTSDQFQESLPPVQFDWSSSGLTNPLDGVDPELYELTTSKLEISTSSLKVTDAFARLMSTVEKTSTSTSRKPKREEHLSEEAIKVIAGLPDLTFMHAKVLMFPATLTPSTSSQEKADG

SEQ ID NO: 4773 - protein, 101 aa, Homo sapiens
MVCEKCEKKLGTVITPDTWKDGARNTTESGGRKLNENKALTSKKARFDPYGKNKFSTCRICKSSVHQPGSHYCQGCAYKKGICAMCGKKVLDTKNYKQTSV

SEQ ID NO: 4774 - protein, 488 aa, Homo sapiens
MNFTPTHTPVCRKRTVVSKRGVAVSGPTKRRGMADSLESTPLPSPEDRLAKLHPSKELLEYYQKKMAECEAENEDLLKKLELYKEACEGQHKLECDLQQREEEIAELQKALSDMQVCLFQEREHVLRLYSENDRLRIRELEDKKKIQNLLALVGTDAGEVTYFCKEPPHKVTILQKTIQAVGECEQSESSAFKADPKISKRRPSRERKESSEHYQRDIQTLILQVEALQAQLGEQTKLSREQIEGLIEDRRIHLEEIQVQHQRNQNKIKELTKNLHHTQELLYESTKDFLQLRSENQNKEKSWMLEKDNLMSKIKQYRVQCKKKEDKIGKVLPVMHESHHAQSEYIKSLKDKLVQEKKLSNMYQEQCISLEEELARIREEEGMRREIFKDRTNKMGKRLQIMTKRYEALERRRILEVEGFKTDIKVLRQKLKDLEQMLYKATVNARANQDLALLCEVRDSNRRAHKIQGELKNLKSKVFGLENELRLC

SEQ ID NO: 4775 - protein, 85 aa, Homo sapiens
MSKVSFKITLTSDPRLPYKVLSVPESTPFTAVLKFAAEEFKVPAATSAIITNDGIGINPAQTAGNVFLKHGSELRIIPRDRVGSC

SEQ ID NO: 4776 - protein, 194 aa, Homo sapiens
MDEDGLPLMGSGIDLTKVPAIQQKRTVAFLNQFVVHTVQFLNRFSTVCEEKLADLSLRIQQIETTLNILDAKLSSIPGLDDVTVEVSPLNVTSVTNGAHPEATSEQPQQNSTQDSGLQESEVSAENILTVAKDPRYARYLKMVQVGVPVMAIRNKMISEGLDPDLLERPDAPVPDGESEKTVEESSDSESSFSD

SEQ ID NO: 4777 - protein, 740 aa, Homo sapiens
MGPPGPALPATMNNSSSETRGHPHSASSPSERVFPMPLPRKAPLNIPGTPVLEDFPQNDDEKERLQRRRSRVFDLQFSTDSPRLLASPSSRSIDISATIPKFTNTQITEHYSTCIKLSTENKITTKNAFGLHLIDFMSEILKQKDTEPTNFKVAAGTLDASTKIYAVRVDAVHADVYRVLGGLGKDAPSLEEVEGHVADGSATEMGTTKKAVKPKKKHLHRTIEQNINNLNVSEADRKCEIDPMFQKTAASFDECSTAGVFLSTLHCQDYRSELLFPSDVQTLSTGEPLELPELGCVEMTDLKAPLQQCAEDRQICPSLAGFQFTQWDSETHNESVSALVDKFKKNDQVFDINAEVDESDCGDFPDGSLGDDFDANDEPDHTAVGDHEEFRSWKEPCQVQSCQEEMISLGDGDIRTMCPLLSMKPGEYSYFSAAMSMWAGPDHWRFRPRRKQDAPSQSENKKKSTKKDFEIDFEDDIDFDVYFRKTKAATILTKSTLENQNWRATTLPTDFNYNVDTLVQLHLKPGTRLLKMAQGHRVETEHYEEIEDYDYNNPNDTSNFCPGLQAADSDDEDLDDLFVGPVGNSDLSPYPCHPPKTAQQNGDTPEAQGLDITTYGESNLVAEPQKVNKIEIHYAKTAKKMDMKKLKQSMWSLLTALSGKEADAEANHREAGKEAALAEVADEKMLSGLTKDLQRSLPPVMAQNLSIPLAFACLLHLANEKNLKLEGTEDLSDVLVRQGD

SEQ ID NO: 4778 - protein, 169 aa, Homo sapiens
MKGSRIELGDVTPHNIKQLKRLNQVIFPVSYNDKFYKDVLEVGELAKLAYFNDIAVGAVCCRVDHSQNQKRLYIMTLGCLAPYRRLGIGTKMLNHVLNICEKDGTFDNIYLHVQISNESAIDFYRKFGFEIIETKKNYYKRIEPADAHVLQKNLKVPSGQNADVQKTDN

SEQ ID NO: 4779 - protein, 413 aa, Homo sapiens
MAAAPPSYCFVAFPPRAKDGLVVFGKNSARPRDEVQEVVYFSAADHEPESKVECTYISIDQVAAYAIMISRPAWLWGAEMGANEHGVCIANEAINTREPAAEIEALLGMDLVRLGLERGETAKEALDVIVSLLEEHGQGGNYFEDANSCHSFQSAYLIVDRDEAWVLETIGKYWAAEKVTEGVRCICSQLSLTTKMDAEHPELRSYAQSQGWWTGEGEFNFSEVFSPVEDHLDCGAGKDSLEKQEESITVQTMMNTLRDKASGVCIDSEFFLTTASGVSVLPQNRSSPCIHYFTGTPDPSRSIFKPFIFVDDVKLVPKTQSPCFGDDDPAKKEPRFQEKPDRRHELYKAHEWARAIIESDQEQGRKLRSTMLELEKQGLEAMEEILTSSEPLDPAEVGDLFYDCVDTEIKFFK

SEQ ID NO: 4780 - protein, 676 aa, Homo sapiens
MSDQIKFIMDSLNKEPFRKNYNLITFDSLEPMQLLQVLSDVLAEIDPKQLVDIREEMPEQTAKRMLSLLGILKYKPSGNATDMSTFRQGLVIGSKPVIYPVLHWLLQRTNELKKRAYLARFLIKLEVPSEFLQDETVADTNKQYEELMEAFKTLHKEYEQLKISGFSTAEIRKDISAMEEEKDQLIKRVEHLKKRVETAQNHQWMLKIARQLRVEKEREEYLAQQKQEQKNQLFHAVQRLQRVQNQLKSMRQAAADAKPESLMKRLEEEIKFNLYMVTEKFPKELENKKKELHFLQKVVSEPAMGHSDLLELESKINEINTEINQLIEKKMMRNEPIEGKLSLYRQQASIISRKKEAKAEELQEAKEKLASLEREASVKRNQTREFDGTEVLKGDEFKRYVNKLRSKSTVFKKKHQIIAELKAEFGLLQRTEELLKQRHENIQQQLQTMEEKKGISGYSYTQEELERVSALKSEVDEMKGRTLDDMSEMVKKLYSLVSEKKSALASVIKELRQLRQKYQELTQECDEKKSQYDSCAAGLESNRSKLEQEVRRLREECLQEESRYHYTNCMIKNLEVQLRRATDEMKAYISSDQQEKRKAIREQYTKNTAEQENLGKKLREKQKVIRESHGPNMKQAKMWRDLEQLMECKKQCFLKQQSQTSIGQVIQEGGEDRLIL

SEQ ID NO: 4781 - protein, 315 aa, Homo sapiens
MAFPEPKPRPPELPQKRLKTLDCGQGAVRAVRFNVDGNYCLTCGSDKTLKLWNPLRGTLLRTYSGHGYEVLDAAGSFDNSSLCSGGGDKAVVLWDVASGQVVRKFRGHAGKVNTVQFNEEATVILSGSIDSSIRCWDCRSRRPEPVQTLDEARDGVSSVKVSDHEILAGSVDGRVRRYDLRMGQLFSDYVGSPITCTCFSRDGQCTLVSSLDSTLRLLDKDTGELLGEYKGHKNQEYKLDCCLSERDTHVVSCSEDGKVFFWDLVEGALALALPVGSGVVQSLAYHPTEPCLLTAMGGSVQCWREEAYEAEDGAG

SEQ ID NO: 4782 - protein, 599 aa, Homo sapiens
MVLILGRRLNREDLGVRDSPATKRKVFEMDPKSLTGHEFFDFSSGSSHAENILQIFNEFRDSRLFTDVIICVEGKEFPCHRAVLSACSSYFRAMFCNDHRESREMLVEINGILAEAMECFLQYVYTGKVKITTENVQYLFETSSLFQISVLRDACAKFLEEQLDPCNCLGIQRFADTHSLKTLFTKCKNFALQTFEDVSQHEEFLELDKDELIDYICSDELVIGKEEMVFEAVMRWVYRAVDLRRPLLHELLTHVRLPLLHPNYFVQTVEVDQLIQNSPECYQLLHEARRYHILGNEMMSAARPRRSTGYSEVIVVVGGCERVGGFNLPYTECYDPVTGEWKSLAKLPEFTKSEYAVCALRNDILVSGGRINSRDVWIYNSQLNIWIRVASLNKGRWRHKMAVLLGKVYVVGGYDGQNRLSSVECYDSFSNRWTEVAPLKEAVSSPAVTSCVGKLFVIGGGPDDNTCSDKVQSYDPETNSWLLRAAIPIAKRCITAVSLNNLIYVAGGLTKAIYCYDPVEDYWMHVQNTFSRQENCGMSVCNGKIYILGGRRENGEATDTILCYDPATSIITGVAAMPRPVSYHGCVTIHRYNEKCFKL

SEQ ID NO: 4783 - protein, 269 aa, Homo sapiens
MNQEDLDPDSTTDVGDVTNTEEELIRECEEMWKDMEECQNKLSLIGTETLTDSNAQLSLLIMQVKCLTAELSQWQKKTPETIPLTEDVLITLGKEEFQKLRQDLEMVLSTKESKNEKLKEDLEREQRWLDEQQQIMESLNVLHSELKNKVETFSESRIFNELKTKMLNIKEYKEKLLSTLGEFLEDHFPLPDRSVKKKKKNIQESSVNLITLHEMLEILINRLFDVPHDPYVKISDSFWPPYVELLLRNGIALRHPEDPTRIRLEAFHQ

SEQ ID NO: 4784 - protein, 346 aa, Homo sapiens
MCEGPSRISGPIPPDPTLCPDNYRRPTSAQGRLEGNALKLDLLTSDRALDTTAPRGPCIGPGAGEILERGQRGVGDVLLQLEGISLGPGASLKRKDPKDHEKENLRRIREIQKRFREQERSREQGQPRPLKALWRSPKYDKVESRVKAQLQEPGPASGTESAHFLRAHSRCGPGLPPPHVSSPQPTPPGPEAKEPGLGVDFIRHNARAAKRAPRRHSCSLQVLAQVLEQQRQAQEHYNATQKGHVPHYLLERRDLWRREAEARKQSQPDPAMPPGHTRMPENQRLETLTKLLQSQSQLLRELVLLPAGADSLRAQSHRAELDRKLVQVEEAIKIFSRPKVFVKMDD

SEQ ID NO: 4785 - protein, 607 aa, Homo sapiens
MAANVFPFRDARAAPDPVLEAGPVAHGPLPVPLVLDNGSFQVRAGWACPGQDPGPEPRLQFRAVCARGRGGARGASGPQVGNALGSLEPLRWMLRSPFDRNVPVNLELQELLLDYSFQHLGVSSQGCVDHPIVLTEAVCNPLYSRQMMSELLFECYGIPKVAYGIDSLFSFYHNKPKNSMCSGLIISSGYQCTHVLPILEGRLDAKNCKRINLGGSQAAGYLQRLLQLKYPGHLAAITLSRMEEILHEHSYIAEDYVEELHKWRCPDYYENNVHKMQLPFSSKLLGSTLTSEEKQERRQQQLRRLQELNARRREEKLQLDQERLDRLLYVQELLEDGQMDQFHKALIELNMDSPEELQSYIQKLSIAVEQAKQKILQAEVNLEVDVVDSKPETPDLEQLEPSLEDVESMNDFDPLFSEETPGVEKPVTTVQPVFNLAAYHQLFVGTERIRAPEIIFQPSLIGEEQAGIAETLQYILDRYPKDIQEMLVQNVFLTGGNTMYPGMKARMEKELLEMRPFRSSFQVQLASNPVLDAWYGARDWALNHLDDNEVWITRKEYEEKGGEYLKEHCASNIYVPIRLPKQASRSSDAQASSKGSAAGGGGAGEQA

SEQ ID NO: 4786 - protein, 460 aa, Homo sapiens
MASREEVLALQAEVAQREEELNSLKQKLASALLAEQEPQPERLVPVSPLPPKAALSRDEILRYSRQLVLPELGVHGQLRLGTACVLIVGCGGLGCPLAQYLAAAGVGRLGLVDYDVVEMSNLARQVLHGEALAGQAKAFSAAASLRRLNSAVECVPYTQALTPATALDLVRRYDVVADCSDNVPTRYLVNDACVLAGRPLVSASALRFEGQITVYHYDGGPCYRCIFPQPPPAETVTNCADGGVLGVVTGVLGCLQALEVLKIAAGLGPSYSGSLLLFDALRGHFRSIRLRSRRLDCAACGERPTVTDLLDYEAFCGSSATDKCRSLQLLSPEERVSVTDYKRLLDSGAFHLLLDVRPQVEVDICRLPHALHIPLKHLERRDAESLKLLKEAIWEEKQGTQEGAAVPIYVICKLGNDSQKAVKILQSLSAAQELDPLTVRDVVGGLMAWAAKIDGTFPQY

SEQ ID NO: 4787 - protein, 346 aa, Homo sapiens
MESVSCSAAAVRTGDMESQRDLSLVPERLQRREQERQLEVERRKQKRQNQEVEKENSHFFVATFVRERAAVEELLERAESVERLEEAASRLQGLQKLINDSVFFLAAYDLRQGQEALARLQAALAERRRGLQPKKRFAFKTRGKDAASSTKVDAAPGIPPAVESIQDSPLPKKAEGDLGPSWVCGFSNLESQVLEKRASELHQRDVLLTELSNCTVRLYGNPNTLRLTKAHSCKLLCGPVSTSVFLEDCSDCVLAVACQQLRIHSTKDTRIFLQVTSRAIVEDCSGIQFAPYTWSYPEIDKDFESSGLDRSKNNWNDVDDFNWLARDMASPNWSILPEEERNIQWD

SEQ ID NO: 4788 - protein, 248 aa, Homo sapiens
MTPKGPAMCSMPLTSADCFSNDIHKLDTSTMTWTLICTKGSPARWRDFHSATMLGSHMYVFGGRADRFGPFHSNNEIYCNRIRVFDTRTEAWLDCPPTPVLPEGRRSHSAFGYNGELYIFGGYNARLNRHFHDLWKFNPVSFTWKKIEPKGKGPCPRRRQCCCIVGDKIVLFGGTSPSPEEGLGDEFDLIDHSDLHILDFSPSLKTLCKLAVIQYNLDQSCLPHDIRWELNAMTTNSNISRPIVSSHG

SEQ ID NO: 4789 - protein, 466 aa, Homo sapiens
MEYESYYFVKFQKYPKIVKKSSDTAENNLPQRSRGKTRRMMNDSCQNLPKINQQRPRSKTTAGKTGDTKSLNKEHPNQEVVDNTRLESANFGLHISRIRKDSGEENAHPRRGQIIDFQGLLTDAIKGATSELALNTFDHNPDPSERLLKPLSAFIGMNSEMRELAAVVSRDIYLHNPNIKWNDIIGLDAAKQLVKEAVVYPIRYPQLFTGILSPWKGLLLYGPPGTGKTLLAKAVATECKTTFFNISASTIVSKWRGDSEKLVRVLFELARYHAPSTIFLDELESVMSQRGTASGGEHEGSLRMKTELLVQMDGLARSEDLVFVLAASNLPWELDCAMLRRLEKRILVDLPSREARQAMIYHWLPPVSKSRALELHTELEYSVLSQETEGYSGSDIKLVCREAAMRPVRKIFDALENHQSESSDLPRIQLDIVTTADFLDVLTHTKPSAKNLAQRYSDWQREFESV

SEQ ID NO: 4790 - protein, 2133 aa, Homo sapiens
MDEVEQDQHEARLKELFDSFDTTGTGSLGQEELTDLCHMLSLEEVAPVLQQTLLQDNLLGRVHFDQFKEALILILSRTLSNEEHFQEPDCSLEAQPKYVRGGKRYGRRSLPEFQESVEEFPEVTVIEPLDEEARPSHIPAGDCSEHWKTQRSEEYEAEGQLRFWNPDDLNASQSGSSPPQDWIEEKLQEVCEDLGITRDGHLNRKKLVSICEQYGLQNVDGEMLEEVFHNLDPDGTMSVEDFFYGLFKNGKSLTPSASTPYRQLKRHLSMQSFDESGRRTTTSSAMTSTIGFRVFSCLDDGMGHASVERILDTWQEEGIENSQEILKALDFSLDGNINLTELTLALENELLVTKNSIHQAALASFKAEIRHLLERVDQVVREKEKLRSDLDKAEKLKSLMASEVDDHHAAIERRNEYNLRKLDEEYKERIAALKNELRKEREQILQQAGKQRLELEQEIEKAKTEENYIRDRLALSLKENSRLENELLENAEKLAEYENLTNKLQRNLENVLAEKFGDLDPSSAEFFLQEERLTQMRNEYERQCRVLQDQVDELQSELEEYRAQGRVLRLPLKNSPSEEVEANSGGIEPEHGLGSEECNPLNMSIEAELVIEQMKEQHHRDICCLRLELEDKVRHYEKQLDETVVSCKKAQENMKQRHENETHTLEKQISDLKNEIAELQGQAAVLKEAHHEATCRHEEEKKQLQVKLEEEKTHLQEKLRLQHEMELKARLTQAQASFEREREGLQSSAWTEEKVRGLTQELEQFHQEQLTSLVEKHTLEKEELRKELLEKHQRELQEGREKMETECNRRTSQIEAQFQSDCQKVTERCESALQSLEGRYRQELKDLQEQQREEKSQWEFEKDELTQECAEAQELLKETLKREKTTSLVLTQEREMLEKTYKEHLNSMVVERQQLLQDLEDLRNVSETQQSLLSDQILELKSSHKRELREREEVLCQAGASEQLASQRLERLEMEHDQERQEMMSKLLAMENIHKATCETADRERAEMSTEISRLQSKIKEMQQATSPLSMLQSGCQVIGEEEVEGDGALSLLQQGEQLLEENGDVLLSLQRAHEQAVKENVKMATEISRLQQRLQKLEPGLVMSSCLDEPATEFFGNTAEQTEQFLQQNRTKQVEGVTRRHVLSDLEDDEVRDLGSTGTSSVQRQEVKIEESEASVEGFSELENSEETRTESWELKNQISQLQEQLMMLCADCDRASEKKQDLLFDVSVLKKKLKMLERIPEASPKYKLLYEDVSRENDCLQEELRMMETRYDEALENNKELTAEVFRLQDELKKMEEVTETFLSLEKSYDEVKIENEGLNVLVLRLQGKIEKLQESVVQRCDCCLWEASLENLEIEPDGNILQLNQTLEECVPRVRSVHHVIEECKQENQYLEGNTQLLEKVKAHEIAWLHGTIQTHQERPRVQNQVILEENTTLLGFQDKHFQHQATIAELELEKTKLQELTRKLKERVTILVKQKDVLSHGEKEEELKAMMHDLQITCSEMQQKVELLRYESEKLQQENSILRNEITTLNEEDSISNLKLGTLNGSQEEMWQKTETVKQENAAVQKMVENLKKQISELKIKNQQLDLENTELSQKNSQNQEKLQELNQRLTEMLCQKEKEPGNSALEEREQEKFNLKEELERCKVQSSTLVSSLEAELSEVKIQTHIVQQENHLLKDELEKMKQLHRCPDLSDFQQKISSVLSYNEKLLKEKEALSEELNSCVDKLAKSSLLEHRIATMKQEQKSWEHQSASLKSQLVASQEKVQNLEDTVQNVNLQMSRMKSDLRVTQQEKEALKQEVMSLHKQLQNAGGKSWAPEIATHPSGLHNQQKRLSWDKLDHLMNEEQQLLWQENERLQTMVQNTKAELTHSREKVRQLESNLLPKHQKHLNPSGTMNPTEQEKLSLKRECDQFQKEQSPANRKVSQMNSLEQELETIHLENEGLKKKQVKLDEQLMEMQHLRSTATPSPSPHAWDLQLLQQQACPMVPREQFLQLQRQLLQAERINQHLQEELENRTSETNTPQGNQEQLVTVMEERMIEVEQKLKLVKRLLQEKVNQLKEQLCKNTKADAMVKDLYVENAQLLKALEVTEQRQKTAEKKNYLLEEKIASLSNIVRNLTPAPLTSTPPLRS

SEQ ID NO: 4791 - protein, 570 aa, Homo sapiens
MAGGAREVLTLQLGHFAGFVGAHWWNQQDAALGRATDSKEPPGELCPDVLYRTGRTLHGQETYTPRLILMDLKGSLSSLKEEGGLYRDKQLDAAIAWQGKLTTHKEELYPKNPYLQDFLSAEGVLSSDGVWRVKSIPNGKGSSPLPTATTPKPLIPTEASIRVWSDFLRVHLHPRSICMIQKYNHDGEAGRLEAFGQGESVLKEPKYQEELEDRLHFYVEECDYLQGFQILCDLHDGFSGVGAKAAELLQDEYSGRGIITWGLLPGPYHRGEAQRNIYRLLNTAFGLVHLTAHSSLVCPLSLGGSLGLRPEPPVSFPYLHYDATLPFHCSAILATALDTVTVPYRLCSSPVSMVHLADMLSFCGKKVVTAGAIIPFPLAPGQSLPDSLMQFGGATPWTPLSACGEPSGTRCFAQSVVLRGIDRACHTSQLTPGTPPPSALHACTTGEEILAQYLQQQQPGVMSSSHLLLTPCRVAPPYPHLFSSCSPPGMVLDGSPKGAAVESIPVFGALCSSSSLHQTLEALARDLTKLDLRRWASFMDAGVEHDDVAELLQELQSLAQCYQGGDSLVD

SEQ ID NO: 4792 - protein, 596 aa, Homo sapiens
MNRTWPRRIWGSSQDEAELIREDIQGALHNYRSGRGERRAAALRATQEELQRDRSPAAETPPLQRRPSVRAVISTVERGAGRGRPQAKPIPEAEEAQRPEPVGTSSNADSASPDLGPRGPDLAVLQAEREVDILNHVFDDVESFVSRLQKSAEAARVLEHRERGRRSRRRAAGEGLLTLRAKPPSEAEYTDVLQKIKYAFSLLARLRGNIADPSSPELLHFLFGPLQMIVNTSGGPEFASSVRRPHLTSDAVALLRDNVTPRENELWTSLGDSWTRPGLELSPEEGPPYRPEFFSGWEPPVTDPQSRAWEDPVEKQLQHERRRRQQSAPQVAVNGHRDLEPESEPQLESETAGKWVLCNYDFQARNSSELSVKQRDVLEVLDDSRKWWKVRDPAGQEGYVPYNILTPYPGPRLHHSQSPARSLNSTPPPPPAPAPAPPPALARPRWDRPRWDSCDSLNGLDPSEKEKFSQMLIVNEELQARLAQGRSGPSRAVPGPRAPEPQLSPGSDASEVRAWLQAKGFSSGTVDALGVLTGAQLFSLQKEELRAVSPEEGARVYSQVTVQRSLLEDKEKVSELEAVMEKQKKKVEGEVEMEVI

SEQ ID NO: 4793 - protein, 649 aa, Homo sapiens
MSSFGAGKTKEVIFSVEDGSVKMFLRGRPVPMMIPDELAPTYSLDTRSELPSCRLKLEWVYGYRGRDCRANLYLLPTGEIVYFVASVAVLYSVEEQRQRHYLGHNDDIKCLAIHPDMVTIATGQVAGTTKEGKPLPPHVRIWDSVSLSTLHVLGLGVFDRAVCCVGFSKSNGGNLLCAVDESNDHMLSVWDWAKETKVVDVKCSNEAVLVATFHPTDPTVLITCGKSHIYFWTLEGGSLSKRQGLFEKHEKPKYVLCVTFLEGGDVVTGDSGGNLYVWGKGGNRITQAVLGAHDGGVFGLCALRDGTLVSGGGRDRRVVLWGSDYSKLQEVEVPEDFGPVRTVAEGHGDTLYVGTTRNSILQGSVHTGFSLLVQGHVEELWGLATHPSRAQFVTCGQDKLVHLWSSDSHQPLWSRIIEDPARSAGFHPSGSVLAVGTVTGRWLLLDTETHDLVAIHTDGNEQISVVSFSPDGAYLAVGSHDNLVYVYTVDQGGRKVSRLGKCSGHSSFITHLDWAQDSSCFVTNSGDYEILYWDPATCKQITSADAVRNMEWATATCVLGFGVFGIWSEGADGTDINAVARSHDGKLLASADDFGKVHLFSYPCCQPRALSHKYGGHSSHVTNVAFLWDDSMALTTGGKDTSVLQWRVV

SEQ ID NO: 4794 - protein, 263 aa, Homo sapiens
MAGLEVLFASAAPAITCRQDALVCFLHWEVVTHGYFGLGVGDQPGPNDKKSELLPAGWNNNKDLYVLRYEYKDGSRKLLVKAITVESSMILNVLEYGSQQVADLTLNLDDYIDAEHLGDFHRTYKNSEELRSRIVSGIITPIHEQWEKANVSSPHREFPPATAREVDPLRIPPHHPHTSRQPPWCDPLGPFVVGGEDLDPFGPRRGGMIVDPLRSGFPRALIDPSSGLPNRLPPGAVPPGARFDPFGPIGTSPPGPRPDRRGQ

SEQ ID NO: 4795 - protein, 90 aa, Homo sapiens
MDNMSPRLRAFLSEPIGEKDVCWVDGISHELAINLVTKGINKAYILLGQFLLMHKNEAEFQRWLICCFGATECEAQQTSHCLKEWCACFL

SEQ ID NO: 4796 - protein, 295 aa, Homo sapiens
MPVHTLSPGAPSAPALPCRLRTRVPGYLLRGPADGGARKPSAVERLEADKAKYVKSLHVANTRQEPVQPLLSKQPLFSPETRRTVLTPSRRALPGPCRRPQLDLDILSSLIDLCDSPVSPAEASRTPGRAEGAGRPPPATPPRPPPSTSAVRRVDVRPLPASPARPCPSPGPAAASSPARPPGLQRSKSDLSERFSRAAADLERFFNFCGLDPEEARGLGVAHLARASSDIVSLAGPSAGPGSSEGGCSRRSSVTVEERARERVPYGVSVVERNARVIKWLYGLRQARESPAAEG

SEQ ID NO: 4797 - protein, 193 aa, Homo sapiens
MPTTSRPALDVKGGTSPAKEDANQEMSSVAYSNLAVKDRKAVAILHYPGVASNGTKASGAPTSSSGSPIGSPTTTPPTKPPSFNLHPAPHLLASMHLQKLNSQYQGMAAATPGQPGEAGPLQNWDFGAQAGGAESLSPSAGAQSPAIIDSDPVDEEVLMSLVVELGLDRANELPELWLGQNEFDFTADFPSSC

SEQ ID NO: 4798 - protein, 358 aa, Homo sapiens
MAAVLKPVLLGLRDAPVHGSPTGPGAWTASKLGGIPDALPTVAAPRPVCQRCGQPLALVVQVYCPLEGSPFHRLLHVFACACPGCSTGGARSWKVFRSQCLQVPEREAQDAQKQGNSLAAEDWCEGADDWGSDTEEGPSPQFTLDFGNDASSAKDVDWTARLQDLRLQDAVLGAAHPVPPGLPLFLPYYICVADEDDYRDFVNLDHAHSLLRDYQQREGIAMDQLLSQSLPNDGDEKYEKTIIKSGDQTFYKFMKRIAACQEQILRYSWSGEPLFLTCPTSEVTELPACSQCGGQRIFEFQLMPALVSMLKSANLGLSVEFGTILVYTCEKSCWPPNHQTPMEEFCIIQEDPDELLFK

SEQ ID NO: 4799 - protein, 592 aa, Homo sapiens
MASVVVKTIWQSKEIHEAGDTPTGVESCSQLVPEAPRRVTSRAKGIPKKKKAVSFHGVEPQMSHQPMHWCLNLKRSSACTNVSLLNLAAMEPTDSTGTDSTVEDLSGQLTLAGPPASPTLPWDPDDADITEILSGVNSGLVRAKDSITSLKEKTNRVNQHVQSLQSECSVLSENLERRRQEAEELEGYCIQLKENCWKVTRSVEDAEIKTNVLKQNSALLEEKLRYLQQQLQDETPRRQEAELQEPEEKQEPEEKQEPEEKQKPEAGLSWNSLGPAATSQGCPGPPGSPDKPSRPHGLVPAGWGMGPRAGEGPYVSEQELQKLFTGIEELRREVSSLTARWHQEEGAVQEALRLLGGLGGRVDGFLGQWERAQREQAQTARDLQELRGRADELCTMVERSAVSVASLRSELEGLGPLKPILEEFGRQFQNSRRGPDLSMNLDRSHQGNCARCASQGSQLSTESLQQLLDRALTSLVDEVKQRGLTPACPSCQRLHKKILELERQALAKHVRAEALSSTLRLAQDEALRAKNLLLTDKMKPEEKMATLDHLHLKMCSLHDHLSNLPLEGSTGTMGGGSSAGTPPKQGGSAPEQ

SEQ ID NO: 4800 - protein, 845 aa, Homo sapiens
MSSSHFASRHRKDISTEMIRTKIAHRKSLSQKENRHKEYERNRHFGLKDVNIPTLEGRILVELDETSQGLVPEKTNVKPRAMKTILGDQRKQMLQKYKEEKQLQKLKEQREKAKRGIFKVGRYRPDMPCFLLSNQNAVKAEPKKAIPSSVRITRSKAKDQMEQTKIDNESDVRAIRPGPRQTSEKKVSDKEKKVVQPVMPTSLRMTRSATQAAKQVAAVSSTTARKPVTRAANENEPEGKVPSKGRPAKNVETKPDKGISCKVDSEENTLNSQTNATSGMNPDGVLSKMENLPEINTAKIKGKNSFAPKDFMFQPLDGLKTYQVTPMTPRSANAFLTPSYTWTPLKTEVDESQATKEILAQKCKTYSTKTIQQDSNKLPCPLGPLTVWHEEHVLNKNEATTKNLNGLPIKEVPSLERNEGRIAQPHHGVPYFRNILQSETEKLTSHCFEWDRKLELDIPDDAKDLIRTAVGQTRLLMKERFKQFEGLVDDCEYKRGIKETTCTDLDGFWDMVSFQIEDVIHKFNNLIKLEESGWQVNNNMNHNMNKNVFRKKVVSGIASKPKQDDAGRIAARNRLAAIKNAMRERIRQEECAETAVSVIPKEVDKIVFDAGFFRVESPVKLFSGLSVSSEGPSQRLGTPKSVNKAVSQSRNEMGIPQQTTSPENAGPQNTKSEHVKKTLFLSIPESRSSIEDAQCPGLPDLIEENHVVNKTDLKVDCLSSERMSLPLLAGGVADDINTNKKEGISDVVEGMELNSSITSQDVLMSSPEKNTASQNSILEEGETKISQSELFDNKSLTTECHLLDSPGLNCSNPFTQLERRHQEHARHISFGGNLITFSPLQPGEF

SEQ ID NO: 4801 - protein, 374 aa, Homo sapiens
MASAPWPERVPRLLAPRLPSYPPPPPTVGLRSMEQEETYLELYLDQCAAQDGLAPPRSPLFSPVVPYDMYILNASNPDTAFNSNPEVKETSGDFSSVDLSFLPDEVTQENKDQPVISKHETEENSESQSPQSRLPSPSEQDVGLGLNSSSLSNSHSQLHPGDTDSVQPSPEKPNSDSLSLASITPMTPMTPISECCGIVPQLQNIVSTVNLACKLDLKKIALHAKNAEYNPKRFAAVIMRIREAATALIFSSGKMVCTGAKSEEQSRLAARKYARVVQKLGFPARFLDFKIQNMVGSCDVRFPIRLEGLVLTHQQFSSYEPELFPGLIYRMVKPRIVLLIFVSGKVVLTGAKERSEIYEAFENIYPILKGFKKA

SEQ ID NO: 4802 - protein, 210 aa, Homo sapiens
MQAEGQGTGGSTGDADGPGGPGIPDGPGGNAGGPGEAGATGGRGPRGAGAARASGPRGGAPRGPHGGAASAQDGRCPCGARRPDSRLLQLHITMPFSSPMEAELVRRILSRDAAPLPRPGAVLKDFTVSGNLLFMSVRDQDREGAGRMRVVGWGLGSASPEGQKARDLRTPKHKVSEQRPGTPGPPPPEGAQGDGCRGVAFNVMFSAPHI

SEQ ID NO: 4803 - protein, 193 aa, Homo sapiens
MVVLRAGKKTFLPPLCRAFACRGCQLAPERGAERRDTAPSGVSRFCPPRKSCHDWIGPPDKYSNLRPVHFYIPENESPLEQKLRKLRQETQEWNQQFWANQNLTFSKEKEEFIHSRLKTKGLGLRTESGQKATLNAEEMADFYKEFLSKNFQKHMYYNRDWYKRNFAITFFMGKVALERIWNKLKQKQKKRSN

SEQ ID NO: 4804 - protein, 460 aa, Homo sapiens
MANDPLEGFHEVNLASPTSPDLLGVYESGTQEQTTSPSVIYRPHPSALSSVPIQANALDVSELPTQPVYSSPRRLNCAEISSISFHVTDPAPCSTSGVTAGLTKLTTRKDNYNAEREFLQGATITEACDGSDDIFGLSTDSLSRLRSPSVLEVREKGYERLKEELAKAQRELKLKDEECERLSKVRDQLGQELEELTASLFEEAHKMVREANIKQATAEKQLKEAQGKIDVLQAEVAALKTLVLSSSPTSPTQEPLPGGKTPFKKGHTRNKSTSSAMSGSHQDLSVIQPIVKDCKEADLSLYNEFRLWKDEPTMDRTCPFLDKIYQEDIFPCLTFSKSELASAVLEAVENNTLSIEPVGLQPIRFVKASAVECGGPKKCALTGQSKSCKHRIKLGDSSNYYYISPFCRYRITSVCNFFTYIRYIQQGLVKQQDVDQMFWEVMQLRKEMSLAKLGYFKEEL

SEQ ID NO: 4805 - protein, 326 aa, Homo sapiens
MATLVELPDSVLLEIFSYLPVRDRIRISRVCHRWKRLVDDRWLWRHVDLTLYTMRPKVMWHLLRRYMASRLHSLRMGGYLFSGSQAPQLSPALLRALGQKCPNLKRLCLHVADLSMVPITSLPSTLRTLELHSCEISMAWLHKQQDPTVLPLLECIVLDRVPAFRDEHLQGLTRFRALRSLVLGGTYRVTETGLDAGLQELSYLQRLEVLGCTLSADSTLLAISRHLRDVRKIRLTVRGLSAPGLAVLEGMPALESLCLQGPLVTPEMPSPTEILSSCLTMPKLRVLELQGLGWEGQEAEKILCKGLPHCMVIVRACPKESMDWWM

SEQ ID NO: 4806 - protein, 1029 aa, Homo sapiens
MASEAVKVVVRCRPMNQRERELRCQPVVTVDCARAQCCIQNPGAADEPPKQFTFDGAYHVDHVTEQIYNEIAYPLVEGVTEGYNGTIFAYGQTGSGKSFTMQGLPDPPSQRGIIPRAFEHVFESVQCAENTKFLVRASYLEIYNEDVRDLLGADTKQKLELKEHPEKGVYVKGLSMHTVHSVAQCEHIMETGWKNRSVGYTLMNKDSSRSHSIFTISIEMSAVDERGKDHLRAGKLNLVDLAGSERQSKTGATGERLKEATKINLSLSALGNVISALVDGRCKHVPYRDSKLTRLLQDSLGGNTKTLMVACLSPADNNYDETLSTLRYANRAKNIRNKPRINEDPKDALLREYQEEIKKLKAILTQQMSPSSLSALLSRQVPPDPVQVEEKLLPQPVIQHDVEAEKQLIREEYEERLARLKADYKAEQESRARLEEDITAMRNSYDVRLSTLEENLRKETEAVLQVGVLYKAEVMSRAEFASSAEYPPAFQYETVVKPKVFSTTDTLPSDDVSKTQVSSRFAELPKVEPSKSEISLGSSESSSLEETSVSEAFPGPEEPSNVEVSMPTEESRSRYFLDECLGQEAAGHLLGEQNYLPQEEPQEVPLQGLLGLQDPFAEVEAKLARLSSTVARTDAPQADVPKVPVQVPAPTDLLEPSDARPEAEAADDFPPRPEVDLASEVALEVVRTAEPGVWLEAQAPVALVAQPEPLPATAGVKRESVGMEVAVLTDDPLPVVDQQQVLARLQLLEQQVVGGEQAKNKDLKEKHKRRKRYADERRKQLVAALQNSDEDSGDWVLLNVYDSIQEEVRAKSKLLEKMQRKLRAAEVEIKDLQSEFQLEKIDYLATIRRQERDSMLLQQLLEQVQPLIRRDCNYSNLEKILRESCWDEDNGFWKIPHPVITKTSLPVAVSTGPQNKPARKTSAADNGEPNMEDDRYRLMLSRSNSENIASNYFRSKRASQILSTDARKSLTHHNSPPGLSCPLSNNSAIPPTQAPEMPQPRPFRLESLDIPFTKAKRKKSKSNFGSEPL

SEQ ID NO: 4807 - protein, 138 aa, Homo sapiens
MILQQPLQRGPQGGAQRLPRAALGVTWGLDASSPLRGAVPMSTKRRLEEEQEPLRKQFLSEENMATHFSQLSLHNDHPYCSPPMTFSPALPPLRSPCSELLLWRYPGSLIPEALRLLRLGDTPSPPYPATPAGDIMEL

SEQ ID NO: 4808 - protein, 190 aa, Homo sapiens
MFQVPDSEGGRAGSRAMKPPGGESSNLFGSPEEATPSSRPNRMASNIFGPTEEPQNIPKRTNPPGGKGSGIFDESTPVQTRQHLNPPGGKTSDIFGSPVTATSRLAHPNKPKDHVFLCEGEEPKSDLKAARSIPAGAEPGEKGSARKAGPAKEQEPMPTVDSHEPRLGPRPRSHNKVLNPPGGKSSISFY

SEQ ID NO: 4809 - protein, 229 aa, Homo sapiens
MTCCSQVPPRRRPSLALSPRLDCNGLNGVPGSIWDFVSGSFSPSPSPILSAGPPSSSSASPNGAELARVRRQLDEAKRKIRQWEESWQQVKQVCDAWQREAQEAKERARVADSDRQLALQKKEEVEAQVKQLQEELEGLGVASTLPGLRGCGDIGTIPLPKLHSLQSQLRLDLEAVDGVIFQLRAKQCVACRERAHGAVLRPCQHHILCEPCAATAPECPYCKGQPLQW

SEQ ID NO: 4810 - protein, 1819 aa, Homo sapiens
MASITQLFDDLCEALLPAAKTHLGQRSVNRKRAKRSLKKVAYNALFTNLFQDETQQLQPDMSKLPARNKILMLSFDLRVGGLGPKADRLEELVEELEAAPCCPLLEVGSVLDLLVQLAGSGPPQVLPRKRDYFLNNKHVGRNVPYSGYDCDDLSVFEMDVQSLISREECLCHSMIQETLQVMEAAPGTGLPTVGLFSFGDPCGDRFERDTRVSLFGALVHSRTYDMDVRLGLPPVPDNADLSGLAIKVPPSVDQWEDEGFQSASNLTPDSQSEPSVTPDVDLWEAALTYEASKRRCWERVGCPPGHREEPYLTEAGRDAFDKFCRLHQGELQLLAGGVLQAPQPVLVKECELVKDVLNVLIGVVSATFSLCQPAQAFVVKRGVHVSGASPESISSLLSEVAEYGTCYTRLSHFSLQPVLDSLYSKGLVFQAFTSGLRRYLQYYRACVLSTPPTLSLLTIGFLFKKLGRQLRYLAELCGVGAVLPGTCGGGPRAAFPTGVKLLSYLYQEALHNCSNEHYPVLLSLLKTSCEPYTRFIHDWVYSGVFRDAYGEFMIQVNHEYLSFRDKLYWTHGYVLISKEVEDCVPVFLKHIAHDIYVCGKTINLLKLCCPRHYLCWSDVPVPRISVIFSLEELKEIEKDCAVYVGRMERVARHSSVSKEEKELRMEIAKQELIAHAREAASRVLSALSDRQMSERMALDARKREQFQRLKEQFVKDQERRQAARQEELDDDFSYARELRDRERRLKSLEEELERKARQALVDHYSKLSAEAARREQKALWRIQRHRLESARLRFLLEDEKHIQEMLKAVSEAHQPQEPPDVLLSVHPQVTSPGPEHPEGGQGCDSGSAEQHSPAWDGWNRPGLLTPQPLKPLAVGAGGRGLQQAEGARPFSDSLSIGDFLPVGPGAEPSVQTGMVPLLEVALQTINLDLPPSAPGEAPAAASTQPSRPQEYDFSTVLRPAVATSPAPGPLQAAECSLGSSGLQLWEDSCGKMDACGSASRETLLPSHPPRRAALEEGSSQPTERLFGQVSGGGLPTGDYASEIAPTRPRWNTHGHVSDASIRVGENVSDVAPTQPRWNTHGHVSNASISLGESVSDVAPTRPRWNIHGHVSNASIRVGENVSDVAPTRPRWNTHGHVSNASIRVGENVSDVAPTRPRWNTHGHVSDASISLGESVSDMAPARPRWNTHGHVSDASISLGESVSDMAPTRPRWNTHGHVSDTSIRVGENVSDVAPIRSRCNTHGHVSDASISLGEPVSDVVSTRPRWNTHVPIPPPHMVLGALSPEAEPNTPRPQQSPPGHTSQSALSLGAQSTVLDCGPRLPVEVGPSLSSPSSGCGEGSISVGENVSDVAPTQPWWPNTPGDSVSEELGPGRSGDTEDLSPNWPLNSQEDTAAQSSPGRGEEAEASAAEAQGGEQAYLAGLAGQYHLERYPDSYESMSEPPIAHLLRPVLPRAFAFPVDPQVQSAADETAVQLSELLTLPVLMKRSITAPLAAHISLVNKAAVDYFFVELHLEAHYEALRHFLLMEDGEFAQSLSDLLFEKLGAGQTPGELLNPLVLNSVLSKALQCSLHGDTPHASNLSLALKYLPEVFAPNAPDVLSCLELRYKVDWPLNIVITEGCVSKYSGVFSFLLQLKLMMWALKDVCFHLKRTALLSHMAGSVQFRQLQLFKHEMQHFVKVIQGYIANQILHVTWCEFRARLATVGDLEEIQRAHAEYLHKAVFRGLLTEKAAPVMNVIHSIFSLVLKFRSQLISQAWGPPGGPRGAEHPNFALMQQSYNTFKYYSHFLFKVVTKLVNRGYQPHLEDFLLRINFNNYYQDA

SEQ ID NO: 4811 - protein, 749 aa, Homo sapiens
MSGSHTPACGPFSALTPSIWPQEILAKYTQKEESAEQPEFYYDEFGFRVYKEEGDEPGSSLLANSPLMEDAPQRLRWQAHLEFTHNHDVGDLTWDKIAVSLPRSEKLRSLVLAGIPHGMRPQLWMRLSGALQKKRNSELSYREIVKNSSNDETIAAKQIEKDLLRTMPSNACFASMGSIGVPRLRRVLRALAWLYPEIGYCQGTGMVAACLLLFLEEEDAFWMMSAIIEDLLPASYFSTTLLGVQTDQRVLRHLIVQYLPRLDKLLQEHDIELSLITLHWFLTAFASVVDIKLLLRIWDLFFYEGSRVLFQLTLGMLHLKEEELIQSENSASIFNTLSDIPSQMEDAELLLGVAMRLAGSLTDVAVETQRRKHLAYLIADQGQLLGAGTLTNLSQVVRRRTQRRKSTITALLFGEDDLEALKAKNIKQTELVADLREAILRVARHFQCTDPKNCSVELTPDYSMESHQRDHENYVACSRSHRRRAKALLDFERHDDDELGFRKNDIITIVSQKDEHCWVGELNGLRGWFPAKFVEVLDERSKEYSIAGDDSVTEGVTDLVRGTLCPALKALFEHGLKKPSLLGGACHPWLFIEEAAGREVERDFASVYSRLVLCKTFRLDEDGKVLTPEELLYRAVQSVNVTHDAVHAQMDVKLRSLICVGLNEQVLHLWLEVLCSSLPTVEKWYQPWSFLRSPGWVQIKCELRVLCCFAFSLSQDWELPAKREAQQPLKEGVRDMLVKHHLFSWDVDG

SEQ ID NO: 4812 - protein, 698 aa, Homo sapiens
MLSPKIRQARRARSKSLVMGEQSRSPGRMPCPHRLGPVLKAGWLKKQRSIMKNWQQRWFVLRGDQLFYYKDKDEIKPQGFISLQGTQVTELPPGPEDPGKHLFEISPGGAGEREKVPANPEALLLMASSQRDMEDWVQAIRRVIWAPLGGGIFGQRLEETVHHERKYGPRLAPLLVEQCVDFIRERGLTEEGLFRMPGQANLVRDLQDSFDCGEKPLFDSTTDVHTVASLLKLYLRELPEPVVPFARYEDFLSCAQLLTKDEGEGTLELAKQVSNLPQANYNLLRYICKFLDEVQAYSNVNKMSVQNLATVFGPNILRPQVEDPVTIMEGTSLVQHLMTVLIRKHSQLFTAPVPEGPTSPRGGLQCAVGWGSEEVTRDSQGEPGGPGLPAHRTSSLDGAAVAVLSRTAPTGPGSRCSPGKKVQTLPSWKSSFRQPRSLSGSPKGGGSSLEVPIISSGGNWLMNGLSSLRGHRRASSGDRLKDSGSVQRLSTYDNVPAPGLVPGIPSVASMAWSGASSSESSVGGSLSSCTACRASDSSARSSLHTDWALEPSPLPSSSEDPKSLDLDHSMDEAGAGASNSEPSEPDSPTREHARRSEALQGLVTELRAELCRQRTEYERSVKRIEEGSADLRKRMSRLEEELDQEKKKYIMLEIKLRNSERAREDAERRNQLLQREMEEFFSTLGSLTVGAKGARAPK

SEQ ID NO: 4813 - protein, 59 aa, Homo sapiens
MTRGNQRELARQKNMKKQSDSVKGKRRDDGLSAAARKQRDSEIMQQKQKKANEKKEEPK

SEQ ID NO: 4814 - protein, 123 aa, Homo sapiens
MARYEEVSVSGFEEFHRAVEQHNGKTIFAYFTGSKDAGGKSWCPDCVQAEPVVREGLKHISEGCVFIYCQVGEKPYWKDPNNDFRKNLKVTAVPTLLKYGTPQKLVESECLQANLVEMLFSED

SEQ ID NO: 4815 - protein, 465 aa, Homo sapiens
MGWITEDLIRRNAEHNDCVIFSLEELSLHQQEIERLEHIDKWCRDLKILYLQNNLIGKIENVSKLKKLEYLNLALNNIEKIENLEGCEELAKLDLTVNFIGELSSIKNLQHNIHLKELFLMGNPCASFDHYREFVVATLPQLKWLDGKEIEPSERIKALQDYSVIEPQIREQEKDHCLKRAKLKEEAQRKHQEEDKNEDKRSNAGFDGRWYTDINATLSSLESKDHLQAPDTEEHNTKKLDNSEDDLEFWNKPCLFTPESRLETLRHMEKQRKKQEKLSEKKKKVKPAALITEDGKALNVNEPKIDFSLKDNEKQIILDLAVYRYMDTSLIDVDVQPTYVRVMIKGKPFQLVLPAEVKPDSSSAKRSQTTGHLVICMPKVGEVITGGQRAFKSMKTTSDRSREQTNTRSKHMEKLEVDPSKHSFPDVTNIVQEKKHTPRRRPEPKIIPSEEDPTFEDNPEVPPLI

SEQ ID NO: 4816 - protein, 349 aa, Homo sapiens
MEDPQSKEPAGEAVALALLESPRPEGGEEPPRPSPEETQQCKFDGQETKGSKFITSSASDFSDPVYKEIAITNGCINRMSKEELRAKLSEFKLETRGVKDVLKKRLKNYYKKQKLMLKESNFADSYYDYICIIDFEATCEEGNPPEFVHEIIEFPVVLLNTHTLEIEDTFQQYVRPEINTQLSDFCISLTGITQDQVDRADTFPQVLKKVIDWMKLKELGTKYKYSLLTDGSWDMSKFLNIQCQLSRLKYPPFAKKWINIRKSYGNFYKVPRSQTKLTIMLEKLGMDYDGRPHCGLDDSKNIARIAVRMLQDGCELRINEKMHAGQLMSVSSSLPIEGTPPPQMPHFRK

SEQ ID NO: 4817 - protein, 280 aa, Homo sapiens
MLSAVARGYQGWFHPCARLSVRMSSTGIDRKGVLANRVAVVTGSTSGIGFAIARRLARDGAHVVISSRKQQNVDRAMAKLQGEGLSVAGIVCHVGKAEDREQLVAKALEHCGGVDFLVCSAGVNPLVGSTLGTSEQIWDKILSVNVKSPALLLSQLLPYMENRRGAVILVSSIAAYNPVVALGVYNVSKTALLGLTRTLALELAPKDIRVNCVVPGIIKTDFSKVFHGNESLWKNFKEHHQLQRIGESEDCAGIVSFLCSPDASYVNGENIAVAGYSTRL

SEQ ID NO: 4818 - protein, 302 aa, Homo sapiens
MVTEQEVDAIGQTLVDPKQPLQARFRALFTLRGLGGPGAIAWISQAFDDDSALLKHELAYCLGQMQDARAIPMLVDVLQDTRQEPMVRHEAGEALGAIGDPEVLEILKQYSSDPVIEVAETCQLAVRRLEWLQQHGGEPAAGPYLSVDPAPPAEERDVGRLREALLDESRPLFERYRAMFALRNAGGEEAALALAEGLHCGSALFRHEVGYVLGQLQHEAAVPQLAAALARCTENPMVRHECAEALGAIARPACLAALQAHADDPERVVRESCEVALDMYEHETGRAFQYADGLEQLRGAPS

SEQ ID NO: 4819 - protein, 1127 aa, Homo sapiens
MEVQVSQASLGFELTSVEKSLREWSRLSREVIAWLCPSSPNFILNFPPPPSASSVSMVQLFSSPFGYQSPSGHSEEEREGNMKSAKPQVNHSQHGESQRALSPLQSTLSSAASPSQAYETYIENGLICLKHKIRNIEKKKLKLEDYKDRLKSGEHLNPDQLEAVEKYEEVLHNLEFAKELQKTFSGLSLDLLKAQKKAQRREHMLKLEAEKKKLRTILQVQYVLQNLTQEHVQKDFKGGLNGAVYLPSKELDYLIKFSKLTCPERNESLSVEDQMEQSSLYFWDLLEGSEKAVVGTTYKHLKDLLSKLLNSGYFESIPVPKNAKEKEVPLEEEMLIQSEKKTQLSKTESVKESESLMEFAQPEIQPQEFLNRRYMTEVDYSNKQGEEQPWEADYARKPNLPKRWDMLTEPDGQEKKQESFKSWEASGKHQEVSKPAVSLEQRKQDTSKLRSTLPEEQKKQEISKSKPSPSQWKQDTPKSKAGYVQEEQKKQETPKLWPVQLQKEQDPKKQTPKSWTPSMQSEQNTTKSWTTPMCEEQDSKQPETPKSWENNVESQKHSLTSQSQISPKSWGVATASLIPNDQLLPRKLNTEPKDVPKPVHQPVGSSSTLPKDPVLRKEKLQDLMTQIQGTCNFMQESVLDFDKPSSAIPTSQPPSATPGSPVASKEQNLSSQSDFLQEPLQATSSPVTCSSNACLVTTDQASSGSETEFMTSETPEAAIPPGKQPSSLASPNPPMAKGSEQGFQSPPASSSSVTINTAPFQAMQTVFNVNAPLPPRKEQEIKESPYSPGYNQSFTTASTQTPPQCQLPSIHVEQTVHSQETAANYHPDGTIQVSNGSLAFYPAQTNVFPRPTQPFVNSRGSVRGCTRGGRLITNSYRSPGGYKGFDTYRGLPSISNGNYSQLQFQAREYSGAPYSQRDNFQQCYKRGGTSGGPRANSRAGWSDSSQVSSPERDNETFNSGDSGQGDSRSMTPVDVPVTNPAATILPVHVYPLPQQMRVAFSAARTSNLAPGTLDQPIVFDLLLNNLGETFDLQLGRFNCPVNGTYVFIFHMLKLAVNVPLYVNLMKNEEVLVSAYANDGAPDHETASNHAILQLFQGDQIWLRLHRGAIYGSSWKYSTFSGYLLYQD

SEQ ID NO: 4820 - protein, 815 aa, Homo sapiens
MEVRASLQKVSGSSDSVATMNSEEFVLVPQYADDNSTKHEEKPQLKIVSNGDEQLEKAMEEILRDSEKRPSSLLVDCQSSSEISDHSFGDIPASQTNKPSLQLILDPSNTEISTPRPSSPGGLPEEDSVLFNKLTYLGCMKVSSPRNEVEALRAMATMKSSSQYPFPVTLYVPNVPEGSVRIIDQSSNVEIASFPIYKVLFCARGHDGTTESNCFAFTESSHGSEEFQIHVFSCEIKEAVSRILYSFCTAFKRSSRQVSDVKDSVIPTPDSDVFTFSVSLEVKEDDGKGNFSPVPKDRDKFYFKLKQGIEKKVVITVQQLSNKELAIERCFGMLLSPGRNVKNSDMHLLDMESMGKSYDGRAYVITGMWNPNAPVFLALNEETPKDKQVYMTVAVDMVVTEVVEPVRFLLETVVRVYPANERFWYFSRKTFTETFFMRLKQSEGKGHTNAGDAIYEVVSLQRESDKEEPVTPTSGGGPMSPQDDEAEEESDNELSSGTGDVSKDCPEKILYSWGELLGKWHSNLGARPKGLSTLVKSGVPEALRAEVWQLLAGCHDNQAMLDRYRILITKDSAQESVITRDIHRTFPAHDYFKDTGGDGQESLYKICKAYSVYDEDIGYCQGQSFLAAVLLLHMPEEQAFCVLVKIMYDYGLRDLYRNNFEDLHCKFYQLERLMQEQLPDLHSHFSDLNLEAHMYASQWFLTLFTAKFPLCMVFHIIDLLLCEGLNIIFHVALALLKTSKEDLLQADFEGALKFFRVQLPKRYRAEENARRLMEQACNIKVPTKKLKKYEKEYQTMRESQLQQEDPMDRYKFVYL

SEQ ID NO: 4821 - protein, 212 aa, Homo sapiens
MAQTDKPTCIPPELPKMLKEFAKAAIRAQPQDLIQWGADYFEALSRGETPPVRERSERVALCNWAELTPELLKILHSQVAGRLIIRAEELAQMWKVVNLPTDLFNSVMNVGRFTEEIEWLKFLALACSALGVTITKTLKIVCEVLSCDHNGGLPRIPFSTFQFLYTYIAEVDGEICASHVSRMLNYIEQEVIGPDGLITVNDFTQNPRVWLE

SEQ ID NO: 4822 - protein, 645 aa, Homo sapiens
MASLLQDQLTTDQDLLLMQEGMPMRKVRSKSWKKLRYFRLQNDGMTVWHARQARGSAKPSFSISDVETIRNGHDSELLRSLAEELPLEQGFTIVFHGRRSNLDLMANSVEEAQIWMRGLQLLVDLVTSMDHQERLDQWLSDWFQRGDKNQDGKMSFQEVQRLLHLMNVEMDQEYAFSLFQAADTSQSGTLEGEEFVQFYKALTKRAEVQELFESFSADGQKLTLLEFLDFLQEEQKERDCTSELALELIDRYEPSDSGKLRHVLSMDGFLSYLCSKDGDIFNPACLPIYQDMTQPLNHYFICSSHNTYLVGDQLCGQSSVEGYIRALKRGCRCVEVDVWDGPSGEPVVYHGHTLTSRILFKDVVATVAQYAFQTSDYPVILSLETHCSWEQQQTMARHLTEILGEQLLSTTLDGVLPTQLPSPEELRRKILVKGKKLTLEEDLEYEEEEAEPELEESELALESQFETEPEPQEQNLQNKDKKKKSKPILCPALSSLVIYLKSVSFRSFTHSKEHYHFYEISSFSETKAKRLIKEAGNEFVQHNTWQLSRVYPSGLRTDSSNYNPQELWNAGCQMVAMNMQTAGLEMDICDGHFRQNGGCGYVLKPDFLRDIQSSFHPEKPISPFKAQTLSIPYRHLQLIFPINSV

SEQ ID NO: 4823 - protein, 2516 aa, Homo sapiens
MVGERHAGDLMVPLGPRLQAYPEELIRQRPGHDGHPEYLIRWSVLKCGEVGKVGVEEGKAEHILMWLSAPEVYANCPGLLGERALSKGLQHEPAGVSGSFPRDPGGLDEVAMGEMEADVQALVRRAARQLAESGTPSLTAAVLHTIHVLSAYASIGPLTGVFRETGALDLLMHMLCNPEPQIRRSAGKMLQALAAHDAGSRAHVLLSLSQQDGIEQHMDFDSRYTLLELFAETTSSEEHCMAFEGIHLPQIPGKLLFSLVKRYLCVTSLLDQLNSSPELGAGDQSSPCATREKSRGQRELEFSMAVGNLISELVRSMGWARNLSEQGMSPPRPTRSIFQPYISGPSLLLPTIVTTPRRQGWVFRQRSEFSSRSGYGEYVQQTLQPGMRVRMLDDYEEISAGDEGEFRQSNNGIPPVQVFWQSTGRTYWVHWHMLEILGPEEATEDKASAAVEKGAGATVLGTAFPSWDWNPMDGLYPLPYLQPEPQKNERVGYLTQAEWWELLFFIKKLDLCEQQPIFQNLWKNLDETLGEKALGEISVSVEMAESLLQVLSSRFEGSTLNDLLNSQIYTKYGLLSNEPSSSSTSRNHSCTPDPEEESKSEASFSEEETESLKAKAEAPKTEAEPTKTRTETPMAQSDSQLFNQLLVTEGMTLPTEMKEAASEMARALRGPGPRSSLDQHVAAVVATVQISSLDTNLQLSGLSALSQAVEEVTERDHPLVRPDRSLREKLVKMLVELLTNQVGEKMVVVQALRLLYLLMTKHEWRPLFAREGGIYAVLVCMQEYKTSVLVQQAGLAALKMLAVASSSEIPTFVTGRDSIHSLFDAQMTREIFASIDSATRPGSESLLLTVPAAVILMLNTEGCSSAARNGLLLLNLLLCNHHTLGDQIITQELRDTLFRHSGIAAAEPMPTTRTILMMLLNRYSEPPGSPERAALETPIIQGQDGSPELLIRSLVGGPSAELLLDLERVLCREGSPGGAVRPLLKRLQQETQPFLLLLRTLDAPGPNKTLLLSVLRVITRLLDFPEAMVLPWHEVLEPCLNCLSGPSSDSEIVQELTCFLHRLASMHKDYAVVLCCLGAKEILSKVLDKHSAQLLLGCELRDLVTECEKYAQLYSNLTSSILAGCIQMVLGQIEDHRRTHQPINIPFFDVFLRHLCQGSSVEVKEDKCWEKVEVSSNPHRASKLTDHNPKTYWESNGSTGSHYITLHMHRGVLVRQLTLLVASEDSSYMPARVVVFGGDSTSCIGTELNTVNVMPSASRVILLENLNRFWPIIQIRIKRCQQGGIDTRVRGVEVLGPKPTFWPLFREQLCRRTCLFYTIRAQAWSRDIAEDHRRLLQLCPRLNRVLRHEQNFADRFLPDDEAAQALGKTCWEALVSPLVQNITSPDAEGVSALGWLLDQYLEQRETSRNPLSRAASFASRVRRLCHLLVHVEPPPGPSPEPSTRPFSKNSKGRDRSPAPSPVLPSSSLRNITQCWLSVVQEQVSRFLAAAWRAPDFVPRYCKLYEHLQRAGSELFGPRAAFMLALRSGFSGALLQQSFLTAAHMSEQFARYIDQQIQGGLIGGAPGVEMLGQLQRHLEPIMVLSGLELATTFEHFYQHYMADRLLSFGSSWLEGAVLEQIGLCFPNRLPQLMLQSLSTSEELQRQFHLFQLQRLDKLFLEQEDEEEKRLEEEEEEEEEEEAEKELFIEDPSPAISILVLSPRCWPVSPLCYLYHPRKCLPTEFCDALDRFSSFYSQSQNHPVLDMGPHRRLQWTWLGRAELQFGKQILHVSTVQMWLLLKFNQTEEVSVETLLKDSDLSPELLLQALVPLTSGNGPLTLHEGQDFPHGGVLRLHEPGPQRSGEALWLIPPQAYLNVEKDEGRTLEQKRNLLSCLLVRILKAHGEKGLHIDQLVCLVLEAWQKGPNPPGTLGHTVAGGVACTSTDVLSCILHLLGQGYVKRRDDRPQILMYAAPEPMGPCRGQADVPFCGSQSETSKPSPEAVATLASLQLPAGRTMSPQEVEGLMKQTVRQVQETLNLEPDVAQHLLAHSHWGAEQLLQSYSEDPEPLLLAAGLCVHQAQAVPVRPDHCPVCVSPLGCDDDLPSLCCMHYCCKSCWNEYLTTRIEQNLVLNCTCPIADCPAQPTGAFIRAIVSSPEVISKYEKALLRGYVESCSNLTWCTNPQGCDRILCRQGLGCGTTCSKCGWASCFNCSFPEAHYPASCGHMSQWVDDGGYYDGMSVEAQSKHLAKLISKRCPSCQAPIEKNEGCLHMTCAKCNHGFCWRCLKSWKPNHKDYYNCSAMVSKAARQEKRFQDYNERCTFHHQAREFAVNLRNRVSAIHEVPPPRSFTFLNDACQGLEQARKVLAYACVYSFYSQDAEYMDVVEQQTENLELHTNALQILLEETLLRCRDLASSLRLLRADCLSTGMELLRRIQERLLAILQHSAQDFRVGLQSPSVEAWEAKGPNMPGSQPQASSGPEAEEEEEDDEDDVPEWQQDEFDEELDNDSFSYDESENLDQETFFFGDEEEDEDEAYD

SEQ ID NO: 4824 - protein, 491 aa, Homo sapiens
MEEIPAQEAAGSPRVQFQSLETQSECLSPEPQFVQDTDMEQGLTGDGETREENKLLIPKQKISEEVHSYKVRVGRLKHDITQVPETREVYKSEDRLERLQEILRKFLYLEREFRQITISKETFTSEKNNECHEPEKSFSLDSTIDADQRVLRIQNTDDNDKYDMSFNQNSASGKHEHLNLTEDFQSSECKESLMDLSHLNKWESIPNTEKSYKCDVCGKIFHQSSALTRHQRIHTREKPYKCKECEKSFSQSSSLSRHKRIHTREKPYKCEASDKSCEASDKSCSPSSGIIQHKKIHTRAKSYKCSSCERVFSRSVHLTQHQKIHKEMPCKCTVCGSDFCHTSYLLEHQRVHHEEKAYEYDEYGLAYIKQQGIHFREKPYTCSECGKDFRLNSHLIQHQRIHTGEKAHECNECGKAFSQTSCLIQHHKMHRKEKSYECNEYEGSFSHSSDLILQQEVLTRQKAFDCDVWEKNSSQRAHLVQHQSIHTKENS

SEQ ID NO: 4825 - protein, 902 aa, Homo sapiens
MSEFRIHHDVNELLSLLRVHGGDGAEVYIDLLQKNRTPYVTTTVSAHSAKVKIAEFSRTPEDFLKKYDELKSKNTRNLDPLVYLLSKLTEDKETLQYLQQNAKERAELAAAAVGSSTTSINVPAAASKISMQELEELRKQLGSVATGSTLQQSLELKRKMLRDKQNKKNSGQHLPIFPAWVYERPALIGDFLIGAGISTDTALPIGTLPLASQESAVVEDLLYVLVGVDGRYVSAQPLAGRQSRTFLVDPNLDLSIRELVHRILPVAASYSAVTRFIEEKSSFEYGQVNHALAAAMRTLVKEHLILVSQLEQLHRQGLLSLQKLWFYIQPAMRTMDILASLATSVDKGECLGGSTLSLLHDRSFSYTGDSQAQELCLYLTKAASAPYFEVLEKWIYRGIIHDPYSEFMVEEHELRKERIQEDYNDKYWDQRYTIVQQQIPSFLQKMADKILSTGKYLNVVRECGHDVTCPVAKEIIYTLKERAYVEQIEKAFNYASKVLLDFLMEEKELVAHLRSIKRYFLMDQGDFFVHFMDLAEEELRKPVEDITPPRLEALLELALRMSTANTDPFKDDLKIDLMPHDLITQLLRVLAIETKQEKAMAHADPTELALSGLEAFSFDYIVKWPLSLIINRKALTRYQMLFRHMFYCKHVERQLCSVWISNKTAKQHSLHSAQWFAGAFTLRQRMLNFVQNIQYYMMFEVMEPTWHILEKNLKSASNIDDVLGHHTGFLDTCLKDCMLTNPELLKVFSKLMSVCVMFTNCMQKFTQSMKLDGELGGQTLEHSTVLGLPAGAEERARKELARKHLAEHADTVQLVSGFEATINKFDKNFSAHLLDLLARLSIYSTSDCEHGMASVISRLDFNGFYTERLERLSAERSQKATPQVPVLRGPPAPAPRVAVTAQ

SEQ ID NO: 4826 - protein, 761 aa, Homo sapiens
MAMQEKYPTEGISHVTSPSSDVIQKGSSLGTEWQTPVISEPFRSRFSRCSSVADSGDTAIGTSCSDIAEDFCSSSGSPPFQPIKSHVTIPTAHVMPSTLGTSPAKPNSTPVGPSSSKLPLSGLAESVGMTRNGDLGAMKHSPGLSRDLMYFSGATGENGIEQSWFPAVGHERQEEARKFDIPSMESTLNQSAMMETLYSDPHHRVRFHNAASTSKELYRVLPEAKKAPGSGAVFERNGPHSNSSGVLPLGLQPAPGLSKPLPSQVWQPSPDTWHPREQSCELSTCRQQLELIRLQMEQMQLQNGAICHHPAAFGPSLPILEPAQWISILNSNEHLLKEKELLIDKQRKHISQLEQKVRESELQVHSALLGRPAPFGDVCLLRLQELQRENTFLRAQFAQKTEALSREKIDLEKKLSASEVEVQLIRESLKVALQKHSEEVKKQEERVKGRDKHINNLKKKCQKESEQNREKQQRIETLERYLADLPTLEDHQKQSQQLKDSELKSTELQEKVTELESLLEETQAICREKEIQLESLRQREAEFSSAGHSLQDKQSVEETSGEGPEVEMESWQKRYDSLQKIVEKQQQKMDQLRSQVQSLEQEVAQEEGTSQALREEAQRRDSALQQLRTAVKELSVQNQDLIEKNLTLQEHLRQAQPGSPPSPDTAQLALELHQELASCLQDLQAVCSIVTQRAQGHDPNLSLLLGIHSAQHPETQLDLQKPDVIKRKLEEVQQLRRDIEDLRTTMSDRYAQDMGENCVTQ

SEQ ID NO: 4827 - protein, 480 aa, Homo sapiens
MIVADSECRAELKDYLRFAPGGVGDSGPGEEQRESRARRGPRGPSAFIPVEEVLREGAESLEQHLGLEALMSSGRVDNLAVVMGLHPDYFTSFWRLHYLLLHTDGPLASSWRHYIAIMAAARHQCSYLVGSHMAEFLQTGGDPEWLLGLHRAPEKLRKLSEINKLLAHRPWLITKEHIQALLKTGEHTWSLAELIQALVLLTHCHSLSSFVFGCGILPEGDADGSPAPQAPTPPSEQSSPPSRDPLNNSGGFESARDVEALMERMQQLQESLLRDEGTSQEEMESRFELEKSESLLVTPSADILEPSPHPDMLCFVEDPTFGYEDFTRRGAQAPPTFRAQDYTWEDHGYSLIQRLYPEGGQLLDEKFQAAYSLTYNTIAMHSGVDTSVLRRAIWNYIHCVFGIRYDDYDYGEVNQLLERNLKVYIKTVACYPEKTTRRMYNLFWRHFRHSEKVHVNLLLLEARMQAALLYALRAITRYMT

SEQ ID NO: 4828 - protein, 210 aa, Homo sapiens
MPGVKLTTQAYCKMVLHGAKYPHCAVNGLLVAEKQKPRKEHLPLGGPGAHHTLFVDCIPLFHGTLALAPMLEVALTLIDSWCKDHSYVIAGYYQANERVKDASPNQVAEKVASRIAEGFSDTALIMVDNTKFTMDCVAPTIHVYEHHENRWRCRDPHHDYCEDWPEAQRISASLLDSRSYETLVDFDNHLDDIRNDWTNPEINKAVLHLC

SEQ ID NO: 4829 - protein, 352 aa, Homo sapiens
MTEAGKLPLPLPPRLDWFVHTQMGQLAQDGVPEWFHGAISREDAENLLESQPLGSFLIRVSHSHVGYTLSYKAQSSCCHFMVKLLDDGTFMIPGEKVAHTSLDALVTFHQQKPIEPRRELLTQPCRQKDPANVDYEDLFLYSNAVAEEAACPVSAPEEASPKPVLCHQSKERKPSAEMNRITTKEATSSCPPKSPLGETRQKLWRSLKMLPERGQRVRQQLKSHLATVNLSSLLDVRRSTVISGPGTGKGSQDHSGDPTSGDRGYTDPCVATSLKSPSQPQAPKDRKVPTRKAERSVSCIEVTPGDRSWHQMVVRALSSQESKPEHQGLAEPENDQLPEEYQQPPPFAPGYC

SEQ ID NO: 4830 - protein, 159 aa, Homo sapiens
MTHCCSPCCQPTCCRTTCWKPTTVTTCSSTPCCQPSCCVSSCCQPCCRPTCCQNTCCQPICVTSCCQPSCCSTPCCQPTCCGQTSCGSSCGQSSSCAPVYCRRTCYHPTTVCLPGCLNQSCGSNCCQPCCRPACCETTCCRTTCFQPTCVSSCCQPSCC

SEQ ID NO: 4831 - protein, 204 aa, Homo sapiens
MDPKDRKKIQFSVPAPPSQLDPRQVEMIRRRRPTPAMLFRLSEHSSPEEEASPHQRASGEGHHLKSKRPNPCAYTPPSLKAVQRIAESHLQSISNLNENQASEEEDELGELRELGYPREEDEEEEEDDEEEEEEEDSQAEVLKVIRQSAGQKTTCGQGLEGPWERPPPLDESERDGGSEDQVEDPALSEPGEEPQRPSPSEPGT

SEQ ID NO: 4832 - protein, 686 aa, Homo sapiens
MTDALLPAAPQPLEKENDGYFRKGCNPLAQTGRSKLQNQRAALNQQILKAVRMRTGAENLLKVATNSKVREQVRLELSFVNSDLQMLKEELEGLNISVGVYQNTEEAFTIPLIPLGLKETKDVDFAVVLKDFILEHYSEDGYLYEDEIADLMDLRQACRTPSRDEAGVELLMTYFIQLGFVESRFFPPTRQMGLLFTWYDSLTGVPVSQQNLLLEKASVLFNTGALYTQIGTRCDRQTQAGLESAIDAFQRAAGVLNYLKDTFTHTPSYDMSPAMLSVLVKMMLAQAQESVFEKISLPGIRNEFFMLVKVAQEAAKVGEVYQQLHAAMSQAPVKENIPYSWASLACVKAHHYAALAHYFTAILLIDHQVKPGTDLDHQEKCLSQLYDHMPEGLTPLATLKNDQQRRQLGKSHLRRAMAHHEESVREASLCKKLRSIEVLQKVLCAAQERSRLTYAQHQEEDDLLNLIDAPSVVAKTEQEVDIILPQFSKLTVTDFFQKLGPLSVFSANKRWTPPRSIRFTAEEGDLGFTLRGNAPVQVHFLDPYCSASVAGAREGDYIVSIQLVDCKWLTLSEVMKLLKSFGEDEIEMKVVSLLDSTSSMHNKSATYSVGMQKTYSMICLAIDDDDKTDKTKKISKKLSFLSWGTNKNRQKSASTLCLPSVGAARPQVKKKLPSPFSLLNSDSSWY

SEQ ID NO: 4833 - protein, 417 aa, Homo sapiens
MPLYEGLGSGGEKTAVVIDLGEAFTKCGFAGETGPRCIIPSVIKRAGMPKPVRVVQYNINTEELYSYLKEFIHILYFRHLLVNPRDRRVVIIESVLCPSHFRETLTRVLFKYFEVPSVLLAPSHLMALLTLGINSAMVLDCGYRESLVLPIYEGIPVLNCWGALPLGGKALHKELETQLLEQCTVDTSVAKEQSLPSVMGSVPEGVLEDIKARTCFVSDLKRGLKIQAAKFNIDGNNERPSPPPNVDYPLDGEKILHILGSIRDSVVEILFEQDNEEQSVATLILDSLIQCPIDTRKQLAENLVVIGGTSMLPGFLHRLLAEIRYLVEKPKYKKALGTKTFRIHTPPAKANCVAWLGGAIFGALQDILGSRSVSKEYYNQTGRIPDWCSLNNPPLEMMFDVGKTQPPLMKRAFSTEK

SEQ ID NO: 4834 - protein, 877 aa, Homo sapiens
MSQPAGGRRKAALGPPVCSIRPFKSSEQYLEAMKEDLAEWLRDLYGLDIDAANFLQVLETGLVLCQHANVVTDAALAFLAEAPAQAQKIPMPRVGVSCNGAAQPGTFQARDNVSNFIQWCRKEMGIQEVLMFETEDLVLRKNVKNVVLCLLELGRRAWRFGVAAPTLVQLEEEIEEEVRRELALPPPDPSPPAPPRRQPCHFRNLDQMVQSLVSHCTCPVQFSMVKVSEGKYRVGDSNTLIFIRILRNHVMVRVGGGWDTLGHYLDKHDPCRCTSLSHKPGSFLKPPAPPVQHEVRVQDGPSQTQPTMTISRSQSPPPPVDWKTYTSSDRRLRPPTPSSPRPRRERGAGTGASREMAPFLRCQERSLIPSWRQPTAGDSPPSPQSSSTQKGRDPQCTSSGKREERYPPELPRGRIPTSWVHEETDSWGTDAGNPTPQRLRAIEATTKGISARGPSPLPRSFGPAECLGLRLPLRDEAKGAFFQFREPESVRSPTPVQGLTKIPIRLPPARPPTPGRSFPGATSGSAAELGRDPIPLRAVTVDLAGSTHGDCSVEVRQEDQQLDIQVMAEARESWDLGLQEQEGRYTPLPLGGNKEQAIYCSLEEEILGNMKLLEVRSACPQGTRSGVIPRSGVYIPRLAGQWPEPGGPYDKAIQELAQGSPSLLKVDLEAWKAAPTGSPKPAVTPGPGSLKGKLGARQSGAAKASLSAKGTHMRKVPPQGGQDCSASTVSASPEAPTPSPLDPNSDKAKACLSKGRRTLRKPKRVPSIYKLKLRPRIRPRRDHRPEKQPSRIPRPLAYVFLGPARQPPKDRLLRAVLGSKGGEASRVDGASVGEEEEEGKEEKEPAAPLESSPQPPEGLQPHWLNQAPLPPEEESWV

SEQ ID NO: 4835 - protein, 4753 aa, Homo sapiens
MVPEERRVGLSSDETSSDSLKSWHSICVLDSKEQPLACQQKQRQFVKPVTESEQPTVLELLLAELRTLFSAVLQDSSPAAWRYLHAVLGLLPPYRELLVGHLDLLPFLEQLYCWAPWVQTHLHLDLLGAIVQAFPPDSSLLDSASHADCCPQKRRLHHRPPCPACPFVQAQWSRQQVKEELATWLRPLTLPELQRCLGIVGAQVALEEAVWLDGLSLLPLALAADIPVRYESSDTDNAEVEPVGRKETRSQLDYEVPREKAFQKSSTGFSPETSFLDSQVMTALKMERYLKKIHFLYLNVAPSRYFRPYSLMVVPPDKVNPEHYIFSPFGILHVHPVEGSETMTLGTWHHHCVLWQQLQFIPFFKYCLLRKSFTCWKKNVRLQGLHRLQKFLENHLLLAVPHFGAGLLHISRLLQELHSVSWLPQELDRCYELLDLQTALAEEKHKALRLLHRCLNLCTSILRLVHEDTYHMQQCLQERVQNCDRIRTGQGSIYLQRVQHKQLEQKLKQAEAWWLQLGKFARLVDYMICQSLISVLEEQITSFVANILQAPRQKPFLSSQLVFDDHGQLSHVPCVENMIQTLTGGLQSVKTSALQVVQSADLKTSSDSLYSEEEDEEEDSKDEFLMPKFQGQPSDAVSIFCGPNVGLVWPWKSHPIAGILEVRGCRLRGQYFPHNYKQLEEDLDNNPKIQQALNIQQVLLEGVLCKVQEFCREHHWITGIYEFLQSWGPQKLEDMRGGPIKNYVTLVSRLNVWQARVSSMPIELLTKGGLLLLSCHDVQAEMESKLNSIRKDILAHVQNECWNLSQQLMTELTDFMHIFRTINSDIHAIAQCTQKLNEANEQYVELEERMEYVRALHELIRNHFSLFSAENEALDISVRRQFGESPIPPCPPPPQPHLLHCPLLAPQLLDMWEAFQFEKSQASEFLLSKRHAIMPKLQQLMAAALAELEGLLAKALSGPFMDPTQDQRSTEHQLVSLERQFQNTVSDLSELHHAYAIFTEDETPVPLPICGTRPIVQQQRIWHLYRVISENISEWKCMAFAKFSPAMAQEKTEGWLTEAARMSTTLELHSPVLQHCMRILGEFRSYLPLLTKLGSLHPQSLNCQCLLRALGLGSLQTIELLTLGQLLTYPLLEFADRINQVWQNENERIHAQETIRRLQRYWEARQLRLLNFILHVPYEPPASERSKRQVLRSPQWEVVDKDSGTFILSDYSNLQDSIQESLQVLSKILAIEKSGDLNKIALEWVAIMHGLGALLEVWLTFQQKWIFLNKVLHEMKIQFPNADLNSRFKVMDDQYRTLMRISVADPMVLSLVVPSAERSPYFQGQQLQQLLQAGSVELEGIIMSLESVLYGVCAHFPRLFFLSDSELVALLAARLESCEAQLWVRRCFPHVHAVSFRSCPTGEKNTDDWESSPNTQTQVEALAVLGAGGEEVKLQGPLPLHPDLPKWLASLEKCLRLALVHMLQGCVAARLARGPSLGEALKQLPKQNKLYLQLYVQHWIDLVQAFPWQCVLVAEEVVWRAEMEEALLEWGTLAMVSMHMRKLEVLVNFMRAQRASQGGQSLPSVRQTSLLSALLVMAVTHRDIAQLLEQHQVSDLTDFHWVRQLKYHLGSPHIIPKSPLQSLKTIASSEPSLSPAACWIDVLGRSFLYNYEYLGPRLGPLPSLLPERPALVLLLALEEVACGTVLGPNGVGKRAIVNSLAQALGRQLVMLPCSPQIEAQCLSNYLNGALQGGAWLLLEKVHQLPPGLLSALGQRLGELHHLYAPLYQEASRNTSTIDPTQPQLLGSSFFEKHHVSVRLGYGCLLVLRALSSAVPANLHLLLRPVALALPDLRQVAELTLLGAGMRDAFQMATRLSKFFSLERELVSGPLPCRLPLLKQILEDTIRTLNVTKEEPKCQKPRSLAAIEEAALLRSPLFSILNGLHLHNLRGLLCALFPSASQVLAEPMTYKLMKPLVVEELQQVGLDPSPDILGSLEQLSQALSRASGILLLGPAGSGKTTCWHSLFKIQNRLAAMEDTSTQGCQPVEITHLYPSGLSPQEFLGWLEGSCWHHGIFPKVLRAAGQCNNMGQKRQTEESIGIQHWIICDGASNGAWLDSITCLLSELPQLSLPSGQQIARPPGTFLLMEVADTTGISPTVVGCCALVWCGGEQTWQCILSALMASLPYEYRLQHRTVAELNHMAEVLVPATLRFLTCQGVSSLLQVHGQQAVCAGVAEVTSMARILHSLLDLHLRLKEEKAPGPEDLSYSDPVAQSFRSSKSSFLNRSQVDSDDVPDKCREHLLAVSSFLFALIWGFGAHLPSRFWPIFDTFIRDSISRLSNYPEPPPSALVFDLHVSPEDGTLVPFTGQYLSSHIKGTLGTFHPSIQTERLLYVVDLLLSGGQPVLLAGEAATGKSAFVEVLVEPHHPYIYSPIHPAFSSSHLRLLLSRGIQGQTQASPQPGHHQDSKPSLLFLLEDLHLATSDPEKSCQPVLETLRQAMDGTVYAHSTLELQTLQPTVNFLATVTVPGYCERPLCPRLFRLFTVLALESMTQATLLERHVPIIQAWLERFPSVERERALARGLVRASVEAWEAVCNCFMPSPLHPHYHFSLHSVSHLLSSLQLLPNRTGSRGFVDYPNHQEHLRRVSGLRGTCLTVMMATRNVVRLWLHEAQRTFCDRLDSPRERSYCAKLLLVVAQSVFCCGPGPQHLGKDHQESEEEEEEERVPEVESEGELAQWEDFSNSNSETEEEEEPYGLQVARVSNSRDPSLTPSIGPVSRGMKESISHKIRQEKGTRASNYRLQVRRSFKTWWQKKPQMDLISPLLLPVLLLHPQEKPSDLVFSQELILGPNSETPNLYLERQWEKLEEQLATSAAQLKLSPHLARCHSMAQHVARLVRVLARPRQHGLLLSGALGTGRHTAITLASSICQAHFFHLPSGSEEAILQCLRDASWHAGMLSQPVALLVPSGVDLTTLHRLLALATSGSFPGQYTEADLDRIGEHLPRENLGVKQNIKKEMVLQRFHQQVCSHLHLFFLIGDKQAHKQLPSTLFLRLLQLATASIDRYEPWDQAALAKVAQHHLEGAQSVPLDDGSWKYPDLQASIPSVAKAMALIHLSATHYHEHLCPALPLVTPKTFLDFLDTFLMLQQQTILKIKNKAQRVQNALENLRMLIKEHGTHANLIFDLEQQLKDSGKSLSMFQQQLEQSKLLYKQQLEECRHQENLIENLARQRDALQAQREAFLEQMSKAFLEPLSQLQVADFEEIRSYRAPPESVVRVTDAMCDLFHHETGWASAKQLLCTEDFYQELVFFPKEKITDSELIKLHLILKAPGMDDAALRAVSRPAASLAAWLWAVLHYGLAHCRGLPTDLLLQQVEATLTREQARLGYYQFQAQETLEHNLALAKMVEDAQASHNCVAKTLSQAQCGQYHKWPMKAALLTPMRAWTTQLQKLKGRCMTVFGDTLLCSAAIIYLGPFPPLRRQELLDEWLALCRGFQEALGPDDVAQALKRKQKSVSIPPKNPLLATHSPFSILSLLSSESEQYQWDGNLKPQAKSAHLAGLLLRSPTHYSSCRWPLLLDPSNEALIWLDPLPLEENRSFAPALTEGRGKGLMRNQKRESKTDMKEEDDESEESNEAEDQTKEQKAEERKNEQEKEQEENEEKEEEKTESQGSKPAYETQLPSLPYLSVLSGADPELGSQLQEAAACGLPVLLTNVELGLGCEELQWLLQREQLSPPQVQPGFCLYLSTTLSLCAMEKVLGCELLKGLNVLDLGLNMEILEEQMLHEILCREYPELETRWQDLKIRALDTCKAVEAAEERLLTMLLFQNPKRQKPAKFLRNIVRAQGKLCQLRAHCEELEGQKLQEMVLWAPYRPVVWHGMAMVKALSQLQNLLPLFCMSPENWLAVTKQALDSMKPREINHGEDLASHLLQLRAHLTRQLLGSTVTALGLTQVPLVGALGALALLQATGKASELERLALWPGLAASPSTVHSKPVSDVARPAWLGPKAWHECEMLELLPPFVGLCASLAGHSSAWQAYLSLSSTVLGPAPGPGPEPLSLLQKLILWRVLRPECLAGALADFTTSLLGRPLDENTYAPTMPFKHSQATQPMLILLPPPGHPSATLHPLTVIQKLAAKYQQGQKQLQVIALGSEAWDPVSVVVSTLSQAMYEGHWLVLDNCHLMPHWPKELLQLLLELLGRAKVVADLESEQLLDQPESRNVSTVHRDFRLWLIVPAESSASLPAVLTQHSMPVFWNQSLELGHVLIDSVELAQQVLYMQPPTQALPLLLLHGLLLHRQLYGTRLQAHRGRWSQVTLTQVLQTQDQLWASLSNPRAAMQELAASVFYGGPLGDTEDREALISLTQACLSPSSGSWVQPHTPQSLLATLMPLPELRELDAMAECKAQMHLLPSPPEPRLCGLSEGPQAWLLRRQSRALLSALQRSSPVWVPESRRGAQLAERRLRQRLVQVNRRLESLQDLLTHVIRQDESDAPWSVLGPNARRPLEGVLETEALELSQLVGTLQRDLDCLLQQLKGAPPCPSRRCAAVAHALWTGRLPLPWRPHAPAGPQPPWHWLRQLSRRGQLLVRYLGVGADASSDVPERVFHLSAFRHPRRLLLALRGEAALDQNVPSSNFPGSRGSVSSQLQYKRLEMNSNPLHFRVENGPNPTVPERGLLLIGLQVLHAEWDPIAGALQDSPSSQPSPLPPVSISTQAPGTSDLPAPADLTVYSCPVYMGGPLGTAKLQSRNIVMHLPLPTKLTPNTCVQRRVHVCSPPLS

SEQ ID NO: 4836 - protein, 392 aa, Homo sapiens
MDLFGDLPEPERSPRPAAGKEAQKGPLLFDDLPPASSTDSGSGGPLLFDDLPPASSGDSGSLATSISQMVKTEGKGAKRKTSEEEKNGSEELVEKKVCKASSVIFGLKGYVAERKGEREEMQDAHVILNDITEECRPPSSLITRVSYFAVFDGHGGIRASKFAAQNLHQNLIRKFPKGDVISVEKTVKRCLLDTFKHTDEEFLKQASSQKPAWKDGSTATCVLAVDNILYIANLGDSRAILCRYNEESQKHAALSLSKEHNPTQYEERMRIQKAGGNVRDGRVLGVLEVSRSIGDGQYKRCGVTSVPDIRRCQLTPNDRFILLACDGLFKVFTPEEAVNFILSCLEDEKIQTREGKSAADARYEAACNRLANKAVQRGSADNVTVMVVRIGH

SEQ ID NO: 4837 - protein, 730 aa, Homo sapiens
MFGRKRSVSFGGFGWIDKTMLASLKVKKQELANSSDATLPDRPLSPPLTAPPTMKSSEFFEMLEKMQGIKLEEQKPGPQKNKDDYIPYPSIDEVVEKGGPYPQVILPQFGGYWIEDPENVGTPTSLGSSICEEEEEDNLSPNTFGYKLECKGEARAYRRHFLGKDHLNFYCTGSSLGNLILSVKCEEAEGIEYLRVILRSKLKTVHERIPLAGLSKLPSVPQIAKAFCDDAVGLRFNPVLYPKASQMIVSYDEHEVNNTFKFGVIYQKARQTLEEELFGNNEESPAFKEFLDLLGDTITLQDFKGFRGGLDVTHGQTGVESVYTTFRDREIMFHVSTKLPFTDGDAQQLQRKRHIGNDIVAIIFQEENTPFVPDMIASNFLHAYIVVQVETPGTETPSYKVSVTAREDVPTFGPPLPSPPVFQKGPEFREFLLTKLTNAENACCKSDKFAKLEDRTRAALLDNLHDELHAHTQAMLGLGPEEDKFENGGHGGFLESFKRAIRVRSHSMETMVGGQKKSHSGGIPGSLSGGISHNSMEVTKTTFSPPVVAATVKNQSRSPIKRRSGLFPRLHTGSEGQGDSRARCDSTSSTPKTPDGGHSSQEIKSETSSNPSSPEICPNKEKPFMKLKENGRAISRSSSSTSSVSSTAGEGEAMEEGDSGGSQPSTTSPFKQEVFVYSPSPSSESPSLGAAATPIIMSRSPTDAKSRNSPRSNLKFRFDKLSHASSGAGH

SEQ ID NO: 4838 - protein, 369 aa, Homo sapiens
MWSGRKLGSSGGWFLRVLGPGGCNTKAARPLISSAVYVKNQLSGTLQIKPGVFNEYRTIWFKSYRTIFSCLNRIKSFRYPWARLYSTSQTTVDSGEVKTFLALAHKWWDEQGVYAPLHSMNDLRVPFIRDNLLKTIPNHQPGKPLLGMKILDVGCGGGLLTEPLGRLGASVIGIDPVDENIKTAQCHKSFDPVLDKRIEYRVCSLEEIVEETAETFDAVVASEVVEHVIDLETFLQCCCQVLKPGGSLFITTINKTQLSYALGIVFSEQIASIVPKGTHTWEKFVSPETLESILESNGLSVQTVVGMLYNPFSGYWHWSENTSLNYAAYAVKSRVQEHPASAEFVLKGETEELQANACTNPAVHEKLKK

SEQ ID NO: 4839 - protein, 592 aa, Homo sapiens
MEGCMGEESFQMWELNRRLEAYLARVKALEEQNELLSAELGGLRAQSADTSWRAHADDELAALRALVDQRWREKHAAEVARDNLAEELEGVAGRCQQLRLARERTTEEVARNRRAVEAEKCARAWLSSQVAELERELEALRVAHEEERVGLNAQAACAPRCPAPPRGPPAPAPEVEELARRLGEAWRGAVRGYQERVAHMETSLGQARERLGRAVQGAREGRLELQQLQAERGGLLERRAALEQRLEGRWQERLRATEKFQLAVEALEQEKQGLQSQIAQVLEGRQQLAHLKMSLSLEVATYRTLLEAENSRLQTPGGGSKTSLSFQDPKLELQFAAPEGRRLGSLLPVLSPTSLPSPLPATLETPVPAFLKNQEFLQARTPTLASTPIPPTPQAPSPAVDAEIRAQDAPLSLLQTQGGRKQAPEPLRAEARVAIPASVLPGPEEPGGQRQEASTGQSPEDHASLAPPLSPDHSSLEAKDGESGGSRVFSICRGEGEGQIWGLVEKETAIEGKVVSSLQQEIWEEEDLNRKEIQDSQVPLEKETLKSLGEEIQESLKTLENQSHETLERENQECPRSLEEDLETLKSLEKKK

SEQ ID NO: 4840 - protein, 1151 aa, Homo sapiens
MMAAALGPPEVIAQLENAAKVLMAPPSMVNNEQRQHAEHIFLSFRKSKSPFAVCKHILETSKVDYVLFQAATAIMEAVVREWILLEKGSIESLRTFLLTYVLQRPNLQKYVREQILLAVAVIVKRGSLDKSIDCKSIFHEVSQLISSGNPTVQTLACSILTALLSEFSSSSKTSNIGLSMEFHGNCKRVFQEEDLRQIFMLTVEVLQEFSRRENLNAQMSSVFQRYLALANQVLSWNFLPPNLGRHYIAMFESSQNVLLKPTESWRETLLDSRVMELFFTVHRKIREDSDMAQDSLQCLAQLASLHGPIFPDEGSQVDYLAHFIEGLLNTINGIEIEDSEAVGISSIISNLITVFPRNVLTAIPSELFSSFVNCLTHLTCSFGRSAALEEVLDKDDMVYMEAYDKLLESWLTLVQDDKHFHKGFFTQHAVQVFNSYIQCHLAAPDGTRNLTANGVASREEEEISELQEDDRDQFSDQLASVGMLGRIAAEHCIPLLTSLLEERVTRLHGQLQRHQQQLLASPGSSTVDNKMLDDLYEDIHWLILVTGYLLADDTQGETPLIPPEIMEYSIKHSSEVDINTTLQILGSPGEKASSIPGYNRTDSVIRLLSAILRVSEVESRAIRADLTHLLSPQMGKDIVWFLKRWAKTYLLVDEKLYDQISLPFSTAFGADTEGSQWIIGYLLQKVISNLSVWSSEQDLANDTVQLLVTLVERRERANLVIQCENWWNLAKQFASRSPPLNFLSSPVQRTLMKALVLGGFAHMDTETKQQYWTEVLQPLQQRFLRVINQENFQQMCQQEEVKQEITATLEALCGIAEATQIDNVAILFNFLMDFLTNCIGLMEVYKNTPETVNLIIEVFVEVAHKQICYLGESKAMNLYEACLTLLQVYSKNNLGRQRIDVTAEEEQYQDLLLIMELLTNLLSKEFIDFSDTDEVFRGHEPGQAANRSVSAADVVLYGVNLILPLMSQDLLKFPTLCNQYYKLITFICEIFPEKIPQLPEDLFKSLMYSLELGMTSMSSEVCQLCLEALTPLAEQCAKAQETDSPLFLATRHFLKLVFDMLVLQKHNTEMTTAAGEAFYTLVCLHQAEYSELVETLLSSQQDPVIYQRLADAFNKLTASSTPPTLDRKQKMAFLKSLEEFMANVGGLLCVK

SEQ ID NO: 4841 - protein, 525 aa, Homo sapiens
MAAGGSGGRASCPPGVGVGPGTGGSPGPSANAAATPAPGNAAAAAAAAAAAAAAPGPTPPAPPGPGTDAQAAGAERAEEAAGPGAAALQREAAYNWQASKPTVQERFAFLFNNEVLCDVHFLVGKGLSSQRIPAHRFVLAVGSAVFDAMFNGGMATTSTEIELPDVEPAAFLALLKFLYSDEVQIGPETVMTTLYTAKKYAVPALEAHCVEFLKKNLRADNAFMLLTQARLFDEPQLASLCLENIDKNTADAITAEGFTDIDLDTLVAVLERDTLGIREVRLFNAVVRWSEAECQRQQLQVTPENRRKVLGKALGLIRFPLMTIEEFAAGPAQSGILVDREVVSLFLHFTVNPKPRVEFIDRPRCCLRGKECSINRFQQVESRWGYSGTSDRIRFSVNKRIFVVGFGLYGSIHGPTDYQVNIQIIHTDSNTVLGQNDTGFSCDGSASTFRVMFKEPVEVLPNVNYTACATLKGPDSHYGTKGLRKVTHESPTTGAKTCFTFCYAAGNNNGTSVEDGQIPEVIFYT

SEQ ID NO: 4842 - protein, 174 aa, Homo sapiens
MATVAELKAVLKDTLEKKGVLGHLKARIRAEVFNALDDDREPRPSLSHENLLINELIREYLEFNKYKYTASVLIAESGQPVVPLDRQFLIHELNAFEESKDNTIPLLYGILAHFLRGTKDGIQNAFLKGPSLQPSDPSLGRQPSRRKPMDDHLRKEEQKSTNIEDLHVSQAVNR

SEQ ID NO: 4843 - protein, 418 aa, Homo sapiens
MAGSLPPCVVDCGTGYTKLGYAGNTEPQFIIPSCIAIRESAKVVDQAQRRVLRGVDDLDFFIGDEAIDKPTYATKWPIRHGIIEDWDLMERFMEQVVFKYLRAEPEDHYFLMTEPPLNTPENREYLAEIMFESFNVPGLYIAVQAVLALAASWTSRQVGERTLTGIVIDSGDGVTHVIPVAEGYVIGSCIKHIPIAGRDITYFIQQLLREREVGIPPEQSLETAKAIKEKYCYICPDIVKEFAKYDVDPRKWIKQYTGINAINQKKFVIDVGYERFLGPEIFFHPEFANPDFMESISDVVDEVIQNCPIDVRRPLYKNVVLSGGSTMFRDFGRRLQRDLKRVVDARLRLSEELSGGRIKPKPVEVQVVTHHMQRYAVWFGGSMLASTPEFFQVCHTKKDYEEYGPSICRHNPVFGVMS

SEQ ID NO: 4844 - protein, 347 aa, Homo sapiens
MAAAEPASSGQQAPAGQGQGQRPPPQPPQAQAPQPPPPPQLGGAGGGSSRHEKSLGLLTTKFVSLLQEAKDGVLDLKAAADTLAVRQKRRIYDITNVLEGIDLIEKKSKNSIQWKGVGAGCNTKEVIDRLRYLKAEIEDLELKERELDQQKLWLQQSIKNVMDDSINNRTFSYVTHEDICNCFNGDTLLAIQAPSGTQLEVPIPEMGQNGQKKYQINLKSHSGPIHVLLINKESSSSKPVVFPVPPPDDLTQPSSQSLTPVTPQKSSMATQNLPEQHVSERSQALQQTSATDISSAGSISGDIIDELMSSDVFPLLRLSPTPADDYNFNLDDNEGVCDLFDVQILNY

SEQ ID NO: 4845 - protein, 211 aa, Homo sapiens
MCPGNWLWASMTFMARFSRSSSRSPVRTRGTLEEMPTVQHPFLNVFELERLLYTGKTACNHADEVWPGLYLGDQDMANNRRELRRLGITHVLNASHSRWRGTPEAYEGLGIRYLGVEAHDSPAFDMSIHFQTAADFIHRALSQPGGKILVHCAVGVSRSATLVLAYLMLYHHLTLVEAIKKVKDHRGIIPNRGFLRQLLALDRRLRQGLEA

SEQ ID NO: 4846 - protein, 315 aa, Homo sapiens
MPGLSCRFYQHKFPEVEDVVMVNVRSIAEMGAYVSLLEYNNIEGMILLSELSRRRIRSINKLIRIGRNECVVVIRVDKEKGYIDLSKRRVSPEEAIKCEDKFTKSKTVYSILRHVAEVLEYTKDEQLESLFQRTAWVFDDKYKRPGYGAYDAFKHAVSDPSILDSLDLNEDEREVLINNINRRLTPQAVKIRADIEVACYGYEGIDAVKEALRAGLNCSTENMPIKINLIAPPRYVMTTTTLERTEGLSVLSQAMAVIKEKIEEKRGVFNVQMEPKVVTDTDETELARQMERLERENAEVDGDDDAEEMEAKAED

SEQ ID NO: 4847 - protein, 105 aa, Homo sapiens
MAGQEDPVQREIHQDWANREYIEIITSSIKKIADFLNSFDMSCRSRLATLNEKLTALERRIEYIEARVTKGETLRTVPCCCWEVALHNTGHMGKAPAAFSSFLSP

SEQ ID NO: 4848 - protein, 633 aa, Homo sapiens
MAAAAAAATTAACSSGSAGTDAAGASGLQQPPPQPQPQPAAAAPAQPPPEPPRKPRMDPRRRQAALSFLTNISLDGRLPPQDAEWGGGEEGGAAKPGAGGACGARTRFSLLAAAERGGCIALAAPGTPAAGLAAGSGPCLPQPSSLPPLIPGGHATVSGPGVARGFASPLGAGRASGEQWQPPRPAPLAACAQLQLLDGSGAAGQEELEEDDAFISVQVPAAAFLGSGTPGSGSGSRGRLNSFTQGILPIAFSRPTSQNYCSLEQPGQGGSTSAFEQLQRSRRRLISQRSSLETLEDIEENAPLRRCRTLSGSPRPKNFKKIHFIKNMRQHDTRNGRIVLISGRRSFCSIFSVLPYRDSTQVGDLKLDGGRQSTGAVSLKEIIGLEGVELGADGKTVSYTQFLLPTNAFGARRNTIDSTSSFSQFRNLSHRSLSIGRASGTQGSLDTGSDLGDFMDYDPNLLDDPQWPCGKHKRVLIFPSYMTTVIDYVKPSDLKKDMNETFKEKFPHIKLTLSKIRSLKREMRKLAQEDCGLEEPTVAMAFVYFEKLALKGKLNKQNRKLCAGACVLLAAKIGSDLKKHEVKHLIDKLEEKFRLNRRELIAFEFPVLVALEFALHLPEHEVMPHYRRLVQSS

SEQ ID NO: 4849 - protein, 1140 aa, Homo sapiens
MTTAVERKYINIRKRLDQLGYRQTLTVECLPLVEKLFSDLVHTTESLRQSKLSAVKAEKESANFDFVLEPYKLENARLSRENNELYLELMKLREHSDQHVKELKTSLKKCARETADLKFLNNQYAHKLKLLEKESKAKNERIQQLQEKNLHAVVQTPGGKKRSIAFRRQRMQIDEPVPPSEVSSYPVPQPDDPYIADLLQVADNRIQELQQEVHQLQEKLAMMESGVRDYSKQIELREREIERLSVALDGGRSPDVLSLESRNKTNEKLIAHLNIQVDFLQQANKDLEKRIRELMETKETVTSEVVNLSNKNEKLCQELTEIDQLAQQLERHKEEVLETADKELGEAKKEIKRKLSEMQDLEETMAKLQLELNLCQKEKERLSDELLVKSDLETVVHQLEQEKQRLSKKVESFAVTERQLTLEVERMRLEHGIKRRDRSPSRLDTFLKGIEEERDYYKKELERLQHIIQRRSCSTSYSAREKSSIFRTPEKGDYNSEIHQITRERDELQRMLERFEKYMEDIQSNVKLLTAERDKLSVLYNEAQEELSALRKESTQTTAPHNIVSLMEKEKELALSDLRRIMAEKEALREKLEHIEEVSLFGKSELEKTIEHLTCVNHQLESEKYELKSKVLIMKETIESLENKLKVQAQKFSHVAGDSSHQKTEVNSLRIVNEQLQRSVDDYQHRLSIKRGELESAQAQIKILEEKIDELNLKMTSQDEEAHVMKKTIGVIDKEKDFLQETVDEKTEKIANLQENLANKEKAVAQMKIMISECESSVNQLKETLVNRDREINSLRRQLDAAHKELDEVGRSREIAFKENRRLQDDLATMARENQEISLELEAAVQEKEEMKSRVHKYITEVSRWESLMAAKEKENQDLLDRFQMLHNRAEDWEVKAHQAEGESSSVRLELLSIDTERRHLRERVELLEKEIQEHINAHHAYESQISSMAKAMSRLEEELRHQEDEKATVLNDLSSLRELCIKLDSGKDIMTQQLNSKNLEFERVVVELENVKSESDLLKKQLSNERHTVKNLESLLATNRDKEFHSHLTSHEKDTEIQLLKEKLTLSESKLTSQSRENTMLRAKVAQLQTDYDALKRQISTERYERERAIQEMRRHGLATPPLSSTLRSPSHSPEHRNV

SEQ ID NO: 4850 - protein, 503 aa, Homo sapiens
MPNVAETERSNDSGNGEHKSERKSPEENLQGAVKSFCTSASGAPLGPKGDGHYPWSCPVTHTREKIYAICSDYAFLNQATSIYKTPNPSRSPCLPDSTSLSAGNNSSRYIGIPTSTSEIIYNEENSLENLSNSLGKLPLAWEIDKSEFDGVTTNSKHKSGNAKKQVSKRKTSDKKGRYQKECPQHSPLEDIKQRKVLDLRRWYCISRPQYKTSCGISSLISCWNFLYSTMGAGNLPPITQEEALHILGFQPPFEDIRFGPFTGNTTLMRWFRQINDHFHVKGCSYVLYKPHGKNKTAGETASGALSKLTRGLKDESLAYIYHCQNHYFCPIGFEATPVKANKAFSRGPLSPQEVEYWILIGESSRKHPAIHCKKWADIVTDLNTQNPEYLDIRHLERGLQYRKTKKVGGNLHCIIAFQRLNWQRFGLWNFPFGTIRQESQPPTHAQGIAKSESEDNISKKQHGRLGRSFSASFHQDSAWKKMSSIHERRNSGYQGYSDYDGND

SEQ ID NO: 4851 - protein, 270 aa, Homo sapiens
MEAEELEQEREQLRLQLWEAYCQVRYLCSHLRGNDSADSAVSTDSSMDESSETSSAKDVPAGSLRTALNELKRLIQSIVDGMEPTGSRRLDDDSLEEQIRQTSEDSRALRELMEGERGKLRQSLEELQRLHSQVTLLSVEMTALKEERDRLRVTSEDKEPKEQLQKAIRDRDEAIAKKNAVELELAKCRMDMMSLNSQLLDAIQQKLNLSQQLEAWQDDMHRVIDRQLMDTHLKERSQPAAALCRGHSAGRGDEPSIAEGKRLFSFFRKI

SEQ ID NO: 4852 - protein, 792 aa, Homo sapiens
MLPAGEIGASPAAPCCSESGDERKNLEEKSDINVTVLIGSKQVSEGTDNGDLPSYVSAFIEKEVGNDLKSLKKLDKLIEQRTVSKMQLEEQVLTISSEIPKRIRSALKNAEESKQFLNQFLEQETHLFSAINSHLLTAQPWMDDLGTMISQIEEIERHLAYLKWISQIEELSDNIQQYLMTNNVPEAASTLVSMAELDIKLQESSCTHLLGFMRATVKFWHKILKDKLTSDFEEILAQLHWPFIAPPQSQTVGLSRPASAPEIYSYLETLFCQLLKLQTSDELLTEPKQLPEKYSLPASPSVILPIQVMLTPLQKRFRYHFRGNRQTNVLSKPEWYLAQVLMWIGNHTEFLDEKIQPILDKVGSLVNARLEFSRGLMMLVLEKLATDIPCLLYDDNLFCHLVDEVLLFERELHSVHGYPGTFASCMHILSEETCFQRWLTVERKFALQKMDSMLSSEAAWVSQYKDITDVDEMKVPDCAETFMTLLLVITDRYKNLPTASRKLQFLELQKDLVDDFRIRLTQVMKEETRASLGFRYCAILNAVNYISTVLADWADNVFFLQLQQAALEVFAENNTLSKLQLGQLASMESSVFDDMINLLERLKHDMLTRQVDHVFREVKDAAKLYKKERWLSLPSQSEQAVMSLSSSACPLLLTLRDHLLQLEQQLCFSLFKIFWQMLVEKLDVYIYQEIILANHFNEGGAAQLQFDMTRNLFPLFSHYCKRPENYFKHIKEACIVLNLNVGSALLLKDVLQSASGQLPATAALNEVGIYKLAQQDVEILLNLRTNWPNTGK

SEQ ID NO: 4853 - protein, 355 aa, Homo sapiens
VRGVRAATAAAVAATAASGLSRREAGGRAGAAAAVVRPPGRKCGRCRRLANFPGRKRRRRRRKGLGATTGGCGEAVSSLHPAPHSPSSVRPAGRRARRQRRGAGSAERPMSGAGEALAPGPVGPQRVAEAGGGQLGSTAQGKCDKDNTEKDITQATNSHFTHGEMQDQSIWGNPSDGELIRTQPQRLPQLQTSAQVPSGEEIGKIKNGHTGLSNGNGIHHGAKHGSADNRKLSAPVSQKMHRKIQSSLSVNSDISKKSKVNAVFSQKTGSSPEDCCVHCILACLFCEFLTLCNIVLGQASCGICTSEACCCCCGDEMGDDCNCPCDMDCGIMDACCESSDCLEICMECCGICFPS

SEQ ID NO: 4854 - protein, 125 aa, Homo sapiens
MLSRLLKEHQAKQNERKELQEKRRREAITAATCLTEALVDHLNVGVAQAYMNQRKLDHEVKTLQVQAAQFAKQTGQWIGMVENFNQALKEIGDVENWARSIELDMRTIATALEYVYKGQLQSAPS

SEQ ID NO: 4855 - protein, 776 aa, Homo sapiens
MTTRQATKDPLLRGVSPTPSKIPVRSQKRTPFPTVTSCAVDQENQDPRRWVQKPPLNIQRPLVDSAGPRPKARHQAETSQRLVGISQPRNPLEELRPSPRGQNVGPGPPAQTEAPGTIEFVADPAALATILSGEGVKSCHLGRQPSLAKRVLVRGSQGGTTQRVQGVRASAYLAAAPTHRLDPARASCFSRLEGPGPRGRTLCPQRLQALISPSGPSFHPSTRPSFQELRRETAGSSRTSVSQASGLLLETPVQPAFSLPKGEREVVTHSDEGGVASLGLAQRVPLRENREMSHTRDSHDSHLMPSPAPVAQPLPGHVVPCPSPFGRAQRVPSPGPPTLTSYSVLRRLTVQPKTRFTPMPSTPRVQQAQWLRGVSPQSCSEDPALPWEQVAVRLFDQESCIRSLEGSGKPPVATPSGPHSNRTPSLQEVKIQRIGILQQLLRQEVEGLVGGQCVPLNGGSSLDMVELQPLLTEISRTLNATEHNSGTSHLPGLLKHSGLPKPCLPEECGEPQPCPPAEPGPPEAFCRSEPEIPEPSLQEQLEVPEPYPPAEPRPLESCCRSEPEIPESSRQEQLEVPEPCPPAEPRPLESYCRIEPEIPESSRQEQLEVPEPCPPAEPGPLQPSTQGQSGPPGPCPRVELGASEPCTLEHRSLESSLPPCCSQWAPATTSLIFSSQHPLCASPPICSLQSLRPPAGQAGLSNLAAALALRERLKSCLTAIHCFHEARLDDECAFYTSRAPPSGPTRVCTNPVATLLEWQDALCFIPVGSAAPQGSP

SEQ ID NO: 4856 - protein, 600 aa, Homo sapiens
MSCRSYRVSSGHRVGNFSSCSAMTPQNLNRFRANSVSCWSGPGFRGLGSFGSRSVITFGSYSPRIAAVGSRPIHCGVRFGAGCGMGFGDGRGVGLGPRADSCVGLGFGAGSGIGYGFGGPGFGYRVGGVGVPAAPSITAVTVNKSLLTPLNLEIDPNAQRVKKDEKEQIKTLNNKFASFIDKVRFLEQQNKLLETKWSFLQEQKCIRSNLEPLFESYITNLRRQLEVLVSDQARLQAERNHLQDVLEGFKKKYEEEVVCRANAENEFVALKKDVDAAFMNKSDLEANVDTLTQEIDFLKTLYMEEIQLLQSHISETSVIVKMDNSRDLNLDGIIAEVKAQYEEVARRSRADAEAWYQTKYEEMQVTAGQHCDNLRNIRNEINELTRLIQRLKAEIEHAKAQRAKLEAAVAEAEQQGEATLSDAKCKLADLECALQQAKQDMARQLCEYQELMNAKLGLDIEIATYRRLLEGEESRLCEGVGPVNISVSSSRGGLVCGPEPLVAGSTLSRGGVTFSGSSSVCATSGVLASCGPSLGGARVAPATGDLLSTGTRSGSMLISEACVPSVPCPLPTQGGFSSCSGGRSSSVRFVSTTTSCRTKY

SEQ ID NO: 4857 - protein, 513 aa, Homo sapiens
MSYHSFQPGSRCGSQSFSSYSAVMPRMVTHYAVSKGPCRPGGGRGLRALGCLGSRSLCNVGFGRPRVASRCGGTLPGFGYRLGATCGPSACITPVTINESLLVPLALEIDPTVQRVKRDEKEQIKCLNNRFASFINKVRFLEQKNKLLETKWNFMQQQRCCQTNIEPIFEGYISALRRQLDCVSGDRVRLESELCSLQAALEGYKKKYEEELSLRPCVENEFVALKKDVDTAFLMKADLETNAEALVQEIDFLKSLYEEEICLLQSQISETSVIVKMDNSRELDVDGIIAEIKAQYDDIASRSKAEAEAWYQCRYEELRVTAGNHCDNLRNRKNEILEMNKLIQRLQQETENVKAQRCKLEGAIAEAEQQGEAALNDAKCKLAGLEEALQKAKQDMACLLKEYQEVMNSKLGLDIEIATYRRLLEGEEHRLCEGIGPVNISVSSSKGAFLYEPCGVSTPVLSTGVLRSNGGCSIVGTGELYVPCEPQGLLSCGSGRKSSMTLGAGGSSPSHKH

SEQ ID NO: 4858 - protein, 543 aa, Homo sapiens
MMPTPVILLKEGTDSSQGIPQLVSNISACQVIAEAVRTTLGPRGMDKLIVDGRGKATISNDGATILKLLDVVHPAAKTLVDIAKSQDAEVGDGTTSVTLLAAEFLKQVKPYVEEGLHPQIIIRAFRTATQLAVNKIKEIAVTVKKADKVEQRKLLEKCAMTALSSKLISQQKAFFAKMVVDAVMMLDDLLQLKMIGIKKVQGGALEDSQLVAGVAFKKTFSYAGFEMQPKKYHNPKIALLNVELELKAEKDNAEIRVHTVEDYQAIVDAEWNILYDKLEKIHHSGAKVVLSKLPIGDVATQYFADRDMFCAGRVPEEDLKRTMMACGGSIQTSVNALSADVLGRCQVFEETQIGGERYNFFTGCPKAKTCTFILRGGAEQFMEETERSLHDAIMIVRRAIKNDSVVAGGGAIEMELSKYLRDYSRTIPGKQQLLIGAYAKALEIIPRQLCDNAGFDATNILNKLRARHAQGGTWYGVDINNEDIADNFEAFVWEPAMVRINALTAASEAACLIVSVDETIKNPRSTVDAPTAAGRGRGRGRPH

SEQ ID NO: 4859 - protein, 491 aa, Homo sapiens
MAPVGVEKKLLLGPNGPAVAAAGDLTSEEEEGQSLWSSILSEVSTRARSKLPSGKNILVFGEDGSGKTTLMTKLQGAEHGKKGRGLEYLYLSVHDEDRDDHTRCNVWILDGDLYHKGLLKFAVSAESLPETLVIFVADMSRPWTVMESLQKWASVLREHIDKMKIPPEKMRELERKFVKDFQDYMEPEEGCQGSPQRRGPLTSGSDEENVALPLGDNVLTHNLGIPVLVVCTKCDAVSVLEKEHDYRDEHLDFIQSHLRRFCLQYGAALIYTSVKEEKNLDLLYKYIVHKTYGFHFTTPALVVEKDAVFIPAGWDNEKKIAILHENFTTVKPEDAYEDFIVKPPVRKLVHDKELAAEDEQVFLMKQQSLLAKQPATPTRASESPARGPSGSAAQGRGGPASVPSSSPGTSVKKPDPNIKNNAASEGVLASFFNSLLSKKTGSPGSPGAGGVQSTAKKSGQKTVLSNVQEELDRMTRKPDSMVTNSSTENEA

SEQ ID NO: 4860 - protein, 179 aa, Homo sapiens
MDKDFDKLHEFVEIMKEMQKDMDEKMDILINTQKNYKLPLRRAPKEQQELRLMGKTHREPQLRPKKMDGASGVNGAPCALHKKTMAPQKTKQGSLDPLHHCGTCCEKCLLCALKNNYNRAAPLKEARHLLTANSIDPSAALVLLIEFLLLTLVTGAAAPGLDACGHQRNMRDEINSERR

SEQ ID NO: 4861 - protein, 1199 aa, Homo sapiens
MASAGTQHYSIGLRQKNSFKQSGPSGTVPATPPEKPSEGRVWPQAHQQVKPIWKLEKKQVETLSAGLGPGLLGVPPQPAYFFCPSTLCSSGTTAVIAGHSSSCYLHSLPDLFNSTLLYRRSSYRQKPYQQLESFCLRSSPSEKSPFSLPQKSLPVSLTANKATSSMVFSMAQPMASSSTEPYLCLAAAGENPSGKSLASAISGKIPSPLSSSYKPMLNNNSFMWPNSTPVPLLQTTQGLKPVSPPKIQPVSWHHSGGTGDCAPQPVDHKVPKSIGTVPADASAHIALSTASSHDTSTTSVASSWYNRNNLAMRAEPLSCALDDSSDSQDPTKEIRFTEAVRKLTARGFEKMPRQGCQLEQSSFLNPSFQWNVLNRSRRWKPPAVNQQFPQEDAGSVRRVLPGASDTLGLDNTVFCTKRISIHLLASHASGLNHNPACESVIDSSAFGEGKAPGPPFPQTLGIANVATRLSSIQLGQSEKERPEEARELDSSDRDISSATDLQPDQAETEDTEEELVDGLEDCCSRDENEEEEGDSECSSLSAVSPSESVAMISRSCMEILTKPLSNHEKVVRPALIYSLFPNVPPTIYFGTRDERVEKLPWEQRKLLRWKMSTVTPNIVKQTIGRSHFKISKRNDDWLGCWGHHMKSPSFRSIREHQKLNHFPGSFQIGRKDRLWRNLSRMQSRFGKKEFSFFPQSFILPQDAKLLRKAWESSSRQKWIVKPPASARGIGIQVIHKWSQLPKRRPLLVQRYLHKPYLISGSKFDLRIYVYVTSYDPLRIYLFSDGLVRFASCKYSPSMKSLGNKFMHLTNYSVNKKNAEYQANADEMACQGHKWALKALWNYLSQKGVNSDAIWEKIKDVVVKTIISSEPYVTSLLKMYVRRPYSCHELFGFDIMLDENLKPWVLEVNISPSLHSSSPLDISIKGQMIRDLLNLAGFVLPNAEDIISSPSSCSSSTTSLPTSPGDKCRMAPEHVTAQKMKKAYYLTQKIPDQDFYASVLDVLTPDDVRILVEMEDEFSRRGQFERIFPSHISSRYLRFFEQPRYFNILTTQWEQKYHGNKLKGVDLLRSWCYKGFHMGVVSDSAPVWSLPTSLLTISKDDVILNAFSKSETSKLGKQSSCEVSLLLSEDGTTPKSKKTQAGLSPYPQKPSSSKDSEDTSKEPSLSTQTLPVIKCSGQTSRLSASSTFQSISDSLLAVSP

SEQ ID NO: 4862 - protein, 923 aa, Homo sapiens
MLRRGSQALRRFSTGRVYFKNKLKLALIGQSLFGQEVYSHLRKEGHRVVGVFTVPDKDGKADPLALAAEKDGTPVFKLPKWRVKGKTIKEVAEAYRSVGAELNVLPFCTQFIPMDIIDSPKHGSIIYHPSILPRHRGASAINWTLIMGDKKAGFSVFWADDGLDTGPILLQRSCDVEPNDTVDALYNRFLFPEGIKAMVEAVQLIADGKAPRIPQPEEGATYEGIQKKENAEISWDQSAEVLHNWIRGHDKVPGAWTEINGQMVTFYGSTLLNSSVPPGEPLEIKGAKKPGLVTKNGLVLFGNDGKALTVRNLQFEDGKMIPASQYFSTGETSVVELTAEEVKVAETIKVIWAGILSNVPIIEDSTDFFKSGASSMDVARLVEEIRQKCGGLQLQNEDVYMATKFEGFIQKVVRKLRGEDQEVELVVDYISKEVNEIMVKMPYQCFINGQFTDADDGKTYDTINPTDGSTICKVSYASLADVDKAVAAAKDAFENGEWGRMNARERGRLMYRLADLLEENQEELATIEALDSGAVYTLALKTHIGMSVQTFRYFAGWCDKIQGSTIPINQARPNRNLTFTKKEPLGVCAIIIPWNYPLMMLAWKSAACLAAGNTLVLKPAQVTPLTALKFAELSVKAGFPKGVINIIPGSGGIAGQRLSEHPDIRKLGFTGSTPIGKQIMKSCAVSNLKKVSLELGGKSPLIIFNDCELDKAVRMGMGAVFFNKGENCIAAGRLFVEESIHDEFVTRVVEEIKKMKIGDPLDRSTDHGPQNHKAHLEKLLQYCETGVKEGATLVYGGRQVQRPGFFMEPTVFTDVEDYMYLAKEESFGPIMVISKFQNGDIDGVLQRANSTEYGLASGVFTRDINKAMYVSEKLEAGTVFINTYNKTDVAAPFGGVKQSGFGKDLGEEALNEYLKTKTVTLEY

SEQ ID NO: 4863 - protein, 440 aa, Homo sapiens
MEGVLYKWTNYLSGWQPRWFLLCGGILSYYDSPEDAWKGCKGSIQMAVCEIQVHSVDNTRMDLIIPGEQYFYLKARSVAERQRWLVALGSAKACLTDSRTQKEKEFAENTENLKTKMSELRLYCDLLVQQVDKTKEVTTTGVSNSEEGIDVGTLLKSTCNTFLKTLEECMQIANAAFTSELLYRTPPGSPQLAMLKSSKMKHPIIPIHNSLERQMELSTCENGSLNMEINGEEEILMKNKNSLYLKSAEIDCSISSEENTDDNITVQGEIRKEDGMENLKNHDNNLTQSGSDSSCSPECLWEEGKEVIPTFFSTMNTSFSDIELLEDSGIPTEAFLASCYAVVPVLDKLGPTVFAPVKMDLVGNIKKVNQKYITNKEEFTTLQKIVLHEVEADVAQVRNSATEALLWLKRGLKFLKGFLTEVKNGEKDIQTALRNPTENT

SEQ ID NO: 4864 - protein, 423 aa, Homo sapiens
MAICQFFLQGRCRFGDRCWNEHPGARGAGGGRQQPQQQPSGNNRRGWNTTSQRYSNVIQPSSFSKSTPWGGSRDQEKPYFSSFDSGASTNRKEGFGLSENPFASLSPDEQKDEKKLLEGIVKDMEVWESSGQWMFSVYSPVKKKPNISGFTDISPEELRLEYHNFLTSNNLQSYLNSVQRLINQWRNRVNELKSLNISTKVALLSDVKDGVNQAAPAFGFGSSQAATFMSPGFPVNNSSSDNAQNFSFKTNSGFAAASSGSPAGFGSSPAFGAAASTSSGISTSAPAFGFGKPEVTSAASFSFKSPAASSFGSPGFSGLPASLATGPVRAPVAPAFGGGSSVAGFGSPGSHSHTAFSKPSSDTFGNSSISTSLSASSSIIATDNVLFTPRDKLTVEELEQFQSKKFTLGKIPLKPPPLELLNV

SEQ ID NO: 4865 - protein, 440 aa, Homo sapiens
MMADEEEEVKPILQKLQELVDQLYSFRDCYFETHSVEDAGRKQQDVQKEMEKTLQQMEEVVGSVQGKAQVLMLTGKALNVTPDYSPKAEELLSKAVKLEPELVEAWNQLGEVYWKKGDVAAAHTCFSGALTHCRNKVSLQNLSMVLRQLRTDTEDEHSHHVMDSVRQAKLAVQMDVHDGRSWYILGNSYLSLYFSTGQNPKISQQALSAYAQAEKVDRKASSNPDLHLNRATLHKYEESYGEALEGFSRAAALDPAWPEPRQREQQLLEFLDRLTSLLESKGKVKTKKLQSMLGSLRPAHLGPCSDGHYQSASGQKVTLELKPLSTLQPGVNSGAVILGKVVFSLTTEEKVPFTFGLVDSDGPCYAVMVYNIVQSWGVLIGDSVAIPEPNLRLHRIQHKGKDYSFSSVRVETPLLLVVNGKPQGSSSQAVATVASRPQCE

SEQ ID NO: 4866 - protein, 446 aa, Homo sapiens
MEETIKDPPTSAVLLDHCHFSQVIFNSVEKFYIPGGDVTCHYTFTQHFIPRRKDWIGIFRVGWKTTREYYTFMWVTLPIDLNNKSAKQQEVQFKAYYLPKDDEYYQFCYVDEDGVVRGASIPFQFRPENEEDILVVTTQGEVEEIEQHNKELCKENQELKDSCISLQKQNSDMQAELQKKQEELETLQSINKKLELKVKEQKDYWETELLQLKEQNQKMSSENEKMGIRVDQLQAQLSTQEKEMEKLVQGDQDKTEQLEQLKKENDHLFLSLTEQRKDQKKLEQTVEQMKQNETTAMKKQQELMDENFDLSKRLSENEIICNALQRQKERLEGENDLLKRENSRLLSYMGLDFNSLPYQVPTSDEGGARQNPGLAYGNPYSGIQESSSPSPLSIKKCPICKADDICDHTLEQQQMQPLCFNCPICDKIFPATEKQIFEDHVFCHSL

SEQ ID NO: 4867 - protein, 442 aa, Homo sapiens
MALPGARARGWAAAARAAQRRRRVENAGGSPSPEPAGRRAALYVHWPYCEKRCSYCNFNKYIPRRLEEAAMQKCLVTEAQTLLRLSGVQRVESVFFGGGTPSLASPHTVAAVLEAVAQAAHLPADLEVTLEANPTSAPGSRLAEFGAAGVNRLSIGLQSLDDTELRLLGRTHSACDALRTLAEARRLFPGRVSVDLMLGLPAQQVGPWLGQLQELLHHCDDHLSLYQLSLERGTALFAQVQRGALPAPDPELAAEMYQRGRAVLREAGFHQYEVSNFARNGALSTHNWTYWQCGQYLGVGPGAHGRFMPQGAGGHTREARIQTLEPDNWMKEVMLFGHGTRKRVPLGRLELLEEVLALGLRTDVGITHQHWQQFEPQLTLWDVFGANKEVQELLERGLLQLDHRGLRCSWEGLAVLDSLLLTLLPQLQEAWQQRTPSPVPGG

SEQ ID NO: 4868 - protein, 425 aa, Homo sapiens
MDKNIGEQLNKAYEAFRQACMDRDSAVKELQQKTENYEQRIREQQEQLSLQQTIIDKLKSQLLLVNSTQDNNYGCVPLLEDSETRKNNLTLDQPQDKVISGIAREKLPKVRRQEVSSPRKETSARSLGSPLLHERGNIEKTFWDLKEEFHKICMLAKAQKDHLSKLNIPDTATETQCSVPIQCTDKTDKQEALFKPQAKDDINRGAPSITSVTPRGLCRDEEDTSFESLSKFNVKFPPMDNDSTFLHSTPERPGILSPATSEAVCQEKFNMEFRDNPGNFVKTEETLFEIQGIDPIASAIQNLKTTDKTKPSNLVNTCIRTTLDRAACLPPGDHNALYVNSFPLLDPSDAPFPSLDSPGKAIRGPQQPIWKPFPNQDSDSVVLSGTDSELHIPRVCEFCQAVFPPSITSRGDFLRHLNSHFNGET

SEQ ID NO: 4869 - protein, 683 aa, Homo sapiens
MENLQTNFSLVQGSTKKLNGMGDDGSPPAKKMITDIHANGKTINKVPTVKKEHLDDYGEAPVETDGEHVKRTCTSVPETLHLNPSLKHTLAQFHLSSQSSLGGPAAFSARHSQESMSPTVFLPLPSPQVLPGPLLIPSDSSTELTQTVLEGESISCFQVGGEKRLCLPQVLNSVLREFTLQQINTVCDELYIYCSRCTSDQLHILKVLGILPFNAPSCGLITLTDAQRLCNALLRAAFPQNGSVLPAKSSLAQLKETGSAFEVEHECLGKCQGLFAPQFYVQPDAPCIQCLECCGMFAPQTFVMHSHRSPDKRTCHWGFESAKWHCYLHVNQKYLGTPEEKKLKIILEEMKEKFSMRSGKRNQSKTDAPSGMELQSWYPVIKQEGDHVSQTHSFLHPSYYLYMCDKVVAPNVSLTSAVSQSKELTKTEASKSISRQSEKAHSSGKLQKTVSYPDVSLEEQEKMDLKTSRELCSRLDASISNNSTSKRKSESATCNLVRDINKVGIGLVAAASSPLLVKDVICEDDKGKIMEEVMRTYLKQQEKLNLILQKKQQLQMEVKMLSSSKSMKELTEEQQNLQKELESLQNEHAQRMEEFYVEQKDLEKKLEQIMKQKCTCDSNLEKDKEAEYAGQLAELRQRLDHAEADRQELQDELRQEREARQKLEMMIKELKLQILKSSKTAKE

SEQ ID NO: 4870 - protein, 359 aa, Homo sapiens
MSYRRELEKYRDLDEDEILGALTEEELRTLENELDELDPDNALLPAGLRQKDQTTKAPTGPFKREELLDHLEKQAKEFKDREDLVPYTGEKRGKVWVPKQKPLDPVLESVTLEPELEEALANASDAELCDIAAILGMHTLMSNQQYYQALSSSSIMNKEGLNSVIKPTQYKPVPDEEPNSTDVEETLERIKNNDPKLEEVNLNNIRNIPIPTLKAYAEALKENSYVKKFSIVGTRSNDPVAYALAEMLKENKVLKTLNVESNFISGAGILRLVEALPYNTSLVEMKIDNQSQPLGNKVEMEIVSMLEKNATLLKFGYHFTQQGPRLRASNAMMNNNDLVRKRRLADLTGPIIPKCRSGV

SEQ ID NO: 4871 - protein, 646 aa, Homo sapiens
MEERGSPDGDLARSLEQGPEGPETPIQVVLRVRPMSAAELRRGQQSVLHCSGTRTLQGGPEVAFRFGAVLDAARTQEDVFRACGVRRLGELALRGFSCTVFTFGQTGSGKTYTLTGPPPQGEGVPVPPSLAGIMQRTFAWLLDRVQHLGAPVTLRASYLEIYNEQVRDLLSLGSPRPLPVRWNKTRGFYVEQLRVVEFGSLEALMELLQTGLSRRRNSAHTLNQASSRSHALLTLYISRQTAQQMPSVDPGEPPVGGKLCFVDLAGSEKVAATGSRGELMLEANSINRSLLALGHCISLLLDPQRKQSHIPFRDSKLTKLLADSLGGRGVTLMVACVSPSAQCLPETLSTLRYASRAQRVTTRPQAPKSPVAKQPQRLETEMLQLQEENRRLQFQLDQMDCKASGLSGARVAWAQRNLYGMLQEFMLENERLRKEKSQLQNSRDLAQNEQRILAQQVHALERRLLSACYHHQQGPGLTPPCPCLMAPAPPCHALPPLYSCPCCHICPLCRVPLAHWACLPGEHHLPQVLDPEASGGRPPSARPPPWAPPCSPGSAKCPRERSHSDWTQTRVLAEMLTEEEVVPSAPPLPVRPPKTSPGLRGGAGVPNLAQRLEALRDQIGSSLRRGRSQPPCSEGARSPGQVLPPH

SEQ ID NO: 4872 - protein, 153 aa, Homo sapiens
MARNTLSSRFRRVDIDEFDENKFVDEQEEAAAAAAEPGPDPSEVDGLLRQGDMLRAFHAALRNSPVNTKNQAVKERAQGVVLKVLTNFKSSEIEQAVQSLDRNGVDLLMKYIYKGFEKPTENSSAVLLQWHEKALAVGGLGSIIRVLTARKTV

SEQ ID NO: 4873 - protein, 1105 aa, Homo sapiens
MAATASAGVPATVSEKQEFYQLLKNLINPSCMVRRQAEEIYENIPGLCKTTFLLDAVRNRRAGYEVRQMAAALLRRLLSSGFEEVYPNLPADVQRDVKIELILAVKLETHASMRKKLCDIFAVLARNLIDEDGTNHWPEGLKFLIDSIYSKNVVLWEVALHVFWHFPGIFGTQERHDLDIIKRLLDQCIQDQEHPAIRTLSARAAAAFVLANENNIALFKDFADLLPGILQAVNDSCYQDDDSVLESLVEIADTVPKYLGPYLEDTLQLSLKLCGDSRLSNLQRQLALEVIVTLSETATPMLKKHTNIIAQAVPHILAMMVDLQDDEDWVNADEMEEDDFDSNAVAAESALDRLACGLGGKVVLPMTKEHIMQMLQSPDWKYRHAGLMALSAIGEGCHQQMESILDETVNSVLLFLQDPHPRVRAAACTTLGQMATDFAPNFQKKFHETVIAALLRTMENQGNQRVQSHAASALIIFIEDCPKSLLVLYVDSMVKNLHSVLVIKLQELIRNGTKLALEQLVTTIASVADTIEEKFVPYYDIFMPSLKHIVELAVQKELKLLRGKTIECISHIGLAVGKEKFMQDASNVMQLLLKTQSDLNNMEDDDPQTSYMVSAWARMCKILGKDFQQYLPLVIEPLIKTASAKPDVALLDTQDVENMSDDDGWQFVNLGDQQSFGIKTSGLEAKATACQMLVYYAKELREGFVEYTEQVVKLMVPLLKFYFHDNVRVAAAESMPFLLECARIRGPEYLAQMWQFICDPLIKAIGTEPDTDVLSEIMNSFAKSIEVMGDGCLNDEHLEELGGILKAKLEGHFKNQELRQVKRQEENYDQQVEMSLQDEDECDVYILTKVSDILHSLFSTYKEKILPWFEQLLPLIVNLICSSRPWPDRQWGLCIFDDIIEHCSPTSFKYVEYFRWPMLLNMRDNNPEVRQAAAYGLGVMAQFGGDDYRSLCSEAVPLLVKVIKCANSKTKKNVIATENCISAIGKILKFKPNCVNVDEVLPHWLSWLPLHEDKEEAIQTLSFLCDLIESNHPVVIGPNNSNLPKIISIIAEGKINETINYEDPCAKRLANVVRQVQTSEDLWLECVSQLDDEQQEALQELLNFA

SEQ ID NO: 4874 - protein, 637 aa, Homo sapiens
MEVTGFGVTRPGKVPQARMSGLVLGQRDEPAGHRLSQEEILGSTRLVSQGLEALRSEHQAVLQSLSQTIECLQQGGHEEGLVHEKARQLRRSMENIELGLSEAQVMLALASHLSTVESEKQKLRAQVRRLCQENQWLRDELAGTQQRLQRSEQAVAQLEEEKKHLEFLGQLRQYDEDGHTSEEKEGDATKDSLDDLFPNEEEEDPSNGLSRGQGATAAQQGGYEIPARLRTLHNLVIQYAAQGRYEVAVPLCKQALEDLERTSGRGHPDVATMLNILALVYRDQNKYKEAAHLLNDALSIRESTLGPDHPAVAATLNNLAVLYGKRGKYKEAEPLCQRALEIREKVLGTNHPDVAKQLNNLALLCQNQGKYEAVERYYQRALAIYEGQLGPDNPNVARTKNNLASCYLKQGKYAEAETLYKEILTRAHVQEFGSVDDDHKPIWMHAEEREEMSKSRHHEGGTPYAEYGGWYKACKVSSPTVNTTLRNLGALYRRQGKLEAAETLEECALRSRRQGTDPISQTKVAELLGESDGRRTSQEGPGDSVKFEGGEDASVAVEWSGDGSGTLQRSGSLGKIRDVLRRSSELLVRKLQGTEPRPSSSNMKRAASLNYLNQPSAAPLQVSRGLSASTMDLSSSS

SEQ ID NO: 4875 - protein, 1321 aa, Homo sapiens
MQCLAAALKDETNMSGGGEQADILPANYVVKDRWKVLKKIGGGGFGEIYEAMDLLTRENVALKVESAQQPKQVLKMEVAVLKKLQGKDHVCRFIGCGRNEKFNYVVMQLQGRNLADLRRSQPRGTFTLSTTLRLGKQILESIEAIHSVGFLHRDIKPSNFAMGRLPSTYRKCYMLDFGLARQYTNTTGDVRPPRNVAGFRGTVRYASVNAHKNREMGRHDDLWSLFYMLVEFAVGQLPWRKIKDKEQVGMIKEKYEHRMLLKHMPSEFHLFLDHIASLDYFTKPDYQLIMSVFENSMKERGIAENEAFDWEKAGTDALLSTSTSTPPQQNTRQTAAMFGVVNVTPVPGDLLRENTEDVLQGEHLSDQENAPPILPGRPSEGLGPSPHLVPHPGGPEAEVWEETDVNRNKLRINIGKSPCVEEEQSRGMGVPSSPVRAPPDSPTTPVRSLRYRRVNSPESERLSTADGRVELPERRSRMDLPGSPSRQACSSQPAQMLSVDTGHADRQASGRMDVSASVEQEALSNAFRSVPLAEEEDFDSKEWVIIDKETELKDFPPGAEPSTSGTTDEEPEELRPLPEEGEERRRLGAEPTVRPRGRSMQALAEEDLQHLPPQPLPPQLSQGDGRSETSQPPTPGSPSHSPLHSGPRPRRRESDPTGPQRQVFSVAPPFEVNGLPRAVPLSLPYQDFKRDLSDYRERARLLNRVRRVGFSHMLLTTPQVPLAPVQPQANGKEEEEEEEEDEEEEEEDEEEEEEEEEEEEEEEEEEEEEEEAAAAVALGEVLGPRSGSSSEGSERSTDRSQEGAPSTLLADDQKESRGRASMADGDLEPEEGSKTLVLVSPGDMKKSPVTAELAPDPDLGTLAALTPQHERPQPTGSQLDVSEPGTLSSVLKSEPKPPGPGAGLGAGTVTTGVGGVAVTSSPFTKVERTFVHIAEKTHLNVMSSGGQALRSEEFSAGGELGLELASDGGAVEEGARAPLENGLALSGLNGAEIEGSALSGAPRETPSEMATNSLPNGPALADGPAPVSPLEPSPEKVATISPRRHAMPGSRPRSRIPVLLSEEDTGSEPSGSLSAKERWSKRARPQQDLARLVMEKRQGRLLLRLASGASSSSSEEQRRASETLSGTGSEEDTPASEPAAALPRKSGRAAATRSRIPRPIGLRMPMPVAAQQPASRSHGAAPALDTAITSRLQLQTPPGSATAADLRPKQPPGRGLGPGRAQAGARPPAPRSPRLPASTSAARNASASPRSQSLSRRESPSPSHQARPGVPPPRGVPPARAQPDGTPSPGGSKKGPRGKLQAQRATTKGRAGGAEGRAGAR

SEQ ID NO: 4876 - protein, 604 aa, Homo sapiens
MSQLSSTLKRYTESARYTDAHYAKSGYGAYTPSSYGANLAASLLEKEKLGFKPVPTSSFLTRAAYGPSSLLDYDRGRPLLRPDITGGGKRAESQTRGTERPLGSGLSGGSGFPYGVTNNCLSYLPINAYDQGVTLTQKLDSQSDLARDFSSLRTSDSYRIDPRNLGRSPMLARTRKELCTLQGLYQTASCPEYLVDYLENYGRKGSASQVPSQAPPSRVPEIISPTYRPIGRYTLWETGKGQAPGPSRSSSPGRDGMNSKSAQGLAGLRNLGNTCFMNSILQCLSNTRELRDYCLQRLYMRDLHHGSNAHTALVEEFAKLIQTIWTSSPNDVVSPSEFKTQIQRYAPRFVGYNQQDAQEFLRFLLDGLHNEVNRVTLRPKSNPENLDHLPDDEKGRQMWRKYLEREDSRIGDLFVGQLKSSLTCTDCGYCSTVFDPFWDLSLPIAKRGYPEVTLMDCMRLFTKEDVLDGDEKPTCCRCRGRKRCIKKFSIQRFPKILVLHLKRFSESRIRTSKLTTFVNFPLRDLDLREFASENTNHAVYNLYAVSNHSGTTMGGHYTAYCRSPGTGEWHTFNDSSVTPMSSSQVRTSDAYLLFYELASPPSRM

SEQ ID NO: 4877 - protein, 450 aa, Homo sapiens
MVPLVAVVSGPRAQLFACLLRLGTQQVGPLQLHTGASHAARNHYEVLVLGGGSGGITMAARMKRKVGAENVAIVEPSERHFYQPIWTLVGAGAKQLSSSGRPTASVIPSGVEWIKARVTELNPDKNCIHTDDDEKISYRYLIIALGIQLDYEKIKGLPEGFAHPKIGSNYSVKTVEKTWKALQDFKEGNAIFTFPNTPVKCAGAPQKIMYLSEAYFRKTGKRSKANIIFNTSLGAIFGVKKYADALQEIIQERNLTVNYKKNLIEVRADKQEAVFENLDKPGETQVISYEMLHVTPPMSPPDVLKTSPVADAAGWVDVDKETLQHRRYPNVFGIGDCTNLPTSKTAAAVAAQSGILDRTISVIMKNQTPTKKYDGYTSCPLVTGYNRVILAEFDYKAEPLETFPFDQSKERLSMYLMKADLMPFLYWNMMLRGYWGGPAFLRKLFHLGMS

SEQ ID NO: 4878 - protein, 1749 aa, Homo sapiens
MDGVSSEANEENDNIERPVRRRHSSILKPPRSPLQDLRGGNERVQESNALRNKKNSRRVSFADTIKVFQTESHMKIVRKSEMEETETGENLLLIQNKKLEDNYCEITGMNTLLSAPIHTQMQQKEFSIIEHTRERKHANDQTVIFSDENQMDLTSSHTVMITKGLLDNPISEKSTKIDTTSFLANLKLHTEDSRMKKEVNFSVDQNTSSENKIDFNDFIKRLKTGKCSAFPDVPDKENFEIPIYSKEPNSASSTHQMHVSLKEDENNSNITRLFREKDDGMNFTQCHTANIQTLIPTSSETNSRESKGNDITIYGNDFMDLTFNHTLQILPATGNFSEIENQTQNAMDVTTGYGTKASGNKTVFKSKQNTAFQDLSINSADKIHITRSHIMGAETHIVSQTCNQDARILAMTPESIYSNPSIQGCKTVFYSSCNDAMEMTKCLSNMREEKNLLKHDSNYAKMYCNPDAMSSLTEKTIYSGEENMDITKSHTVAIDNQIFKQDQSNVQIAAAPTPEKEMMLQNLMTTSEDGKMNVNCNSVPHVSKERIQQSLSNPLSISLTDRKTELLSGENMDLTESHTSNLGSQVPLAAYNLAPESTSESHSQSKSSSDECEEITKSRNEPFQRSDIIAKNSLTDTWNKDKDWVLKILPYLDKDSPQSADCNQEIATSHNIVYCGGVLDKQITNRNTVSWEQSLFSTTKPLFSSGQFSMKNHDTAISSHTVKSVLGQNSKLAEPLRKSLSNPTPDYCHDKMIICSEEEQNMDLTKSHTVVIGFGPSELQELGKTNLEHTTGQLTTMNRQIAVKVEKCGKSPIEKSGVLKSNCIMDVLEDESVQKPKFPKEKQNVKIWGRKSVGGPKIDKTIVFSEDDKNDMDITKSYTIEINHRPLLEKRDCHLVPLAGTSETILYTCRQDDMEITRSHTTALECKTVSPDEITTRPMDKTVVFVDNHVELEMTESHTVFIDYQEKERTDRPNFELSQRKSLGTPTVICTPTEESVFFPGNGESDRLVANDSQLTPLEEWSNNRGPVEVADNMELSKSATCKNIKDVQSPGFLNEPLSSKSQRARGSSLKLKNDKTIVFSENHKNDMDITQSCMVEIDNESALEDKEDFHLAGASKTILYSCGQDDMEITRSHTTALECKTLLPNEIAIRPMDKTVLFTDNYSDLEVTDSHTVFIDCQATEKILEENPKFGIGKGKNLGVSFPKDNSCVQEIAEKQALAVGNKIVLHTEQKQQLFAATNRTTNEIIKFHSAAMDEKVIGKVVDQACTLEKAQVESCQLNNRDRRNVDFTSSHATAVCGSSDNYSCLPNVISCTDNLEGSAMLLCDKDEEKANYCPVQNDLAYANDFASEYYLESEGQPLSAPCPLLEKEEVIQTSTKGQLDCVITLHKDQDLIKDPRNLLANQTLVYSQDLGEMTKLNSKRVSFKLPKDQMKVYVDDIYVIPQPHFSTDQPPLPKKGQSSINKEEVILSKAGNKSLNIIENSSAPICENKPKILNSEEWFAAACKKELKENIQTTNYNTALDFHSNSDVTKQVIQTHVNAGEAPDPVITSNVPCFHSIKPNLNNLNGKTGEFLAFQTVHLPPLPEQLLELGNKAHNDMHIVQATEIHNINIISSNAKDSRDEENKKSHNGAETTSLPPKTVFKDKVRRCSLGIFLPRLPNKRNCSVTGIDDLEQIPADTTDINHLETQPVSSKDSGIGSVAGKLNLSPSQYINEENLPVYPDEINSSDSINIETEPKKNVGTRRRRYS

SEQ ID NO: 4879 - protein, 686 aa, Homo sapiens
MIPGKYRSVSGRAANNVNCGLHLVIQTSSLPEKNKVEFKLNKDTSSFPGRLLQHDLERNYSSRQGDHINLVSSSLSSFPILQRSSEEKILYSDRLSLERQKLTVCPIINGEDHLRLLNFQHNFITRIQNISNLQKLISLDLYDNQIEEISGLSTLRCLRVLLLGKNRIKKISNLENLKSLDVLDLHGNQITKIENINHLCELRVLNLARNFLSHVDNLNGLDSLTELNLRHNQITFVRDVDNLPCLQHLFLSFNNISSFDSVSCLADSSSLSDITFDGNPIAQESWYKHTVLQNMMQLRQLDMKRITEEERRMASVLAKKEEEKKRESHKQSLLKEKKRLTINNVARQWDLQQQRVANIATNEDRKDSDSPQDPCQIDGSTLSAFPEETGPLDSGLNNALQGLSVIDTYLVEVDGDTLSLYGSGALESLDRNWSVQTAGMITTVSFTFIEFDEIVQVLPKLKIKFPNSLHLKFKETNLVMLQQFNALAQLRRIDQLTIDPQGNPVVNFTLWKYYVLFRLSHFSMQKINGTEVTQNDMIMAERLFGILAHVASSELPQYRLISILGDARKKQFRYLLESKGKKPGIINEENNDSKRLVGENTNRATLNYTTRDFYNEKLEEIKEKKKFCKTYIEDLVKEATEINMKNEALQKLWPQMFIELVRDAVIEIRNKNSYMKLCLQQITDQK

SEQ ID NO: 4880 - protein, 84 aa, Homo sapiens
MPYLLISTQIRMEVGPTMVGDEQSDPELMQHLGASKRRALGNNFYEYYVDDPPRIVLDKLERRGFRVLSMTGVGQTLVWCLHKE

SEQ ID NO: 4881 - protein, 886 aa, Homo sapiens
MPSLPQEGVIQGPSPLDLNTELPYQSTMKRKVRKKKKKGTITANVAGTKFEIVRLVIDEMGFMKTPDEDETSNLIWCDSAVQQEKISELQNYQRINHFPGMGEICRKDFLARNMTKMIKSRPLDYTFVAAWIFPAEYTQFQNYVKELKKKRKQKTFIVKPANGAMGHGISLIRNGDKLPSQDHLIVQEYIEKPFLMEGYKFDLRIYILVTSCDPLKIFLYHDGLVRMGTEKYIPPNESNLTQLYMHLTNYSVNKHNEHFERDETENKGSKRSIKWFTEFLQANQHDVAKFWSDISELVVKTLIVAEPHVLHAYRMCRPGQPPGSESVCFEVLGFDILLDRKLKPWLLEINRAPSFGTDQKIDYDVKRGVLLNALKLLNIRTSDKRRNLAKQKAEAQRRLYGQNSIKRLLPGSSDWEQQRHQLERRKEELKERLAQVRKQISREEHENRHMGNYRRIYPPEDKALLEKYENLLAVAFQTFLSGRAASFQRELNNPLKRMKEEDILDLLEQCEIDDEKLMGKTTKTRGPKPLCSMPESTEIMKRPKYCSSDSSYDSSSSSSESDENEKEEYQNKKREKQVTYNLKPSNHYKLIQQPSSIRRSVSCPRSISAQSPSSGDTRPFSAQQMISVSRPTSASRSHSLNRASSYMRHLPHSNDACSTNSQVSESLRQLKTKEQEDDLTSQTLFVLKDMKIRFPGKSDAESELLIEDIIDNWKYHKTKVASYWLIKLDSVKQRKVLDIVKTSIRTVLPRIWKVPDVEEVNLYRIFNRVFNRLLWSRGQGLWNCFCDSGSSWESIFNKSPEVVTPLQLQCCQRLVELCKQCLLVVYKYATDKRGSLSGIGPDWGNSRYLLPGSTQFFLRTPTYNLKYNSPGMTRSNVLFTSRYGHL

SEQ ID NO: 4882 - protein, 379 aa, Homo sapiens
MAGPRVEVDGSIMEGGGQILRVSTALSCLLGLPLRVQKIRAGRSTPGLSSGGWKSKIKVLTRPQHLSGLEMIRDLCDGQLEGAEIGSTEITFTPEKIKGGIHTADTKTAGSVCLLMQVSMPCVLFAASPSELHLKGGTNAEMAPQIDYTVMVFKPIVEKFGFIFNCDIKTRGYYPKGGGEVIVRMSPVKQLNPINLTERGCVTKIYGRAFVAGVLPFKVAKDMAAAAVRCIRKEIRDLYVNIQPVQEPKDQAFGNGNGIIIIAETSTGCLFAGSSLGKRGVNADKVGIEAAEMLLANLRHGGTVDEYLQDQLIVFMALANGVSRIKTGPVTLHTQTAIHFAEQIAKAKFIVKKSEDEEDAAKDTYIIECQGIGMTNPNL

SEQ ID NO: 4883 - protein, 351 aa, Homo sapiens
MPSETLWEIAKAEVEKRGINGSEGDGAEIAEKFVFFIGSKNGGKTTIILRCLDRDEPPKPTLALEYTYGRRAKGHNTPKDIAHFWELGGGTSLLDLISIPITGDTLRTFSLVLVLDLSKPNDLWPTMENLLQATKSHVDKVIMKLGKTNAKAVSEMRQKIWNNMPKDHPDHELIDPFPVPLVIIGSKYDVFQDFESEKRKVICKTLRFVAHYYGASLMFTSKSEALLLKIRGVINQLAFGIDKSKSICVDQNKPLFITAGLDSFGQIGSPPVPENDIGKLHAHSPMELWKKVYEKLFPPKSINTLKDIKDPARDPQYAENEVDEMRIQKDLELEQYKRSSSKSWKQIELDS

SEQ ID NO: 4884 - protein, 265 aa, Homo sapiens
MCTSETFQALDTFEARHDDIVLASYPKCGSNWILHIVSELIYAVSKKKYKYPEFPVLECGDSEKYQRMKGFPSPRILATHLHYDKLPGSIFENKAKILVIFRNPKDTAVSFLHFHNDVPDIPSYGSWDEFFRQFMKGQVSWGRYFDFAINWNKHLDGDNVKFILYEDLKENLAAGIKQIAEFLGFFLTGEQIQTISVQSTFQAMRAKSQDTHGAVGPFLFRKGEVGDWKNLFSEIQNQEMDEKFKECLAGTSLGAKLKYESYCQG

SEQ ID NO: 4885 - protein, 1780 aa, Homo sapiens
MESNFNQEGVPRPSYVFSADPIARPSEINFDGIKLDLSHEFSLVAPNTEANSFESKDYLQVCLRIRPFTQSEKELESEGCVHILDSQTVVLKEPQCILGRLSEKSSGQMAQKFSFSKVFGPATTQKEFFQGCIMQPVKDLLKGQSRLIFTYGLTNSGKTYTFQGTEENIGILAALNVLFDSLQERLYTKMNLKPHRSREYLRLSSEQEKEEIASKSALLRQIKEVTVHNDSDDTLYGSLTNSLNISEFEESIKDYEQANLNMANSIKFSVWVSFFEIYNEYIYDLFVPVSSKFQKRKMLRLSQDVKGYSFIKDLQWIQVSDSKEAYRLLKLGIKHQSVAFTKLNNASSRSHSIFTVKILQIEDSEMSRVIRVSELSLCDLAGSERTMKTQNEGERLRETGNINTSLLTLGKCINVLKNSEKSKFQQHVPFRESKLTHYFQSFFNGKGKICMIVNISQCYLAYDETLNVLKFSAIAQKVCVPDTLNSSQEKLFGPVKSSQDVSLDSNSNSKILNVKRATISWENSLEDLMEDEDLVEELENAEETQNVETKLLDEDLDKTLEENKAFISHEEKRKLLDLIEDLKKKLINEKKEKLTLEFKIREEVTQEFTQYWAQREADFKETLLQEREILEENAERRLAIFKDLVGKCDTREEAAKDICATKVETEEATACLELKFNQIKAELAKTKGELIKTKEELKKRENESDSLIQELETSNKKIITQNQRIKELINIIDQKEDTINEFQNLKSHMENTFKCNDKADTSSLIINNKLICNETVEVPKDSKSKICSERKRVNENELQQDEPPAKKGSIHVSSAITEDQKKSEEVRPNIAEIEDIRVLQENNEGLRAFLLTIENELKNEKEEKAELNKQIVHFQQELSLSEKKNLTLSKEVQQIQSNYDIAIAELHVQKSKNQEQEEKIMKLSNEIETATRSITNNVSQIKLMHTKIDELRTLDSVSQISNIDLLNLRDLSNGSEEDNLPNTQLDLLGNDYLVSKQVKEYRIQEPNRENSFHSSIEAIWEECKEIVKASSKKSHQIEELEQQIEKLQAEVKGYKDENNRLKEKEHKNQDDLLKEKETLIQQLKEELQEKNVTLDVQIQHVVEGKRALSELTQGVTCYKAKIKELETILETQKVECSHSAKLEQDILEKESIILKLERNLKEFQEHLQDSVKNTKDLNVKELKLKEEITQLTNNLQDMKHLLQLKEEEEETNRQETEKLKEELSASSARTQNLKADLQARGSEEDYADLKEKLTDAKKQIKQVQKEVSVMRDEDKLLRIKINELEKKKNQCSQELDMKQRTIQQLKEQLNNQKVEEAIQQYERACKDLNVKEKIIEDMRMTLEEQEQTQVEQDQVLEAKLEEVERLATELEKWKEKCNDLETKNNQRSNKEHENNTDVLGKLTNLQDELQESEQKYNADRKKWLEEKMMLITQAKEAENIRNKEMKKYAEDRERFFKQQNEMEILTAQLTEKDSDLQKWREERDQLVAALEIQLKALISSNVQKDNEIEQLKRIISETSKIETQIMDIKPKRISSADPDKLQTEPLSTSFEISRNKIEDGSVVLDSCEVSTENDQSTRFPKPELEIQFTPLQPNKMAVKHPGCTTPVTVKIPKARKRKSNEMEEDLVKCENKKNATAANLKFPISDDRNSSVKKEQKVAIRPSSKKTYSLRSQASIIGVNLATKKKEGTLQKFGDFLQHSPSILQSKAKKIIETMSSSKLSNVEASKENVSQPKRAKRKLYTSEISSPIDISGQVILMDQKMKESDHQIIKRRLRTKTAK

SEQ ID NO: 4886 - protein, 456 aa, Homo sapiens
MNSSDEEKQLQLITSLKEQAIGEYEDLRAENQKTKEKCDKIRQERDEAVKKLEEFQKISHMVIEEVNFMQNHLEIEKTCRESAEALATKLNKENKTLKRISMLYMAKLGPDVITEEINIDDEDSTTDTDGAAETCVSVQCQKQIKELRDQIVSVQEEKKILAIELENLKSKLVEVIEEVNKVKQEKTVLNSEVLEQRKVLEKCNRVSMLAVEEYEEMQVNLELEKDLRKKAESFAQEMFIEQNKLKRQSHLLLQSSIPDQQLLKALDENAKLTQQLEEERIQHQQKVKELEEQLENETLHKEIHNLKQQLELLEEDKKELELKYQNSEEKARNLKHSVDELQKRVNQSENSVPPPPPPPPPLPPPPPNPIRSLMSMIRKRSHPSGSGAKKEKATQPETTEEVTDLKRQAVEEMMDRIKKGVHLRPVNQTARPKTKPESSKGCESAVDELKGILASQ

SEQ ID NO: 4887 - protein, 209 aa, Homo sapiens
MKKVRLKELESRLQQVDGFEKPKLLLEQYPTRPHIAACMLYTIHNTYDDIENKVVADLGCGCGVLSIGTAMLGAGLCVGFDIDEDALEIFNRNAEEFELTNIDMVQCDVCLLSNRMSKSFDTVIMNPPFGTKNNKGTDMAFLKTALEMARTAVYSLHKSSTREHVQKKAAEWKIKIDIIAELRYDLPASYKFHKKKSVDIEVDLIRFSF

SEQ ID NO: 4888 - protein, 1572 aa, Homo sapiens
MASSAREHLLFVRRRNPQMRYTLSPENLQSLAAQSSMPENMTLQRANSDTDLVTSESRSSLTASMYEYTLGQAQNLIIFWDIKEEVDPSDWIGLYHIDENSPANFWDSKNRGVTGTQKGQIVWRIEPGPYFMEPEIKICFKYYHGISGALRATTPCITVKNPAVMMGAEGMEGGASGNLHSRKLVSFTLSDLRAVGLKKGMFFNPDPYLKMSIQPGKKSSFPTCAHHGQERRSTIISNTTNPIWHREKYSFFALLTDVLEIEIKDKFAKSRPIIKRFLGKLTIPVQRLLERQAIGDQMLSYNLGRRLPADHVSGYLQFKVEVTSSVHEDASPEAVGTILGVNSVNGDLGSPSDDEDMPGSHHDSQVCSNGPVSEDSAADGTPKHSFRTSSTLEIDTEELTSTSSRTSPPRGRQDSLNDYLDAIEHNGHSRPGTATCSERSMGASPKLRSSFPTDTRLNAMLHIDSDEEDHEFQQDLGYPSSLEEEGGLIMFSRASRADDGSLTSQTKLEDNPVENEEASTHEAASFEDKPENLPELAESSLPAGPAPEEGEGGPEPQPSADQGSAELCGSQEVDQPTSGADTGTSDASGGSRRAVSETESLDQGSEPSQVSSETEPSDPARTESVSEASTRPEGESDLECADSSCNESVTTQLSSVDTRCSSLESARFPETPAFSSQEEEDGACAAEPTSSGPAEGSQESVCTAGSLPVVQVPSGEDEGPGAESATVPDQEELGEVWQRRGSLEGAAAAAESPPQEEGSAGEAQGTCEGATAQEEGATGGSQANGHQPLRSLPSVRQDVSRYQRVDEALPPNWEARIDSHGRIFYVDHVNRTTTWQRPTAPPAPQVLQRSNSIQQMEQLNRRYQSIRRTMTNERPEENTNAIDGAGEEADFHQASADFRRENILPHSTSRSRITLLLQSPPVKFLISPEFFTVLHSNPSAYRMFTNNTCLKHMITKVRRDTHHFERYQHNRDLVGFLNMFANKQLELPRGWEMKHDHQGKAFFVDHNSRTTTFIDPRLPLQSSRPTSALVHRQHLTRQRSHSAGEVGEDSRHAGPPVLPRPSSTFNTVSRPQYQDMVPVAYNDKIVAFLRQPNIFEILQERQPDLTRNHSLREKIQFIRTEGTPGLVRLSSDADLVMLLSLFEEEIMSYVPPHALLHPSYCQSPRGSPVSSPQNSPGTQRANARAPAPYKRDFEAKLRNFYRKLETKGYGQGPGKLKLIIRRDHLLEDAFNQIMGYSRKDLQRNKLYVTFVGEEGLDYSGPSREFFFLVSRELFNPYYGLFEYSANDTYTVQISPMSAFVDNHHEWFRFSGRILGLALIHQYLLDAFFTRPFYKALLRILCDLSDLEYLDEEFHQSLQWMKDNDIHDILDLTFTVNEEVFGQITERELKPGGANIPVTEKNKKEYIERMVKWRIERGVVQQTESLVRGFYEVVDARLVSVFDARELELVIAGTAEIDLSDWRNNTEYRGGYHDNHIVIRWFWAAVERFNNEQRLRLLQFVTGTSSIPYEGFASLRGSNGPRRFCVEKWGKITALPRAHTCFNRLDLPPYPSFSMLYEKLLTAVEETSTFGLE

SEQ ID NO: 4889 - protein, 400 aa, Homo sapiens
MSCRCWISRHPSYEGWNLQSIIFHKQIRGVDLESTFVTKFGNNCSLRLNETVDIHKEKVARREIGILTTNKNTSRTHKIIAPANLERPVRYIRKPIDYTILDDIGHGVKVSTQNMKMGGLAATPPTQKPPSPPMSGKGTLGRHSPYRTLEPVRPPVVPNDYVPSPTRNMAPSQQSPVRTASVNQRNRTYSSSGSSGGSHPSSRSSSRENSGSGSVGVPIAVPTPSPPSVFPGHPVQFYSMNRPASRHTPPTIGGSLPYRRPPSITSQTSLQNQMNGGPFYSQNPVSDTPPPPPPVEEPVFDESPPPPPPPEDYEEEEAAVVEYSDPYAEEDPPWAPRSYLEKVVAIYDYTKDKEDELSFQEGAIIYVIKKNDDGWYEGVMNGVTGLFPGNYVESIMHYSE

SEQ ID NO: 4890 - protein, 474 aa, Homo sapiens
MAELQMLLEEEIPGGRRALFDSYTNLERVADYCENNYIQSADKQRALEETKAYTTQSLASVAYLINTLANNVLQMLDIQASQLRRMESSINHISQTVDIHKEKVARREIGILTTNKNTSRTHKIIAPANLERPVRYIRKPIDYTILDDIGHGVKVSTQNMKMGGLAATPPTQKPPSPPMSGKGTLGRHSPYRTLEPVRPPVVPNDYVPSPTRNMAPSQQSPVRTASVNQRNRTYSSSGSSGGSHPSSRSSSRENSGSGSVGVPIAVPTPSPPSVFPGHPVQFYSMNRPASRHTPPTIGGSLPYRRPPSITSQTSLQNQMNGGPFYSQNPVSLAPPPPSILQVTPQLPLMGFVARVQENISDTPPPPPPVEEPVFDESPPPPPPPEDYEEEEAAVVEYSDPYAEEDPPWAPRSYLEKVVAIYDYTKDKEDELSFQEGAIIYVIKKNDDGWYEGVMNGVTGLFPGNYVESIMHYSE

SEQ ID NO: 4891 - protein, 298 aa, Homo sapiens
MKMGGLAATPPTQKPPSPPMSGKGTLGSSGSSGGSHPSSRSSSRENSGSGSVGVPIAVPTPSPPSVFPAPAGSAGTPPLPATSASAPAPLVPATVPSSTAPDAAAGGAQTLADGFTSPTPPVVSSTPPTGHPVQFYSMNRPASRHTPPTIGGSLPYRRPPSITSQTSLQNQMNGGPFYSQNPVSDTPPPPPPVEEPVFDESPPPPPPPEDYEEEEAAVVEYSDPYAEEDPPWAPRSYLEKVVAIYDYTKDKEDELSFQEGAIIYVIKKNDDGWYEGVMNGVTGLFPGNYVESIMHYSE

SEQ ID NO: 4892 - protein, 641 aa, Homo sapiens
MGRRSTSSTKSGKFMNPTDQARKEARKRELKKNKKQRMMVRAAVLKMKDPKQIIRDMEKLDEMEFNPVQQPQLNEKVLKDKRKKLRETFERILRLYEKENPDIYKELRKLEVEYEQKRAQLSQYFDAVKNAQHVEVESIPLPDMPHAPSNILIQDIPLPGAQPPSILKKTSAYGPPTRAVSILPLLGHGVPRLPPGRKPPGPPPGPPPPQVVQMYGRKVGFALDLPPRRRDEDMLYSPELAQRGHDDDVSSTSEDDGYPEDMDQDKHDDSTDDSDTDKSDGESDGDEFVHRDNGERDNNEEKKSGLSVRFADMPGKSRKKKKNMKELTPLQAMMLRMAGQEIPEEGREVEEFSEDDDEDDSDDSEAEKQSQKQHKEESHSDGTSTASSQQQAPPQSVPPSQIQAPPMPGPPPLGPPPAPPLRPPGPPTGLPPGPPPGAPPFLRPPGMPGLRGPLPRLLPPGPPPGRPPGPPPGPPPGLPPGPPPRGPPPRLPPPAPPGIPPPRPGMMRPPLVPPLGPAPPGLFPPAPLPNPGVLSAPPNLIQRPKADDTSAATIEKKATATISAKPQITNPKAEITRFVPTALRVRRENKGATAAPQRKSEDDSAVPLAKAAPKSGPSVPVSVQTKDDVYEAFMKEMEGLL

SEQ ID NO: 4893 - protein, 1472 aa, Homo sapiens
MKGSEVSLEKKKKIKMPVKRLREVVSQNHGDHLVLLKDELPCVPPALSANKRLPVGTGTSLNGTSRGSSDLTSARNCYQPLLENPMVSESDFSKDVAVQVLPLDKIEENNKQKANDIFISQYTMGQKDALRTVLKQKAQSMPVFKEVKVHLLEDAGIEKDAVTQETRISPSGIDSATTVAAATAAAIATAAPLIKVQSDLEAKVNSVTELLSKLQETDKHLQRVTEQQTSIQRKQEKLHCHDHEKQMNVFMEQHIRHLEKLQQQQIDIQTHFISAALKTSSFQPVSMPSSRAVEKYSVKPEHPNLGSCNPSLYNTFASKQAPLKEVEDTSFDKQKSPLETPAPRRFAPVPVSRDDELSKRENLLEEKENMEVSCHRGNVRLLEQILNNNDSLTRKSESSNTTSLTRSKIGWTPEKTNRFPSCEELETTKVTMQKSDDVLHDLGQKEKETNSMVQPKESLSMLKLPDLPQNSVKLQTTNTTRSVLKDAEKILRGVQNNKKVLEENLEAIIRAKDGAAMYSLINALSTNREMSEKIRIRKTVDEWIKTISAEIQGLLKATTVIQDEDYMLQVYGKPVYQGHRSTLKKGPYLRFNSPSPKSRPQRPKVIERVKGTKVKSIRTQTDFYATKPKKMDSKMKHSVPVLPHGDQQYLFSPSREMPTFSGTLEGHLIPMAILLGQTQSNSDTMPPAGVIVSKPHPVTVTTSIPPSSRKVETGVKKPNIAIVEMKSEKKDPPQLTVQVLPSVDIDSISNSSADVLSPLSSPKEASLPPVQTWIKTPEIMKVDEEEVKFPGTNFDEIIDVIQEEEKCDEIPDSEPILEFNRSVKADSTKYNGPPFPPVASTFQPTADILDKVIERKETLENSLIQWVEQEIMSRIISGLFPVQQQIAPSISVSVSETSEPLTSDIVEGTSSGALQLFVDAGVPVNSNVIKHFVNEALAETIAVMLGDREAKKQGPVATGVSGDASTNETYLPARVCTPLPTPQPTPPCSPSSPAKECVLVKTPDSSPCDSDHDMAFPVKEICAEKGDDMPAIMLVNTPTVTPTTTPPPAAAVFTPTLSDISIDKLKVSSPELPKPWGDGDLPLEEENPNSPQEELHPRAIVMSVAKDEEPESMDFPAQPPPPEPVPFMPFPAGTKAPSPSQMPGSDSSTLESTLSVTVTETETLDKPISEGEILFSCGQKLAPKILEDIGLYLTNLNDSLSSTLHDAVEMEDDPPSEGQVIRMSHKKFHADAILSFAKQNQESAVSQQAVYHSEDLENSVGELSEGQRPQLTAAAENILMGHSLYMQPPVTNTQSLDQQCDPKPLSRQFDTVSGSIYEDSCASHGPMSLGELELEPNSKLVLPTTLLTAQENDVNLPVAAEDFSQYQLKQNQDVKQVEHKPSQSYLRVRNKSDIAPSQQQVSPGDMDRTQIELNPYLTCVFSGGKAVPLSASQMPPAKMSVMLPSVNLEDCSQSLSLSTMQEDMESSGADTF

SEQ ID NO: 4894 - protein, 661 aa, Homo sapiens
MEGAAAPVAGDRPDLGLGAPGSPREAVAGATAALEPRKPHGVKRHHHKHNLKHRYELQETLGKGTYGKVKRATERFSGRVVAIKSIRKDKIKDEQDMVHIRREIEIMSSLNHPHIISIYEVFENKDKIVIIMEYASKGELYDYISERRRLSERETRHFFRQIVSAVHYCHKNGVVHRDLKLENILLDDNCNIKIADFGLSNLYQKDKFLQTFCGSPLYASPEIVNGRPYRGPEVDSWALGVLLYTLVYGTMPFDGFDHKNLIRQISSGEYREPTQPSDARGLIRWMLMVNPDRRATIEDIANHWWVNWGYKSSVCDCDALHDSESPLLARIIDWHHRSTGLQADTEAKMKGLAKPTTSEVMLERQRSLKKSKKENDFAQSGQDAVPESPSKLSSKRPKGILKKRSNSEHRSHSTGFIEGVVGPALPSTFKMEQDLCRTGVLLPSSPEAEVPGKLSPKQSATMPKKGILKKTQQRESGYYSSPERSESSELLDSNDVMGSSIPSPSPPDPARVTSHSLSCRRKGILKHSSKYSAGTMDPALVSPEMPTLESLSEPGVPAEGLSRSYSRPSSVISDDSVLSSDSFDLLDLQENRPARQRIRSCVSAENFLQIQDFEGLQNRPRPQYLKRYRNRLADSSFSLLTDMDDVTQVYKQALEICSKLN

SEQ ID NO: 4895 - protein, 200 aa, Homo sapiens
MANIAVQRIKREFKEVLKSEETSKNQIKVDLVDENFTELRGEIAGPPDTPYEGGRYQLEIKIPETYPFNPPKVRFITKIWHPNISSVTGAICLDILKDQWAAAMTLRTVLLSLQALLAAAEPDDPQDAVVANQYKQNPEMFKQTARLWAHVYAGAPVSSPEYTKKIENLCAMGFDRNAVIVALSSKSWDVETATELLLSN

SEQ ID NO: 4896 - protein, 1770 aa, Homo sapiens
MPRRRKNLGGNPFRKTANPKEVVVSSVASREEPTTTLPSMGETKVDQEELFTSISEIFSDLDPDVVYLMLSECDFKVENAMDCLLELSATDTKIEESSSQSFVASENQVGAAESKIMEKRPEEESEDSKMDSFLDMQLTEDLDSLIQNAFEKLNSSPDDQVYSFLPSQDVNSFNDSSEFINPDSSNMTPIFSTQNMNLNGENLENSGSTLSLNPLPSHSVLNESKCFIKDNTLALESNYPEDSLLSSSLNVASDSIAGCSSLNQKQKELLESECVEAQFSEAPVDLDASEPQACLNLPGLDLPGTGGDQKSTRVSDVFLPSEGFNFKPHKHPELPTKGKDVSYCPVLAPLPLLLPPPPPPPMWNPMIPAFDLFQGNHGFVAPVVTTAAHWRSVNYTFPPSVISHTSPTKVWRNKDGTSAYQVQETPVSQVVRKKTSYVGLVLVLLRGLPGSGKSFLARTLQEDNPSGVILSTDDYFYINGQYQFDVKYLGEAHEWNQNRAKEAFEKKISPIIIDNTNLQAWEMKPYVALSQKHKYKVLFREPDTWWKFKPKELARRNIHGVSKEKITRMLEHYQRFVSVPIIMSSSVPEKIERIELCAYSCEDRSTSPRDDEDIISEKEENILSLSLKHLEFTEEKNLDVTKETMLPENVAYLSNADLNKRRKEISDMNPSIQSALILETPHMYFSDSESKLQATDKSENEQIEMVAVKGYSKTDTDSSMERVSPSTCCSENNQEDCDLANSGPLQNEKSSPGEIVEERATVTKKAFGKQKSKSTLEKFPRHELSNFVGDWPVDKTIGQRTKRNRKTEKTSSVQSDKKYNYPQSHKLVNSVSVNTDCVQQRGSPHESVEDGRKSQCDDASEPLNSYKYDAYKNIDKNSFNIMGDWPSSDSLAQREHRSRMPKTGLSEPNLEIGTNDKMNEISLSTAHEACWGTSSQKLKTLGSSNLGSSEMLLSEMTCESQTCLSKKSHGQHTSLPLTFTNSAPTVSGVVEPQTLAECQEQMPKRDPGKEVGMCTQTEPQDFALLWKIEKNKISISDSIKVLTGRLDGFKPKVFNINTKSDVQEAIPYRVMYDKSTFVEESELTSADESENLNILCKLFGSFSLEALKDLYERCNKDIIWATSLLLDSETKLCEDTEFENFQKSCDGSQIGPFSLGLNLKEIISQRGTLENSNSPVPEFSHGIGISNADSQSTCDAERGNSEQAEMRAVTPENHESMTSIFPSAAVGLKNNNDILPNSQEELLYSSKQSFPGILKATTPKDMSETEKNLVVTETGDNIHSPSHFSDIFNFVSSTSNLELNEEIYFTDSLEIKRNENFPKDYVKFSDEEEFMNEDEKEMKEILMAGSSLSAGVSGEDKTEILNPTPAMAKSLTIDCLELALPPELAFQLNELFGPVGIDSGSLTVEDCVVHIDLNLAKVIHEKWKESVMERQRQEEVSCGKFMQDPSLVGHTGLDNPEQKSSQRTGKKLLKTLTASEMLPLLDHWNTQTKKVSLREIMSEEIALQEKHNLKRETLMFEKDCATKLKEKQLFKIFPAINQNFLVDIFKDHNYSLEHTVQFLNCVLEGDPVKTVVAQEFVHQNENVTSHTGQKSKEKKPKKLKETEETPSELSFQDFEYPDYDDYRAEAFLHQQKRMECYSKAKEAYRIGKKNVATFYAQQGTLHEQKMKEANHLAAIEIFEKVNASLLPQNVLDLHGLHVDEALEHLMRVLEKKTEEFKQNGGKPYLSVITGRGNHSQGGVARIKPAVIKYLISHSFRFSEIKPGCLKVMLK

SEQ ID NO: 4897 - protein, 453 aa, Homo sapiens
MDWKEVLRRRLATPNTCPNKKKSEQELKDEEMDLFTKYYSEWKGGRKNTNEFYKTIPRFYYRLPAEDEVLLQKLREESRAVFLQRKSRELLDNEELQNLWFLLDKHQTPPMIGEEAMINYENFLKVGEKAGAKCKQFFTAKVFAKLLHTDSYGRISIMQFFNYVMRKVWLHQTRIGLSLYDVAGQGYLRESDLENYILELIPTLPQLDGLEKSFYSFYVCTAVRKFFFFLDPLRTGKIKIQDILACSFLDDLLELRDEELSKESQETNWFSAPSALRVYGQYLNLDKDHNGMLSKEELSRYGTATMTNVFLDRVFQECLTYDGEMDYKTYLDFVLALENRKEPAALQYIFKLLDIENKGYLNVFSLNYFFRAIQELMKIHGQDPVSFQDVKDEIFDMVKPKDPLKISLQDLINSNQGDTVTTILIDLNGFWTYENREALVANDSENSADLDDT

SEQ ID NO: 4898 - protein, 1115 aa, Homo sapiens
MPEDQVGKLEATENTISAMAAAAAEQQQFYLLLGNLLSPDNVVRKQAEETYENIPGQSKITFLLQAIRNTTAAEEARQMAAVLLRRLLSSAFDEVYPALPSDVQTAIKSELLMIIQMETQSSMRKKVCDIAAELARNLIDEDGNNQWPEGLKFLFDSVSSQNVGLREAALHIFWNFPGIFGNQQQHYLDVIKRMLVQCMQDQEHPSIRTLSARATAAFILANEHNVALFKHFADLLPGFLQAVNDSCYQNDDSVLKSLVEIADTVPKYLRPHLEATLQLSLKLCGDTSLNNMQRQLALEVIVTLSETAAAMLRKHTNIVAQTIPQMLAMMVDLEEDEDWANADELEDDDFDSNAVAGESALDRMACGLGGKLVLPMIKEHIMQMLQNPDWKYRHAGLMALSAIGEGCHQQMEGILNEIVNFVLLFLQDPHPRVRYAACNAVGQMATDFAPGFQKKFHEKVIAALLQTMEDQGNQRVQAHAAAALINFTEDCPKSLLIPYLDNLVKHLHSIMVLKLQELIQKGTKLVLEQVVTSIASVADTAEEKFVPYYDLFMPSLKHIVENAVQKELRLLRGKTIECISLIGLAVGKEKFMQDASDVMQLLLKTQTDFNDMEDDDPQISYMISAWARMCKILGKEFQQYLPVVMGPLMKTASIKPEVALLDTQDMENMSDDDGWEFVNLGDQQSFGIKTAGLEEKSTACQMLVCYAKELKEGFVEYTEQVVKLMVPLLKFYFHDGVRVAAAESMPLLLECARVRGPEYLTQMWHFMCDALIKAIGTEPDSDVLSEIMHSFAKCIEVMGDGCLNNEHFEELGGILKAKLEEHFKNQELRQVKRQDEDYDEQVEESLQDEDDNDVYILTKVSDILHSIFSSYKEKVLPWFEQLLPLIVNLICPHRPWPDRQWGLCIFDDVIEHCSPASFKYAEYFLRPMLQYVCDNSPEVRQAAAYGLGVMAQYGGDNYRPFCTEALPLLVRVIQSADSKTKENVNATENCISAVGKIMKFKPDCVNVEEVLPHWLSWLPLHEDKEEAVQTFNYLCDLIESNHPIVLGPNNTNLPKIFSIIAEGEMHEAIKHEDPCAKRLANVVRQVQTSGGLWTECIAQLSPEQQAAIQELLNSA

SEQ ID NO: 4899 - protein, 642 aa, Homo sapiens
MKRSSVSSGGAGRLSMQELRSQDVNKQGLYTPQTKEKPTFGKLSINKPTSERKVSLFGKRTSGHGSRNSQLGIFSSSEKIKDPRPLNDKAFIQQCIRQLCEFLTENGYAHNVSMKSLQAPSVKDFLKIFTFLYGFLCPSYELPDTKFEEEVPRIFKDLGYPFALSKSSMYTVGAPHTWPHIVAALVWLIDCIKIHTAMKESSPLFDDGQPWGEETEDGIMHNKLFLDYTIKCYESFMSGADSFDEMNAELQSKLKDLFNVDAFKLESLEAKNRALNEQIARLEQEREKEPNRLESLRKLKASLQGDVQKYQAYMSNLESHSAILDQKLNGLNEEIARVELECETIKQENTRLQNIIDNQKYSVADIERINHERNELQQTINKLTKDLEAEQQKLWNEELKYARGKEAIETQLAEYHKLARKLKLIPKGAENSKGYDFEIKFNPEAGANCLVKYRAQVYVPLKELLNETEEEINKALNKKMGLEDTLEQLNAMITESKRSVRTLKEEVQKLDDLYQQKIKEAEEEDEKCASELESLEKHKHLLESTVNQGLSEAMNELDAVQREYQLVVQTTTEERRKVGNNLQRLLEMVATHVGSVEKHLEEQIAKVDREYEECMSEDLSENIKEIRDKYEKKATLIKSSEE

SEQ ID NO: 4900 - protein, 1589 aa, Homo sapiens
MSLPFYQRCHQHYDLSYRNKDVRSTVSHYQREKKRSAVYTQGSTAYSSRSSAAHRRESEAFRRASASSSQQQASQHALSSEVSRKAASAYDYGSSHGLTDSSLLLDDYSSKLSPKPKRAKHSLLSGEEKENLPSDYMVPIFSGRQKHVSGITDTEEERIKEAAAYIAQRNLLASEEGITTSKQSTASKQTTASKQSTASKQSTASKQSTASRQSTASRQSVVSKQATSALQQEETSEKKSRKVVIREKAERLSLRKTLEETETYHAKLNEDHLLHAPEFIIKPRSHTVWEKENVKLHCSIAGWPEPRVTWYKNQVPINVHANPGKYIIESRYGMHTLEINGCDFEDTAQYRASAMNVKGELSAYASVVVKRYKGEFDETRFHAGASTMPLSFGVTPYGYASRFEIHFDDKFDVSFGREGETMSLGCRVVITPEIKHFQPEIQWYRNGVPLSPSKWVQTLWSGERATLTFSHLNKEDEGLYTIRVRMGEYYEQYSAYVFVRDADAEIEGAPAAPLDVKCLEANKDYIIISWKQPAVDGGSPILGYFIDKCEVGTDSWSQCNDTPVKFARFPVTGLIEGRSYIFRVRAVNKMGIGFPSRVSEPVAALDPAEKARLKSRPSAPWTGQIIVTEEEPSEGIVPGPPTDLSVTEATRSYVVLSWKPPGQRGHEGIMYFVEKCEAGTENWQRVNTELPVKSPRFALFDLAEGKSYCFRVRCSNSAGVGEPSEATEVTVVGDKLDIPKAPGKIIPSRNTDTSVVVSWEESKDAKELVGYYIEASVAGSGKWEPCNNNPVKGSRFTCHGLVTGQSYIFRVRAVNAAGLSEYSQDSEAIEVKAAIAPPSPPCDITCLESFRDSMVLGWKQPDKIGGAEITGYYVNYREVIDGVPGKWREANVKAVSEEAYKISNLKENMVYQFQVAAMNMAGLGAPSAVSECFKCEEWTIAVPGPPHSLKCSEVRKDSLVLQWKPPVHSGRTPVTGYFVDLKEAKAKEDQWRGLNEAAIKNVYLKVRGLKEGVSYVFRVRAINQAGVGKPSDLAGPVVAETRPGTKEVVVNVDDDGVISLNFECDKMTPKSEFSWSKDYVSTEDSPRLEVESKGNKTKMTFKDLGMDDLGIYSCDVTDTDGIASSYLIDEEELKRLLALSHEHKFPTVPVKSELAVEILEKGQVRFWMQAEKLSGNAKVNYIFNEKEIFEGPKYKMHIDRNTGIIEMFMEKLQDEDEGTYTFQLQDGKATNHSTVVLVGDVFKKLQKEAEFQRQEWIRKQGPHFVEYLSWEVTGECNVLLKCKVANIKKETHIVWYKDEREISVDEKHDFKDGICTLLITEFSKKDAGIYEVILKDDRGKDKSRLKLVDEAFKELMMEVCKKIALSATDLKIQSTAEGIQLYSFVTYYVEDLKVNWSHNGSAIRYSDRVKTGVTGEQIWLQINEPTPNDKGKYVMELFDGKTGHQKTVDLSGQAYDEAYAEFQRLKQAAIAEKNRARVLGGLPDVVTIQEGKALNLTCNVWGDPPPEVSWLKNEKALASDDHCNLKFEAGRTAYFTINGVSTADSGKYGLVVKNKYGSETSDFTVSVFIPEEEARMAALESLKGGKKAK

SEQ ID NO: 4901 - protein, 181 aa, Homo sapiens
MGGFFSSIFSSLFGTREMRILILGLDGAGKTTILYRLQVGEVVTTIPTIGFNVETVTYKNLKFQVWDLGGQTSIRPYWRCYYSNTDAVIYVVDSCDRDRIGISKSELVAMLEEEELRKAILVVFANKQDMEQAMTSSEMANSLGLPALKDRKWQIFKTSATKGTGLDEAMEWLVETLKSRQ

SEQ ID NO: 4902 - protein, 422 aa, Homo sapiens
MAAAAVVEFQRAQSLLSTDREASIDILHSIVKRDIQENDEEAVQVKEQSILELGSLLAKTGQAAELGGLLKYVRPFLNSISKAKAARLVRSLLDLFLDMEAATGQEVELCLECIEWAKSEKRTFLRQALEARLVSLYFDTKRYQEALHLGSQLLRELKKMDDKALLVEVQLLESKTYHALSNLPKARAALTSARTTANAIYCPPKLQATLDMQSGIIHAAEEKDWKTAYSYFYEAFEGYDSIDSPKAITSLKYMLLCKIMLNTPEDVQALVSGKLALRYAGRQTEALKCVAQASKNRSLADFEKALTDYRAELRDDPIISTHLAKLYDNLLEQNLIRVIEPFSRVQIEHISSLIKLSKADVERKLSQMILDKKFHGILDQGEGVLIIFDEPPVDKTYEAALETIQNMSKVVDSLYNKAKKLT

SEQ ID NO: 4903 - protein, 482 aa, Homo sapiens
MASLGPAAAGEQASGAEAEPGPAGPPPPPSPSSLGPLLPLQREPLYNWQATKASLKERFAFLFNSELLSDVRFVLGKGRGAAAAGGPQRIPAHRFVLAAGSAVFDAMFNGGMATTSAEIELPDVEPAAFLALLRFLYSDEVQIGPETVMTTLYTAKKYAVPALEAHCVEFLTKHLRADNAFMLLTQARLFDEPQLASLCLDTIDKSTMDAISAEGFTDIDIDTLCAVLERDTLSIRESRLFGAVVRWAEAECQRQQLPVTFGNKQKVLGKALSLIRFPLMTIEEFAAGPAQSGILSDREVVNLFLHFTVNPKPRVEYIDRPRCCLRGKECCINRFQQVESRWGYSGTSDRIRFTVNRRISIVGFGLYGSIHGPTDYQVNIQIIEYEKKQTLGQNDTGFSCDGTANTFRVMFKEPIEILPNVCYTACATLKGPDSHYGTKGLKKVVHETPAASKTVFFFFSSPGNNNGTSIEDGQIPEIIFYT

SEQ ID NO: 4904 - protein, 960 aa, Homo sapiens
MSRLIVKNLPNGMKEERFRQLFAAFGTLTDCSLKFTKDGKFRKFGFIGFKSEEEAQKAQKHFNKSFIDTSRITVEFCKSFGDPAKPRAWSKHAQKPSQPKQPPKDSTTPEIKKDEKKKKVAGQLEKLKEDTEFQEFLSVHQRRAQAATWANDGLDAEPSKGKSKPASDYLNFDSDSGQESEEEGAGEDLEEEASLEPKAAVQKELSDMDYLKSKMVKAGSSSSSEEEESEDEAVHCDEGSEAEEEDSSATPVLQERDSKGAGQEQGMPAGKKRPPEARAETEKPANQKEPTTCHTVKLRGAPFNVTEKNVMEFLAPLKPVAIRIVRNAHGNKTGYIFVDFSNEEEVKQALKCNREYMGGRYIEVFREKNVPTTKGAPKNTTKSWQGRILGENEEEEDLAESGRLFVRNLPYTSTEEDLEKLFSKYGPLSELHYPIDSLTKKPKGFAFITFMFPEHAVKAYSEVDGQVFQGRMLHVLPSTIKKEASEDASALGSSSYKKKKEAQDKANSASSHNWNTLFMGPNAVADAIAQKYNATKSQVFDHETKGSVAVRVALGETQLVQEVRRFLIDNGVSLDSFSQAAAERSKTVILVKNLPAGTLAAQLQETFGHFGSLGRVLLPEGGITAIVEFLEPLEARKAFRHLAYSKFHHVPLYLEWAPVGVFSSTAPQKKKLQDTPSEPMEKDPAEPETVPDGETPEDENPTEEGADNSSAKMEEEEEEEEEEEESLPGCTLFIKNLNFDTTEEKLKEVFSKVGTVKSCSISKKKNKAGVLLSMGFGFVEYRKPEQAQKALKQLQGHVVDGHKLEVRISERATKPAVTLARKKQVPRKQTTSKILVRNIPFQAHSREIRELFSTFGELKTVRLPKKMTGTGTHRGFGFVDFLTKQDAKRAFNALCHSTHLYGRRLVLEWADSEVTLQALRRKTAAHFHEPPKKKRSVVLDEILEQLEGSDSDSEEQTLQL

SEQ ID NO: 4905 - protein, 972 aa, Homo sapiens
MATRGHVQDPNDRRLRPIYDYLDNGNNKMAIQQADKLLKKHKDLHCAKVLKAIGLQRTGKQEEAFTLAQEVAALEPTDDNSLQALTILYREMHRPELVTKLYEAAVKKVPNSEEYHSHLFMAYARVGEYKKMQQAGMALYKIVPKNPYYFWSVMSLIMQSISAQDENLSKTMFLPLAERMVEKMVKEDKIEAEAEVELYYMILERLGKYQEALDVIRGKLGEKLTSEIQSRENKCMAMYKKLSRWPECNALSRRLLLKNSDDWQFYLTYFDSVFRLIEEAWSPPAEGEHSLEGEVHYSAEKAVKFIEDRITEESKSSRHLRGPHLAKLELIRRLRSQGCNDEYKLGDPEELMFQYFKKFGDKPCCFTDLKVFVDLLPATQCTKFINQLLGVVPLSTPTEDKLALPADIRALQQHLCVVQLTRLLGLYHTMDKNQKLSVVRELMLRYQHGLEFGKTCLKTELQFSDYYCLLAVHALIDVWRETGDETTVWQALTLLEEGLTHSPSNAQFKLLLVRIYCMLGAFEPVVDLYSSLDAKHIQHDTIGYLLTRYAESLGQYAAASQSCNFALRFFHSNQKDTSEYIIQAYKYGAFEKIPEFIAFRNRLNNSLHFAQVRTERMLLDLLLEANISTSLAESIKSMNLRPEEDDIPWEDLRDNRDLNVFFSWDPKDRDVSEEHKKLSLEEETLWLRIRSLTLRLISGLPSLNHPVEPKNSEKTAENGVSSRIDILRLLLQQLEATLETGKRFIEKDIQYPFLGPVPTRMGGFFNSGCSQCQISSFYLVNDIYELDTSGLEDTMEIQERIENSFKSLLDQLKDVFSKCKGDLLEVKDGNLKTHPTLLENLVFFVETISVILWVSSYCESVLRPYKLNLQKKKKKKKETSIIMPPVFTSFQDYVTGLQTLISNVVDHIKGLETHLIALKLEELILEDTSLSPEERKFSKTVQGKVQSSYLHSLLEMGELLKKRLETTKKLKI

SEQ ID NO: 4906 - protein, 721 aa, Homo sapiens
MAEKFESLMNIHGFDLGSRYMDLKPLGCGGNGLVFSAVDNDCDKRVAIKKIVLTDPQSVKHALREIKIIRRLDHDNIVKVFEILGPSGSQLTDDVGSLTELNSVYIVQEYMETDLANVLEQGPLLEEHARLFMYQLLRGLKYIHSANVLHRDLKPANLFINTEDLVLKIGDFGLARIMDPHYSHKGHLSEGLVTKWYRSPRLLLSPNNYTKAIDMWAAGCIFAEMLTGKTLFAGAHELEQMQLILESIPVVHEEDRQELLSVIPVYIRNDMTEPHKPLTQLLPGISREALDFLEQILTFSPMDRLTAEEALSHPYMSIYSFPMDEPISSHPFHIEDEVDDILLMDETHSHIYNWERYHDCQFSEHDWPVHNNFDIDEVQLDPRALSDVTDEEEVQVDPRKYLDGDREKYLEDPAFDTNYSTEPCWQYSDHHENKYCDLECSHTCNYKTRSSSYLDNLVWRESEVNHYYEPKLIIDLSNWKEQSKEKSDKKGKSKCERNGLVKAQIALEEASQQLAGKEREKNQGFDFDSFIAGTIQLSSQHEPTDVVDKLNDLNSSVSQLELKSLISKSVSQEKQEKGMANLAQLEALYQSSWDSQFVSGGEDCFFINQFCEVRKDEQVEKENTYTSYLDKFFSRKEDTEMLETEPVEDGKLGERGHEEGFLNNSGEFLFNKQLESIGIPQFHSPVGSPLKSIQATLTPSAMKSSPQIPHQTYSSILKHLN

SEQ ID NO: 4907 - protein, 315 aa, Homo sapiens
MAAGVPCALVTSCSSVFSGDQLVQHILGTEDLIVEVTSNDAVRFYPWTIDNKYYSADINLCVVPNKFLVTAEIAESVQAFVVYFDSTQKSGLDSVSSWLPLAKAWLPEVMILVCDRVSEDGINRQKAQEWCIKHGFELVELSPEELPEEDDDFPESTGVKRIVQALNANVWSNVVMKNDRNQGFSLLNSLTGTNHSIGSADPCHPEQPHLPAADSTESLSDHRGGASNTTDAQVDSIVDPMLDLDIQELASLTTGGGDVENFERLFSKLKEMKDKAATLPHEQRKVHAEKVAKAFWMAIGGDRDEIEGLSSDEEH

SEQ ID NO: 4908 - protein, 445 aa, Homo sapiens
MAAPEERDLTQEQTEKLLQFQDLTGIESMDQCRHTLEQHNWNIEAAVQDRLNEQEGVPSVFNPPPSRPLQVNTADHRIYSYVVSRPQPRGLLGWGYYLIMLPFRFTYYTILDIFRFALRFIRPDPRSRVTDPVGDIVSFMHSFEEKYGRAHPVFYQGTYSQALNDAKRELRFLLVYLHGDDHQDSDEFCRNTLCAPEVISLINTRMLFWACSTNKPEGYRVSQALRENTYPFLAMIMLKDRRMTVVGRLEGLIQPDDLINQLTFIMDANQTYLVSERLEREERNQTQVLRQQQDEAYLASLRADQEKERKKREERERKRRKEEEVQQQKLAEERRRQNLQEEKERKLECLPPEPSPDDPESVKIIFKLPNDSRVERRFHFSQSLTVIHDFLFSLKESPEKFQIEANFPRRVLPCIPSEEWPNPPTLQEAGLSHTEVLFVQDLTDE

SEQ ID NO: 4909 - protein, 907 aa, Homo sapiens
MATPDQKSPNVLLQNLCCRILGRSEADVAQQFQYAVRVIGSNFAPTVERDEFLVAEKIKKELIRQRREADAALFSELHRKLHSQGVLKNKWSILYLLLSLSEDPRRQPSKVSSYATLFAQALPRDAHSTPYYYARPQTLPLSYQDRSAQSAQSSGSVGSSGISSIGLCALSGPAPAPQSLLPGQSNQAPGVGDCLRQQLGSRLAWTLTANQPSSQATTSKGVPSAVSRNMTRSRREGDTGGTMEITEAALVRDILYVFQGIDGKNIKMNNTENCYKVEGKANLSRSLRDTAVRLSELGWLHNKIRRYTDQRSLDRSFGLVGQSFCAALHQELREYYRLLSVLHSQLQLEDDQGVNLGLESSLTLRRLLVWTYDPKIRLKTLAALVDHCQGRKGGELASAVHAYTKTGDPYMRSLVQHILSLVSHPVLSFLYRWIYDGELEDTYHEFFVASDPTVKTDRLWHDKYTLRKSMIPSFMTMDQSRKVLLIGKSINFLHQVCHDQTPTTKMIAVTKSAESPQDAADLFTDLENAFQGKIDAAYFETSKYLLDVLNKKYSLLDHMQAMRRYLLLGQGDFIRHLMDLLKPELVRPATTLYQHNLTGILETAVRATNAQFDSPEILRRLDVRLLEVSPGDTGWDVFSLDYHVDGPIATVFTRECMSHYLRVFNFLWRAKRMEYILTDIRKGHMCNAKLLRNMPEFSGVLHQCHILASEMVHFIHQMQYYITFEVLECSWDELWNKVQQAQDLDHIIAAHEVFLDTIISRCLLDSDSRALLNQLRAVFDQIIELQNAQDAIYRAALEELQRRLQFEEKKKQREIEGQWGVTAAEEEEENKRIGEFKESIPKMCSQLRILTHFYQGIVQQFLVLLTTSSDESLRFLSFRLDFNEHYKAREPRLRVSLGTRGRRSSHT

SEQ ID NO: 4910 - protein, 361 aa, Homo sapiens
MTGKAGEALSKPKSETVAKSTSGGAPARCTGFGIQEILGLNKEPPSSHPRAALDGLAPGHLLAARSVLSPAGVGGMGLLGPGGLPGFYTQPTFLEVLSDPQSVHLQPLGRASGPLDTSQTASSDSEDVSSSDRKMSKSALNQTKKRKKRRHRTIFTSYQLEELEKAFNEAHYPDVYAREMLAMKTELPEDRIQVWFQNRRAKWRKREKCWGRSSVMAEYGLYGAMVRHSIPLPESILKSAKDGIMDSCAPWLLGMHKKSLEAAAESGRKPEGERQALPKLDKMEQDERGPDAQAAISQEELRENSIAVLRAKAQEHSTKVLGTVSGPDSLARSTEKPEEEEAMDEDRPAERLSPPQLEDMA

SEQ ID NO: 4911 - protein, 690 aa, Homo sapiens
MEESPLSRAPSRGGVNFLNVARTYIPNTKVECHYTLPPGTMPSASDWIGIFKVEAACVRDYHTFVWSSVPESTTDGSPIHTSVQFQASYLPKPGAQLYQFRYVNRQGQVCGQSPPFQFREPRPMDELVTLEEADGGSDILLVVPKATVLQNQLDESQQERNDLMQLKLQLEGQVTELRSRVQELERALATARQEHTELMEQYKGISRSHGEITEERDILSRQQGDHVARILELEDDIQTISEKVLTKEVELDRLRDTVKALTREQEKLLGQLKEVQADKEQSEAELQVAQQENHHLNLDLKEAKSWQEEQSAQAQRLKDKVAQMKDTLGQAQQRVAELEPLKEQLRGAQELAASSQQKATLLGEELASAAAARDRTIAELHRSRLEVAEVNGRLAELGLHLKEEKCQWSKERAGLLQSVEAEKDKILKLSAEILRLEKAVQEERTQNQVFKTELAREKDSSLVQLSESKRELTELRSALRVLQKEKEQLQEEKQELLEYMRKLEARLEKVADEKWNEDATTEDEEAAVGLSCPAALTDSEDESPEDMRLPPYGLCERGDPGSSPAGPREASPLVVISQPAPISPHLSGPAEDSSSDSAEDEKSVLMAAVQSGGEEANLLLPELGSAFYDMASGFTVGTLSETSTGGPATPTWKECPICKERFPAESDKDALEDHMDGHFFFSTQDPFTFE

SEQ ID NO: 4912 - protein, 659 aa, Homo sapiens
MSLPPEKASELKQLIHQQLSKMDVHGRIREILAETIREELAPDQQHLSTEDLIKALRRRGIIDDVMKELNFVTDSVEQELPSSPKQPICFDRQSTLKKTNIDPTRRYLYLQVLGGKAFLEHLQEPEPLPGQVCSTFTLCLHYRNQRFRSKPVPCACEPDFHDGFLLEVHRESLGDGTRMADSTTMLSISDPIHMVLIKTDIFGETTLVASYFLEWRSVLGSENGVTSLTVELMGVGTESKVSVGILNIKLEMYPPLNQTLSQEVVNTQLALERQKTAEKERLFLVYAKQWWREYLQIRPSHNSRLVKIFAQDENGINRPVCSYVKPLRAGRLLDTPRQAARFVNVLGYERAPVIGGGGKQEQWCTLLAFLCRNKGDCEDHANLLCSLLLGYGLEAFVCVGTKAKGVPHAWVMTCGTDGAITFWESLTGHRYIHKPTNPDEPPVAEQPKPLYPYRTIGCVFNHQMFLGNCQPSDAVETCVFDLNDESKWKPMSEEAIKSVCAPGATTSLPPFPPLCASTIDASVTSNEIEMQLRLLVSEHRKDLGLTTVWEDQLSYLLSPALASYEFERTTSISAGNEEFQDAIRRAVPDGHTFKGFPIHFVYRNARRAFATCLRSPFCEEIICCRGDQVRLAVRVRVFTYPESACAVWIMFACKYRSVL

SEQ ID NO: 4913 - protein, 498 aa, Homo sapiens
MLERPPALAMPMPTEGTPPPLSGTPIPVPAYFRHAEPGFSLKRPRGLSRSLPPPPPAKGSIPISRLFPAAPGWHQLQPRRVSFRGEASETLQSPGYDPSRPESFFQQSFQRLSRLGHGSYGEVFKVRSKEDGRLYAVKRSMSPFRGPKDRARKLAEVGSHEKVGQHPCCVRLEQAWEEGGILYLQTELCGPSLQQHCEAWGASLPEAQVWGYLRDTLLALAHLHSQGLVHLDVKPANIFLGPRGRCKLGDFGLLVELGTAGAGEVQEGDPRYMAPELLQGSYGTAADVFSLGLTILEVACNMELPHGGEGWQQLRQGYLPPEFTAGLSSELRSVLVMMLEPDPKLRATAEALLALPVLRQPRAWGVLWCMAAEALSRGWALWQALLALLCWLWHGLAHPASWLQPLGPPATPPGSPPCSLLLDSSLSSNWDDDSLGPSLSPEAVLARTVGSTSTPRSRCTPRDALDLSDINSEPPRGSFPSFEPRNLLSLFEDTLDPT

SEQ ID NO: 4914 - protein, 161 aa, Homo sapiens
MDVFLMIRRHKTTIFTDAKESSTVFELKRIVEGILKRPPDEQRLYKDDQLLDDGKTLGECGFTSQTARPQAPATVGLAFRADDTFEALCIEPFSSPPELPDVMKPQDSGSSANEQAVHLHVHSQTMAKSRNTSWSQCPGLTACSTREPQDGPTQVHPRWGL

SEQ ID NO: 4915 - protein, 506 aa, Homo sapiens
MTGEKIRSLRRDHKPSKEEGDLLEPGDEEAAAALGGTFTRSRIGKGGKACHKIFSNHHHRLQLKAAPASSNPPGAPALPLHNSSVTANSQSPALLAGTNPVAVVADGGSCPAHYPVHECVFKGDVRRLSSLIRTHNIGQKDNHGNTPLHLAVMLGNKVTALLRKLKQQSRESVEEKRPRLLKALKELGDFYLELHWDFQSWVPLLSRILPSDACKIYKQGINIRLDTTLIDFTDMKCQRGDLSFIFNGDAAPSESFVVLDNEQKVYQRIHHEESEMETEEEVDILMSSDIYSATLSTKSISFTRAQTGWLFREDKTERVGNFLADFYLVNGLVLESRKRREHLSEEDILRNKAIMESLSKGGNIMEQNFEPIRRQSLTPPPQNTITWEEYISAENGKAPHLGRELVCKESKKTFKATIAMSQEFPLGIELLLNVLEVVAPFKHFNKLREFVQMKLPPGFPVKLDIPVFPTITATVTFQEFRYDEFDGSIFTIPDDYKEDPSRFPDL

SEQ ID NO: 4916 - protein, 232 aa, Homo sapiens
MQPPAPPAELAAPLPSPLPEQPLDSPAAPALSPSGLGLQPGPERTSTTKSKELSPGSAQKGSPGSSQGTACAGTQPGAQPGAQPGASPSPSQPPADQSPHTLRKVSKKLAPIPPKVPFGQPGAMADQSAGQPSPVSLSPTPPSTPSPYGLSYPQGYSLASGQLSPAAAPPLASPSVFTSTLSKSRPTPKPRQRPTLPPPQPPTVNLSASSPQSTEAPMLDGMSPGESMSTAV

SEQ ID NO: 4917 - protein, 406 aa, Homo sapiens
MHPAVFLSLPDLRCSLLLLVTWVFTPVTTEITSLDTENIDEILNNADVALVNFYADWCRFSQMLHPIFEEASDVIKEEFPNENQVVFARVDCDQHSDIAQRYRISKYPTLKLFRNGMMMKREYRGQRSVKALADYIRQQKSDPIQEIRDLAEITTLDRSKRNIIGYFEQKDSDNYRVFERVANILHDDCAFLSAFGDVSKPERYSGDNIIYKPPGHSAPDMVYLGAMTNFDVTYNWIQDKCVPLVREITFENGEELTEEGLPFLILFHMKEDTESLEIFQNEVARQLISEKGTINFLHADCDKFRHPLLHIQKTPADCPVIAIDSFRHMYVFGDFKDVLIPGKLKQFVFDLHSGKLHREFHHGPDPTDTAPGEQAQDVASSPPESSFQKLAPSEYRYTLLRDRDEL

SEQ ID NO: 4918 - protein, 1866 aa, Homo sapiens
MDPVGLQLGNKNLWSCLVRLLTKDPEWLNAKMKFFLPNTDLDSRNETLDPEQRVILQLNKLHVQGSDTWQSFIHCVCMQLEVPLDLEVLLLSTFGYDDGFTSQLGAEGKSQPESQLHHGLKRPHQSCGSSPRRKQCKKQQLELAKKYLQLLRTSAQQRYRSQIPGSGQPHAFHQVYVPPILRRATASLDTPEGAIMGDVKVEDGADVSISDLFNTRVNKGPRVTVLLGKAGMGKTTLAHRLCQKWAEGHLNCFQALFLFEFRQLNLITRFLTPSELLFDLYLSPESDHDTVFQYLEKNADQVLLIFDGLDEALQPMGPDGPGPVLTLFSHLCNGTLLPGCRVMATSRPGKLPACLPAEAAMVHMLGFDGPRVEEYVNHFFSAQPSREGALVELQTNGRLRSLCAVPALCQVACLCLHHLLPDHAPGQSVALLPNMTQLYMQMVLALSPPGHLPTSSLLDLGEVALRGLETGKVIFYAKDIAPPLIAFGATHSLLTSFCVCTGPGHQQTGYAFTHLSLQEFLAALHLMASPKVNKDTLTQYVTLHSRWVQRTKARLGLSDHLPTFLAGLASCTCRPFLSHLAQGNEDCVGAKQAAVVQVLKKLATRKLTGPKVVELCHCVDETQEPELASLTAQSLPYQLPFHNFPLTCTDLATLTNILEHREAPIHLDFDGCPLEPHCPEALVGCGQIENLSFKSRKCGDAFAEALSRSLPTMGRLQMLGLAGSKITARGISHLVKALPLCPQLKEVSFRDNQLSDQVVLNIVEVLPHLPRLRKLDLSSNSICVSTLLCLARVAVTCPTVRMLQAREADLIFLLSPPTETTAELQRAPDLQESDGQRKGAQSRSLTLRLQKCQLQVHDAEALIALLQEGPHLEEVDLSGNQLEDEGCRLMAEAASQLHIARKLDLSNNGLSVAGVHCVLRAVSACWTLAELHISLQHKTVIFMFAQEPEEQKGPQERAAFLDSLMLQMPSELPLSSRRMRLTHCGLQEKHLEQLCKALGGSCHLGHLHLDFSGNALGDEGAARLAQLLPGLGALQSLNLSENGLSLDAVLGLVRCFSTLQWLFRLDISFESQHILLRGDKTSRDMWATGSLPDFPAAAKFLGFRQRCIPRSLCLSECPLEPPSLTRLCATLKDCPGPLELQLSCEFLSDQSLETLLDCLPQLPQLSLLQLSQTGLSPKSPFLLANTLSLCPRVKKVDLRSLHHATLHFRSNEEEEGVCCGRFTGCSLSQEHVESLCWLLSKCKDLSQVDLSANLLGDSGLRCLLECLPQVPISGLLDLSHNSISQESALYLLETLPSCPRVREASVNLGSEQSFRIHFSREDQAGKTLRLSECSFRPEHVSRLATGLSKSLQLTELTLTQCCLGQKQLAILLSLVGRPAGLFSLRVQEPWADRARVLSLLEVCAQASGSVTEISISETQQQLCVQLEFPRQEENPEAVALRLAHCDLGAHHSLLVGQLMETCARLQQLSLSQVNLCEDDDASSLLLQSLLLSLSELKTFRLTSSCVSTEGLAHLASGLGHCHHLEELDLSNNQFDEEGTKALMRALEGKWMLKRLDLSHLLLNSSTLALLTHRLSQMTCLQSLRLNRNSIGDVGCCHLSEALRAATSLEELDLSHNQIGDAGVQHLATILPGLPELRKIDLSGNSISSAGGVQLAESLVLCRRLEELMLGCNALGDPTALGLAQELPQHLRVLHLPFSHLGPGGALSLAQALDGSPHLEEISLAENNLAGGVLRFCMELPLLRQIDLVSCKIDNQTAKLLTSSFTSCPALEVILLSWNLLGDEAAAELAQVLPQMGRLKRVDLEKNQITALGAWLLAEGLAQGSSIQVIRLWNNPIPCDMAQHLKSQEPRLDFAFFDNQPQAPWGT

SEQ ID NO: 4919 - protein, 298 aa, Homo sapiens
MMNVNTRGTYLASKACIPYLKKSKVAHILNISPPLNLNPVWFKQHCAYTIAKYGMSMYVLGMAEEFKGEIAVNALWPKTAIHTAAMDMLGGPGIESQCRKVDIIADAAYSIFQKPKSFTGNFVIDENILKEEGIENFDVYAIKPGHPLQPDFFLDEYPEAVSKKVESTGAVPEFKEEKLQLQPKPRSGAVEETFRIVKDSLSDDVVKATQAIYLFELSGEDGGTWFLDLKSKGGNVGYGEPSDQADVVMSMTTDDFVKMFSGKLKPTMAFMSGKLKIKGNMALAIKLEKLMNQMNARL

SEQ ID NO: 4920 - protein, 1342 aa, Homo sapiens
MWRRKHAASGGTRGVLSGNRGVEYGSGRGHLGTFEGRWRKLPKMPEAVGTDPSTSRKMAELEEVTLDGKPLQALRVTDLKAALEQRGLAKSGQKSALVKRLKGALMLENLQKHSTPHAAFQPNSQIGEEMSQNSFIKQYLEKQQELLRQRLEREAREAAELEEASAESEDEMIHPEGVASLLPPDFQSSLERPELELSRHSPRKSSSISEEKGDSDDEKPRKGERRSSRVRQARAAKLSEGSQPAEEEEDQETPSRNLRVRADRNLKTEEEEEEEEEEEEDDEEEEGDDEGQKSREAPILKEFKEEGEEIPRVKPEEMMDERPKTRSQEQEVLERGGRFTRSQEEARKSHLARQQQEKEMKTTSPLEEEEREIKSSQGLKEKSKSPSPPRLTEDRKKASLVALPEQTASEEETPPPLLTKEASSPPPHPQLHSEEEIEPMEGPAPAVLIQLSPPNTDADTRELLVSQHTVQLVGGLSPLSSPSDTKAESPAEKVPEESVLPLVQKSTLADYSAQKDLEPESDRSAQPLPLKIEELALAKGITEECLKQPSLEQKEGRRASHTLLPSHRLKQSADSSSSRSSSSSSSSSRSRSRSPDSSGSRSHSPLRSKQRDVAQARTHANPRGRPKMGSRSTSESRSRSRSRSRSASSNSRKSLSPGVSRDSSTSYTETKDPSSGQEVATPPVPQLQVCEPKERTSTSSSSVQARRLSQPESAEKHVTQRLQPERGSPKKCEAEEAEPPAATQPQTSETQTSHLPESERIHHTVEEKEEVTMDTSENRPENDVPEPPMPIADQVSNDDRPEGSVEDEEKKESSLPKSFKRKISVVSATKGVPAGNSDTEGGQPGRKRRWGASTATTQKKPSISITTESLKSLIPDIKPLAGQEAVVDLHADDSRISEDETERNGDDGTHDKGLKICRTVTQVVPAEGQENGQREEEEEEKEPEAEPPVPPQVSVEVALPPPAEHEVKKVTLGDTLTRRSISQQKSGVSITIDDPVRTAQVPSPPRGKISNIVHISNLVRPFTLGQLKELLGRTGTLVEEAFWIDKIKSHCFVTYSTVEEAVATRTALHGVKWPQSNPKFLCADYAEQDELDYHRGLLVDRPSETKTEEQGIPRPLHPPPPPPVQPPQHPRAEQREQERAVREQWAEREREMERRERTRSEREWDRDKVREGPRSRSRSRDRRARGSERAKSKEKKSEKKEKAQEEPPAKLLDDLFRKTKAAPCIYWLPLTDSQIVQKEAERAERAKEREKRRKEQEEEEQKEREKEAERERNRQLEREKRREHSRERDRERERERERDRGDRDRDRERDRERGRERDRRDTKRHSRSRSRSTPVRDRGGRR

SEQ ID NO: 4921 - protein, 199 aa, Homo sapiens
MSSGNAKIGHPAPNFKATAVMPDGQFKDISLSDYKGKYVVFFFYPLDFTFVCPTEIIAFSDRAEEFKKLNCQVIGASVDSHFCHLAWVNTPKKQGGLGPMNIPLVSDPKRTIAQDYGVLKADEGISFRGLFIIDDKGILRQITVNDLPVGRSVDETLRLVQAFQFTDKHGEVCPAGWKPGSDTIKPDVQKSKEYFSKQK

SEQ ID NO: 4922 - protein, 358 aa, Homo sapiens
MEKKKMVTQGNQEPTTTPDAMVQPFTTIPFPPPPQNGIPTEYGVPHTQDYAGQTGEHNLTLYGSTQAHGEQSSNSPSTQNGSLTTEGGAQTDGQQSQTQSSENSESKSTPKRLHVSNIPFRFRDPDLRQMFGGFGFVTFENSADADRAREKLHGTVVEGRKIEVNNATARVMTNKKMVTPYANGWKLSPVVGAVYGPELYAASSFQADVSLGNDAAVPLSGRGGINTYIPLIIPGFPYPTAATTAAAFRGAHLRGRGRTVYGAVRAVPPTAIPAYPGVVYQDGFYGADLYGGYAAYRYAQPATATAATAAAAAAAAYSDGYGRVYTADPYHALAPAASYGVGAVASLYRGGYSRFAPY

SEQ ID NO: 4923 - protein, 531 aa, Homo sapiens
MSYPADDYESEAAYDPYAYPSDYDMHTGDPKQDLAYERQYEQQTYQVIPEVIKNFIQYFHKTVSDLIDQKVYELQASRVSSDVIDQKVYEIQDIYENSWTKLTERFFKNTPWPEAEAIAPQVGNDAVFLILYKILQAHGPAPLELPNQWLWDIIDEFIYQFQSFSQYRCKTAKKSEEEIDFLRSNPKIWNVHSVLNVLHSLVDKSNINRQLEVYTSGGDPESVAGEYGRHSLYKMLGYFSLVGLLRLHSLLGDYYQAIKVLENIELNKKSMYSRVPECQVTTYYYVGFAYLMMRRYQDAIRVFANILLYIQRTKSMFQRTTYKYEMINKQNEQMHALLAIALTMYPMRIDESIHLQLREKYGDKMLRMQKGDPQVYEELFSYSCPKFLSPVVPNYDNVHPNYHKEPFLQQLKVFSDEVQQQAQLSTIRSFLKLYTTMPVAKLAGFLDLTEQEFRIQLLVFKHKMKNLVWTSGISALDGEFQSASEVDFYIDKDMIHIADTKVARRYGDFFIRQIHKFEELNRTLKKMGQRP

SEQ ID NO: 4924 - protein, 1985 aa, Homo sapiens
MSGNKRGSRASCPHRGAECLLPWAALNLQGFQLLLLHPSATAMMDVSELGESARYLRQGYQEMTKVHTIPWDGKKRVWVPDEQDAYVEAEVKSEATGGRVTVETKDQKVLMVREAELQPMNPPRFDLLEDMAMMTHLNEASVLHNLRQRYARWMIYTYSGLFCVTINPYKWLPVYTASVVAAYKGKRRSDSPPHIYAVADNAYNDMLRNRDNQSMLITGESGAGKTVNTKRVIQYFAIVAALGDGPGKKAQFLATKTGGTLEDQIIEANPAMEAFGNAKTLRNDNSSRFGKFIRIHFGPSGKLASADIDSYLLEKSRVIFQLPGERSYHVYYQILSGRKPELQDMLLLSMNPYDYHFCSQGVITVDNMNDGEELIATDHAMDILGFSVDEKCACYKIVGALLHFGNMKFKQKQREEQAEADGTESADKAAYLMGVSSGDLLKGLLHPRVRVGNEYVTKGQSVEQVVFAVGALAKATYDRLFRWLVSRINQTLDTKLPRQFFIGVLDIAGFEIFEFNSFEQLCINFTNEKLQQFFNQHMFVLEQEEYKREGIDWVFIDFGLDLQPCIDLIEKPLGILSILEEECMFPKASDASFRAKLYDNHAGKSPNFQQPRPDKKRKYQAHFEVVHYAGVVPYSIVGWLEKNKDPLNETVVPIFQKSQNRLLATLYENYAGSCSTEPPKSGVKEKRKKAASFQTVSQLHKENLNKLMTNLRATQPHFVRCIVPNENKTPGVMDAFLVLHQLRCNGVLEGIRICRQGFPNRLLYTDFRQRYRILNPSAIPDDTFMDSRKATEKLLGSLDLDHTQYQFGHTKVFFKAGLLGVLEELRDQRLAKVLTLLQARSRGRLMRLEYQRLLGGRDALFTIQWNIRAFNAVKNWSWMKLFFKMKPLLRSAQAEEELAALRAELRGLRGALAAAEAKRQELEETHVSITQEKNDLALQLQAEQDNLADAEERCHLLIKSKVQLEGKVKELSERLEDEEEVNADLAARRRKLEDECTELKKDIDDLKLTLAKAEKEKQATENKVKNLTEEMAALDESVARLTKEKKALQEAHQQALGDLQAEEDRVSALTKAKLRLEQQVEDLECSLEQEKKLRMDTERAKRKLEGDLKLTQESVADAAQDKQQLEEKLKKKDSELSQLSLRVEDEQLLGAQMQKKIKELQARAEELEEELEAERAARARVEKQRAEAARELEELSERLEEAGGASAGQREGCRKREAELGRLRRELEEAALRHEATVAALRRKQAEGAAELGEQVDSLQRVRQKLEKEKSELRMEVDDLAANVETLTRAKASAEKLCRTYEDQLSEAKIKVEELQRQLADASTQRGRLQTESGELSRLLEEKECLISQLSRGKALAAQSLEELRRQLEEESKAKSALAHAVQALRHDCDLLREQHEEEAEAQAELQRLLSKANAEVAQWRSKYEADAIQRTEELEEAKKKLALRLQEAEEGVEAANAKCSSLEKAKLRLQTESEDVTLELERATSAAAALDKKQRHLERALEERRRQEEEMQRELEAAQRESRGLGTELFRLRHGHEEALEALETLKRENKNLQEEISDLTDQVSLSGKSIQELEKTKKALEGEKSEIQAALEEAEGALELEETKTLRIQLELSQVKAEVDRKLAEKDEECANLRRNHQRAVESLQASLDAETRARNEALRLKKKMEGDLNDLELQLGHATRQATEAQAATRLMQAQLKEEQAGRDEEQRLAAELHEQAQALERRASLLAAELEELRAALEQGERSRRLAEQELLEATERLNLLHSQNTGLLNQKKKLEADLAQLSGEVEEAAQERREAEEKAKKAITDAAMMAEELKKEQDTSAHLERMKKTLEQTVRELQARLEEAEQAALRGGKKQVQKLEAKVRELEAELDAEQKKHAEALKGVARGSHERRVKELAYQAEEDRKNLARMQDLVDKLQSKVKSYKRQFEEAEQQANTNLAKYRKAQHELDDAEERADMAETQANKLRARTRDALGPKHKE

SEQ ID NO: 4925 - protein, 909 aa, Homo sapiens
MERAMEQLNRLTRSLRRARTVELPEDNETAVYTLMPMVMADQHRSVSELLSNSKFDVNYAFGRVKRSLLHIAANCGSVECLVLLLKKGANPNYQDISGCTPLHLAARNGQKKCMSKLLEYSADVNICNNEGLTAIHWLAVNGRTELLHDLVQHVSDVDVEDAMGQTALHVACQNGHKTTVQCLLDSGADINRPNVSGATPLYFACSHGQRDTAQILLLRGAKYLPDKNGVTPLDLCVQGGYGETCEVLIQYHPRLFQTIIQMTQNEDLRENMLRQVLEHLSQQSESQYLKILTSLAEVATTNGHKLLSLSSNYDAQMKSLLRIVRMFCHVFRIGPSSPSNGIDMGYNGNKTPRSQVFKPLELLWHSLDEWLVLIATELMKNKRDSTEITSILLKQKGQDQDAASIPPFEPPGPGSYENLSTGTRESKPDALAGRQEASADCQDVISMTANRLSAVIQAFYMCCSCQMPPGMTSPRFIEFVCKHDEVLKCFVNRNPKIIFDHFHFLLECPELMSRFMHIIKAQPFKDRCEWFYEHLHSGQPDSDMVHRPVNENDILLVHRDSIFRSSCEVVSKANCAKLKQGIAVRFHGEEGMGQGVVREWFDILSNEIVNPDYALFTQSADGTTFQPNSNSYVNPDHLNYFRFAGQILGLALNHRQLVNIYFTRSFYKHILGIPVNYQDVASIDPEYAKNLQWILDNDISDLGLELTFSVETDVFGAMEEVPLKPGGGSILVTQNNKAEYVQLVTELRMTRAIQPQINAFLQGFHMFIPPSLIQLFDEYELELLLSGMPEIDVSDWIKNTEYTSGYEREDPVIQWFWEVVEDITQEERVLLLQFVTGSSRVPHGGFANIMGGSGLQNFTIAAVPYTPNLLPTSSTCINMLKLPEYPSKEILKDRLLVALHCGSYGYTMA

SEQ ID NO: 4926 - protein, 891 aa, Homo sapiens
MRKVKKLRLDKENTGSWRSFSLNSEGAERMATTGTPTADRGDAAATDDPAARFQVQKHSWDGLRSIIHGSRKYSGLIVNKAPHDFQFVQKTDESGPHSHRLYYLGMPYGSRENSLLYSEIPKKVRKEALLLLSWKQMLDHFQATPHHGVYSREEELLRERKRLGVFGITSYDFHSESGLFLFQASNSLFHCRDGGKNGFMVSPMKPLEIKTQCSGPRMDPKICPADPAFFSFINNSDLWVANIETGEERRLTFCHQGLSNVLDDPKSAGVATFVIQEEFDRFTGYWWCPTASWEGSEGLKTLRILYEEVDESEVEVIHVPSPALEERKTDSYRYAAGSKNPKIALKLAEFQTDSQGKIVSTQEKELVQPFSSLFPKVEYIARAGWTRDGKYAWAMFLDRPQQWLQLVLLPPALFIPSTENEEQRLASARAVPRNVQPYVVYEEVTNVWINVHDIFYPFPQSEGEDELCFLRANECKTGFCHLYKVTAVLKSQGYDWSEPFSPGEDEFKCPIKEEIALTSGEWEVLARHGSKIWVNEETKLVYFQGTKDTPLEHHLYVVSYEAAGEIVRLTTPGFSHSCSMSQNFDMFVSHYSSVSTPPCVHVYKLSGPDDDPLHKQPRFWASMMEAASCPPDYVPPEIFHFHTRSDVRLYGMIYKPHALQPGKKHPTVLFVYGGPQVQLVNNSFKGIKYLRLNTLASLGYAVVVIDGRGSCQRGLRFEGALKNQMGQVEIEDQVEGLQFVAEKYGFIDLSRVAIHGWSYGGFLSLMGLIHKPQVFKVAIAGAPVTVWMAYDTGYTERYMDVPENNQHGYEAGSVALHVEKLPNEPNRLLILHGFLDENVHFFHTNFLVSQLIRAGKPYQLQIYPNERHSIRCPESGEHYEVTLLHFLQEYL

SEQ ID NO: 4927 - protein, 509 aa, Homo sapiens
MAAELVEAKNMVMSFRVSDLQMLLGFVGRSKSGLKHELVTRALQLVQFDCSPELFKKIKELYETRYAKKNSEPAPQPHRPLDPLTMHSTYDRAGAVAAPLAGPNIDYPVLYGKYLNGLGRLPAKTLKPEVRLVKLPFFNMLDELLKPTELVPQNNEKLQESPCIFALTPRQVELIRNSRELQPGVKAVQVVLRICYSDTSCPQEDQYPPNIAVKVNHSYCSVPGYYPSNKPGVEPKRPCRPINLTHLMYLSSATNRITVTWGNYGKSYSVALYLVRQLTSSELLQRLKTIGVKHPELCKALVKEKLRLDPDSEIATTGVRVSLICPLVKMRLSVPCRAETCAHLQCFDAVFYLQMNEKKPTWMCPVCDKPAPYDQLIIDGLLSKILSECEDADEIEYLVDGSWCPIRAEKERSCSPQGAILVLGPSDANGLLPAPSVNGSGALGSTGGGGPVGSMENGKPGADVVDLTLDSSSSSEDEEEEEEEEEDEDEEGPRPKRRCPFQKGLVPAC

SEQ ID NO: 4928 - protein, 227 aa, Homo sapiens
MAAQRPLRVLCLAGFRQSERGFREKTGALRKALRGRAELVCLSGPHPVPDPPGPEGARSDFGSCPPEEQPRGWWFSEQEADVFSALEEPAVCRGLEESLGMVAQALNRLGPFDGLLGFSQGAALAALVCALGQAGDPRFPLPRFILLVSGFCPRGIGFKESILQRPLSLPSLHVFGDTDKVIPSQESVQLASQFPGAITLTHSGGHFIPAAAPQRQAYLKFLDQFAE

SEQ ID NO: 4929 - protein, 551 aa, Homo sapiens
MEEAELVKGRLQAITDKRKIQEEISQKRLKIEEDKLKHQHLKKKALREKWLLDGISSGKEQEEMKKQNQQDQHQIQVLEQSILRLEKEIQDLEKAELQISTKEEAILKKLKSIERTTEDIIRSVKVEREERAEESIEDIYANIPDLPKSYIPSRLRKEINEEKEDDEQNRKALYAMEIKVEKDLKTGESTVLSSIPLPSDDFKGTGIKVYDDGQKSVYAVSSNHSAAYNGTDGLAPVEVEELLRQASERNSKSPTEYHEPVYANPFYRPTTPQRETVTPGPNFQERIKIKTNGLGIGVNESIHNMGNGLSEERGNNFNHISPIPPVPHPRSVIQQAEEKLHTPQKRLMTPWEESNVMQDKDAPSPKPRLSPRETIFGKSEHQNSSPTCQEDEEDVRYNIVHSLPPDINDTEPVTMIFMGYQQAEDSEEDKKFLTGYDGIIHAELVVIDDEEEEDEGEAEKPSYHPIAPHSQVYQPAKPTPLPRKRSEASPHENTNHKSPHKNSISLKEQEESLGSPVHHSPFDAQTTGDGTEDPSLTALRMRMAKLGKKVI

SEQ ID NO: 4930 - protein, 566 aa, Homo sapiens
MFVSDFRKEFYEVVQSQRVLLFVASDVDALCACKILQALFQCDHVQYTLVPVSGWQELETAFLEHKEQFHYFILINCGANVDLLDILQPDEDTIFFVCDTHRPVNVVNVYNDTQIKLLIKQDDDLEVPAYEDIFRDEEEDEEHSGNDSDGSEPSEKRTRLEEEIVEQTMRRRQRREWEARRRDILFDYEQYEYHGTSSAMVMFELAWMLSKDLNDMLWWAIVGLTDQWVQDKITQMKYVTDVGVLQRHVSRHNHRNEDEENTLSVDCTRISFEYDLRLVLYQHWSLHDSLCNTSYTAARFKLWSVHGQKRLQEFLADMGLPLKQVKQKFQAMDISLKENLREMIEESANKFGMKDMRVQTFSIHFGFKHKFLASDVVFATMSLMESPEKDGSGTDHFIQALDSLSRSNLDKLYHGLELAKKQLRATQQTIASCLCTNLVISQGPFLYCSLMEGTPDVMLFSRPASLSLLSKHLLKSFVCSTKNRRCKLLPLVMAAPLSMEHGTVTVVGIPPETDSSDRKNFFGRAFEKAAESTSSRMLHNHFDLSVIELKAEDRSKFLDALISLLS

SEQ ID NO: 4931 - protein, 486 aa, Homo sapiens
MSVTYDDSVGVEVSSDSFWEVGNYKRTVKRIDDGHRLCSDLMNCLHERARIEKAYAQQLTEWARRWRQLVEKGPQYGTVEKAWMAFMSEAERVSELHLEVKASLMNDDFEKIKNWQKEAFHKQMMGGFKETKEAEDGFRKAQKPWAKKLKEVEAAKKAHHAACKEEKLAISREANSKADPSLNPEQLKKLQDKIEKCKQDVLKTKEKYEKSLKELDQGTPQYMENMEQVFEQCQQFEEKRLRFFREVLLEVQKHLDLSNVAGYKAIYHDLEQSIRAADAVEDLRWFRANHGPGMAMNWPQFEEWSADLNRTLSRREKKKATDGVTLTGINQTGDQSLPSKPSSTLNVPSNPAQSAQSQSSYNPFEDEDDTGSTVSEKDDTKAKNVSSYEKTQSYPTDWSDDESNNPFSSTDANGDSNPFDDDATSGTEVRVRALYDYEGQEHDELSFKAGDELTKMEDEDEQGWCKGRLDNGQVGLYPANYVEAIQ

SEQ ID NO: 4932 - protein, 753 aa, Homo sapiens
MMEERAAAAVAAAASSCRPLGSGAGPGPTGAAPVSAPAPGPGPAGKGGGGGGSPGPTAGPEPLSLPGILHFIQHEWARFEAEKARWEAERAELQAQVAFLQGERKGQENLKTDLVRRIKMLEYALKQERAKYHKLKFGTDLNQGEKKADVSEQVSNGPVESVTLENSPLVWKEGRQLLRQYLEEVGYTDTILDMRSKRVRSLLGRSLELNGAVEPSEGAPRAPPGPAGLSGGESLLVKQIEEQIKRNAAGKDGKERLGGSVLGQIPFLQNCEDEDSDEDDELDSVQHKKQRVKLPSKALVPEMEDEDEEDDSEDAINEFDFLGSGEDGEGAPDPRRCTVDGSPHELESRRVKLQGILADLRDVDGLPPKVTGPPPGTPQPRPHEDVFIMDTIGGGEVSLGDLADLTVTNDNDLSCDLSDSKDAFKKTWNPKFTLRSHYDGIRSLAFHHSQSALLTASEDGTLKLWNLQKAVTAKKNAALDVEPIHAFRAHRGPVLAVAMGSNSEYCYSGGADACIHSWKIPDLSMDPYDGYDPSVLSHVLEGHGDAVWGLAFSPTSQRLASCSADGTVRIWDPSSSSPACLCTFPTASEHGVPTSVAFTSTEPAHIVASFRSGDTVLYDMEVGSALLTLESRGSSGPTQINQVVSHPNQPLTITAHDDRGIRFLDNRTGKPVHSMVAHLDAVTCLAVDPNGAFLMSGSHDCSLRLWSLDNKTCVQEITAHRKKHEEAIHAVACHPSKALIASAGADALAKVFV

SEQ ID NO: 4933 - protein, 531 aa, Homo sapiens
MRMHTRLSLPGPPHHVGAAYPPAGGNRSENAGSWGGAGASSVEPLARRVASGEATLAMDQPAGLQVDYVFRGVEHAVRVMVSGQVLELEVEDRMTADQWRGEFDAGFIEDLTHKTGNFKQFNIFCHMLESALTQSSESVTLDLLTYTDLESLRNRKMGGRPGSLAPRSAQLNSKRYLILIYSVEFDRIHYPLPLPYQGKPDPVVLQGIIRSLKEELGRLQGLDGQNTRDTRENEIWHLREQVSRLASEKRELEAQLGRSREEALAGRAARQEAEALRGLVRGLELELRQERGLGHRVAGRRGQDCRRLAKELEEAKASERSLRARLKTLTSELALYKRGGRGSRGRGRPARPSPSPTGGRALRFDPTAFVKAKERKQREIQMKQQQRNRLGSGGSGDGPSVSWSRQTQPPAALTGRGDAPNRSRNRSSSVDSFRSRCSSASSCSDLEDFSESLSRGGHRRRGKPPSPTPWSGSNMKSPPVERSHHQKSLANSGGWVPIKEYSSEHQAADMAEIDARLKALQEYMNRLDMRS

SEQ ID NO: 4934 - protein, 483 aa, Homo sapiens
MASLLWGGDAGAAESERLNSHFSNLSQPRKNLWGIKSTAVRNIDGSINNINEDDEEDVVDLAANSLLNKLIHQSLVESSHRVEVLQKDPSSPLYSVKTFEELRLKEELLKGIYAMGFNRPSKIQEMALPMMLAHPPQNLIAQSQSGTGKTAAFVLAMLSRVNALELFPQCLCLAPTYELALQTGRVVEQMGKFCVDVQVMYAIRGNRIPRGTDITKQIIIGTPGTVLDWCFKLKLIDLTKIRVFVLDEADVMIDTQGFSDHSIRIQRALPSECQMLLFSATFEDSVWHFAERIIPDPNVIKLRKEELTLNNIRQYYVLCEHRKDKYQALCNIYGSITIGQAIIFCQTRRNAKWLTVEMIQDGHQVSLLSGELTVEQRASIIQRFRDGKEKVLITTNVCARGIDVKQVTIVVNFDLPVKQGEEPDYETYLHRIGRTGRFGKKGLAFNMIEVDELPSLMKIQDHFNSSIKQLNAEDMDEIEKIDY

SEQ ID NO: 4935 - protein, 337 aa, Homo sapiens
MADAAPQLGKRKRELDVEEAHAASTEEKEAGVGNGTCAPVRLPFSGFRLQKVLRESARDKIIFLHGKVNEASGDGDGEDAVVILEKTPFQVEQVAQLLTGSPELQLQFSNDIYSTYHLFPPRQLNDVKTTVVYPATEKHLQKYLRQDLRLIRETGDDYRNITLPHLESQSLSIQWVYNILDKKAEADRIVFENPDPSDGFVLIPDLKWNQQQLDDLYLIAICHRRGIRSLRDLTPEHLPLLRNILHQGQEAILQRYRMKGDHLRVYLHYLPSYYHLHVHFTALGFEAPGSGVERAHLLAEVIENLECDPRHYQQRTLTFALRADDPLLKLLQEAQQS

SEQ ID NO: 4936 - protein, 593 aa, Homo sapiens
MKLQAVMETLLQRQQRARQELEARQQLPPDPPAAPPGRARAAPDEDREPESARMQRAQMAALAAMRAAAAGLGHPASPGGSEDGPPGSEEEDAAREGTPGSPGRGREGPGEEHFEDMASDEDMKPKWEEEEMEEDLGEDEEEEEEDYEDEEEEEDEEGLGPPGPASLGTTALFPRKAQPPQAFRGDGVPRVLGGQERPGPGPAHPGGAAHVAPQLQPPDHGDWTYEEQFKQLYELDGDPKRKEFLDDLFSFMQKRGTPVNRIPIMAKQVLDLFMLYVLVTEKGGLVEVINKKLWREITKGLNLPTSITSAAFTLRTQYMKYLYPYECEKRGLSNPNELQAAIDSNRREGRRQSFGGSLFAYSPGGAHGMLSSPKLPVSSLGLAASTNGSSITPAPKIKKEEDSAIPITVPGRLPVSLAGHPVVAAQAAAVQAAAAQAAVAAQAAALEQLREKLESAEPPEKKMALVADEQQRLMQRALQQNFLAMAAQLPMSIRINSQASESRQDSAVNLTGTNGSNSISMSVEINGIMYTGVLFAQPPAPTPTSAPNKGGGGGGGSSSNAGGRGGNTGTSGGQAGPAGLSTPSTSTSNNSLP

SEQ ID NO: 4937 - protein, 2061 aa, Homo sapiens
MADGAPRPQLYRSVSFKLLERWSGGPGLREEDTDTPGLRRRASCRPTTAARGQPSRRVSKLASGPLAAPAQPRPLRSLSPSVRQLSRRFDAPRLDDGSAGTRDGGVLPAAAEEAAEGPARGAWPSVTEMRKLFGGPGSRRPSADSESPGTPSPDGAAWEPPARESRQPPTPPAACFPLAGLRSARPLTGPETEGRLRRPQQQQERAQRPADGLHSWHIFSQPQAGARASCSSSSIAASYPVSRSRAASSSEEEEEGPPQLPGAQSPAYHGGHSSGSDDDRDGEGGHRWGGRPGLRPGSSLLDQDCRPDSDGLNLSSMNSAGVSGSPEPPTSPRAPREEGLREWGSGSPPCVPGPQEGLRPMSDSVGGAFRVAKVSFPSYLASPAGSRGSSRYSSTETLKDDDLWSSRGSGGWGVYRSPSFGAGEGLLRSQARTRAKGPGGTSRALRDGGFEPEKSRQRKSLSNPDIASETLTLLSFLRSDLSELRVRKPGGSSGDRGSNPLDGRDSPSAGGPVGQLEPIPIPAPASPGTRPTLKDLTATLRRAKSFTCSEKPMARRLAASALKSSSSELLLTGPGAEEDPLPLIVQDQYVQEARQVFEKIQRMGAQQDDGSDAPPGSPDWAGDVTRGQRSQEELSGPESSLTDEGIGADPEPPVAAFCGLGTTGMWRPLSSSSAQTNHHGPGTEDSLGGWALVSPETPPTPGALRRRRKVPPSGSGGSELSNGEAGEAYRSLSDPIPQRHRAATSEEPTGFSVDSNLLGSLSPKTGLPATSAMDEGLTSGHSDWSVGSEESKGYQEVIQSIVQGPGTLGRVVDDRIAGKAPKKKSLSDPSRRGELAGPGFEGPGGEPIREVEPMLPPSSSEPILVEQRAEPEEPGATRSRAQSERALPEALPPPATAHRNFHLDPKLADILSPRLIRRGSKKRPARSSHQELRRDEGSQDQTGSLSRARPSSRHVRHASVPATFMPIVVPEPPTSVGPPVAVPEPIGFPTRAHPTLQAPSLEDVTKQYMLNLHSGEVPAPVPVDMPCLPLAAPPSAEAKPPEAARPADEPTPASKCCSKPQVDMRKHVAMTLLDTEQSYVESLRTLMQGYMQPLKQPENSVLCDPSLVDEIFDQIPELLEHHEQFLEQVRHCMQTWHAQQKVGALLVQSFSKDVLVNIYSAYIDNFLNAKDAVRVAKEARPAFLKFLEQSMRENKEKQALSDLMIKPVQRIPRYELLVKDLLKHTPEDHPDHPLLLEAQRNIKQVAERINKGVRSAEEAERHARVLQEIEAHIEGMEDLQAPLRRFLRQEMVIEVKAIGGKKDRSLFLFTDLIVCTTLKRKSGSLRRSSMSLYTAASVIDTASKYKMLWKLPLEDADIIKGASQATNRENIQKAISRLDEDLTTLGQMSKLSESLGFPHQSLDDALRDLSAAMHRDLSEKQALCYALSFPPTKLELCATRPEGTDSYIFEFPHPDARLGFEQAFDEAKRKLASSKSCLDPEFLKAIPIMKTRSGMQFSCAAPTLNSCPEPSPEVWVCNSDGYVGQVCLLSLRAEPDVEACIAVCSARILCIGAVPGLQPRCHREPPPSLRSPPETAPEPAGPELDVEAAADEEAATLAEPGPQPCLHISIAGSGLEMTPGLGEGDPRPELVPFDSDSDDESSPSPSGTLQSQASRSTISSSFGNEETPSSKEATAETTSSEEEQEPGFLPLSGSFGPGGPCGTSPMDGRALRRSSHGSFTRGSLEDLLSVDPEAYQSSVWLGTEDGCVHVYQSSDSIRDRRNSMKLQHAASVTCILYLNNQVFVSLANGELVVYQREAGHFWDPQNFKSVTLGTQGSPITKMVSVGGRLWCGCQNRVLVLSPDTLQLEHMFYVGQDSSRCVACMVDSSLGVWVTLKGSAHVCLYHPDTFEQLAEVDVTPPVHRMLAGSDAIIRQHKAACLRITALLVCEELLWVGTSAGVVLTMPTSPGTVSCPRAPLSPTGLGQGHTGHVRFLAAVQLPDGFNLLCPTPPPPPDTGPEKLPSLEHRDSPWHRGPAPARPKMLVISGGDGYEDFRLSSGGGSSSETVGRDDSTNHLLLWRV

SEQ ID NO: 4938 - protein, 832 aa, Homo sapiens
MSEAGGAGPGGCGAGAGAGAGPGALPPQPAALPPAPPQGSPCAAAAGGSGACGPATAVAAAGTAEGPGGGGSARIAVKKAQLRSAPRAKKLEKLGVYSACKAEESCKCNGWKNPNPSPTPPRADLQQIIVSLTESCRSCSHALAAHVSHLENVSEEEMNRLLGIVLDVEYLFTCVHKEEDADTKQVYFYLFKLLRKSILQRGKPVVEGSLEKKPPFEKPSIEQGVNNFVQYKFSHLPAKERQTIVELAKMFLNRINYWHLEAPSQRRLRSPNDDISGYKENYTRWLCYCNVPQFCDSLPRYETTQVFGRTLLRSVFTVMRRQLLEQARQEKDKLPLEKRTLILTHFPKFLSMLEEEVYSQNSPIWDQDFLSASSRTSQLGIQTVINPPPVAGTISYNSTSSSLEQPNAGSSSPACKASSGLEANPGEKRKMTDSHVLEEAKKPRVMGDIPMELINEVMSTITDPAAMLGPETNFLSAHSARDEAARLEERRGVIEFHVVGNSLNQKPNKKILMWLVGLQNVFSHQLPRMPKEYITRLVFDPKHKTLALIKDGRVIGGICFRMFPSQGFTEIVFCAVTSNEQVKGYGTHLMNHLKEYHIKHDILNFLTYADEYAIGYFKKQGFSKEIKIPKTKYVGYIKDYEGATLMGCELNPRIPYTEFSVIIKKQKEIIKKLIERKQAQIRKVYPGLSCFKDGVRQIPIESIPGIRETGWKPSGKEKSKEPRDPDQLYSTLKSILQQVKSHQSAWPFMEPVKRTEAPGYYEVIRFPMDLKTMSERLKNRYYVSKKLFMADLQRVFTNCKEYNPPESEYYKCANILEKFFFSKIKEAGLIDK

SEQ ID NO: 4939 - protein, 1649 aa, Homo sapiens
MAGGRGAPGRGRDEPPESYPQRQDHELQALEAIYGADFQDLRPDACGPVKEPPEINLVLYPQGLTGEEVYVKVDLRVKCPPTYPDVVPEIELKNAKGLSNESVNLLKSRLEELAKKHCGEVMIFELAYHVQSFLSEHNKPPPKSFHEEMLERRAQEEQQRLLEAKRKEEQEQREILHEIQRRKEEIKEEKKRKEMAKQERLEIASLSNQDHTSKKDPGGHRTAAILHGGSPDFVGNGKHRANSSGRSRRERQYSVCNSEDSPGSCEILYFNMGSPDQLMVHKGKCIGSDEQLGKLVYNALETATGGFVLLYEWVLQWQKKMGPFLTSQEKEKIDKCKKQIQGTETEFNSLVKLSHPNVVRYLAMNLKEQDDSIVVDILVEHISGVSLAAHLSHSGPIPVHQLRRYTAQLLSGLDYLHSNSVVHKVLSASNVLVDAEGTVKITDYSISKRLADICKEDVFEQTRVRFSDNALPYKTGKKGDVWRLGLLLLSLSQGQECGEYPVTIPSDLPADFQDFLKKCVCLDDKERWSPQQLLKHSFINPQPKMPLVEQSPEDSEGQDYVETVIPSNRLPSAAFFSETQRQFSRYFIEFEELQLLGKGAFGAVIKVQNKLDGCCYAVKRIPINPASRQFRRIKGEVTLLSRLHHENIVRYYNAWIERHERPAGPGTPPPDSGPLAKDDRAARGQPASDTDGLDSVEAAAPPPILSSSVEWSTSGERSASARFPATGPGSSDDEDDDEDEHGGVFSQSFLPASDSESDIIFDNEDENSKSQNQDEDCNEKNGCHESEPSVTTEAVHYLYIQMEYCEKSTLRDTIDQGLYRDTVRLWRLFREILDGLAYIHEKGMIHRDLKPVNIFLDSDDHVKIGDFGLATDHLAFSADSKQDDQTGDLIKSDPSGHLTGMVGTALYVSPEVQGSTKSAYNQKVDLFSLGIIFFEMSYHPMVTASERIFVLNQLRDPTSPKFPEDFDDGEHAKQKSVISWLLNHDPAKRPTATELLKSELLPPPQMEESELHEVLHHTLTNVDGKAYRTMMAQIFSQRISPAIDYTYDSDILKGNFSIRTAKMQQHVCETIIRIFKRHGAVQLCTPLLLPRNRQIYEHNEAALFMDHSGMLVMLPFDLRIPFARYVARNNILNLKRYCIERVFRPRKLDRFHPKELLECAFDIVTSTTNSFLPTAEIIYTIYEIIQEFPALQERNYSIYLNHTMLLKAILLHCGIPEDKLSQVYIILYDAVTEKLTRREVEAKFCNLSLSSNSLCRLYKFIEQKGDLQDLMPTINSLIKQKTGIAQLVKYGLKDLEEVVGLLKKLGIKLQVLINLGLVYKVQQHNGIIFQFVAFIKRRQRAVPEILAAGGRYDLLIPQFRGPQALGPVPTAIGVSIAIDKISAAVLNMEESVTISSCDLLVVSVGQMSMSRAINLTQKLWTAGITAEIMYDWSQSQEELQEYCRHHEITYVALVSDKEGSHVKVKSFEKERQTEKRVLETELVDHVLQKLRTKVTDERNGREASDNLAVQNLKGSFSNASGLFEIHGATVVPIVSVLAPEKLSASTRRRYETQVQTRLQTSLANLHQKSSEIEILAVDLPKETILQFLSLEWDADEQAFNTTVKQLLSRLPKQRYLKLVCDEIYNIKVEKKVSVLFLYSYRDDYYRILF

SEQ ID NO: 4940 - protein, 1889 aa, Homo sapiens
MPVGRIECPSSPSFPRDISHECRVCGVTEVGLSAYAKHISGQLHKDNVDAQEREDDGKGEEEEEDYFDKELIQLIKQRKEQSRQDEPSNSNQEINSDDRRPQWRREDRIPYQDRESYSQPAWHHRGPPQRDWKWEKDGFNNTRKNSFPHSLRNGGGPRGRSGWHKGVAGGSSTWFHNHSNSGGGWLSNSGAVDWNHNGTGRNSSWLSEGTGGFSSWHMNNSNGNWKSSVRSTNNWNYSGPGDKFQPGRNRNSNCQMEDMTMLWNKKSNKSNKYSHDRYNWQRQENDKLGTVATYRGPSEGFTSDKFPSEGLLDFNFEQLESQTTKQADTATSKVSGKNGSAAREKPRRWTPYPSQKTLDLQSGLKDITGNKSEMIEKPLFDFSLITTGIQEPQTDETRNSPTQKTQKEIHTGSLNHKASSDSAASFEVVRQCPTAEKPEQEHTPNKMPSLKSPLLPCPATKSLSQKQDPKNISKNTKTNFFSPGEHSNPSNKPTVEDNHGPYISKLRSSCPHVLKGNKSTFGSQKQSGDNLNDTLRKAKEVLQCHESLQNPLLSTSKSTRNYAKASRNVEESEKGSLKIEFQVHALEDESDGETSDTEKHGTKIGTLGSATTELLSGSTRTADEKEEDDRILKTSRELSTSPCNPIVRQKESELQMTSAASPHPGLLLDLKTSLEDAQVDDSIKSHVSYETEGFESASLDAELQKSDISQPSGPLLPELSKLGFPASLQRDLTRHISLKSKTGVHLPEPNLNSARRIRNISGHRKSETEKESGLKPTLRQILNASRRNVNWEQVIQQVTKKKQELGKGLPRFGIEMVPLVQNEQEALDLDGEPDLSSLEGFQWEGVSISSSPGLARKRSLSESSVIMDRAPSVYSFFSEEGTGKENEPQQMVSPSNSLRAGQSQKATMHLKQEVTPRAASLRTGERAENVATQRRHSAQLSSDHIIPLMHLAKDLNSQERSIPPSENQNSQESNGEGNCLSSSASSALAISSLADAATDSSCTSGAEQNDGQSIARGSKRRATGDGSSPELPSLERKNKRRKIKGKKERSQVDQLLNISLREEELSKSLQCMDNNLLQARAALQTAYVEVQRLLMLKQQITMEMSALRTHRIQILQGLQETYEPSEHPDQVPCSLTRERRNSRSQTSIDAALLPTPFFPLFLEPPSSHVSPSPTGASLQITTSPTFQTHGSVPAPDSSVQIKQEPMSPEQDENVNAVPPSSACNVSKELLEANREISDSCPVYPVITARLSLPESTESFHEPSQELKFSVEQRNTRNRENSPSSQSAGLSSINKEGEEPTKGNSGSEACTSSFLRLSFASETPLEKEPHSPADQPEQQAESTLTSAETRGSKKKKKLRKKKSLRAAHVPENSDTEQDVLTVKPVRKVKAGKLIKGGKVTTSTWEDSRTGREQESVRDEPDSDSSLEVLEIPNPQLEVVAIDSSESGEEKPDSPSKKDIWNSTEQNPLETSRSGCDEVSSTSEIGTRYKDGIPVSVAETQTVISSIKGSKNSSEISSEPGDDDEPTEGSFEGHQAAVNAIQIFGNLLYTCSADKTVRVYNLVSRKCIGVFEGHTSKVNCLLVTQTSGKNAALYTGSSDHTIRCYNVKSRECVEQLQLEDRVLCLHSRWRILYAGLANGTVVTFNIKNNKRLEIFECHGPRAVSCLATAQEGAARGSLLVVGSYDCTISVRDARNGLLLRTLEGHSKTILCMKVVNDLVFSGSSDQSVHAHNIHTGELVRIYKGHNHAVTVVNILGKVMVTACLDKFVRVYELQSHDRLQVYGGHKDMIMCMTIHKSMIYTGCYDGSIQAVRLNLMQNYRCWWHGCSLIFGVVDHLKQHLLTDHTNPNFQTLKCRWKNCDAFFTAARGSGSKQDAAGHIERHAEDDSKIDS

SEQ ID NO: 4941 - protein, 195 aa, Homo sapiens
MAEPVQEELSVLAAIFCRPHEWEVLSRSETDGTVFRIHTKAEGFMDVDIPLELVFHLPVNYPSCLPGISINSEQLTRAQCVTVKENLLEQAESLLSEPMVHELVLWIQQNLRHILSQPETGSGSEKCTFSTSTTMDDGLWITLLHLDHMRAKTKYVKIVEKWASDLRLTGRLMFMGKIILILLQGDRNNLKVPKS

SEQ ID NO: 4942 - protein, 372 aa, Homo sapiens
MSRRRFDCRSISGLLTTTPQIPIKMENFNNFYILTSKELGRGKFAVVRQCISKSTGQEYAAKFLKKRRRGQDCRAEILHEIAVLELAKSCPRVINLHEVYENTSEIILILEYAAGGEIFSLCLPELAEMVSENDVIRLIKQILEGVYYLHQNNIVHLDLKPQNILLSSIYPLGDIKIVDFGMSRKIGHACELREIMGTPEYLAPEILNYDPITTATDMWNIGIIAYMLLTHTSPFVGEDNQETYLNISQVNVDYSEETFSSVSQLATDFIQSLLVKNPEKRPTAEICLSHSWLQQWDFENLFHPEETSSSSQTQDHSVRSSEDKTSKSSCNGTCGDREDKENIPEDSSMVSKRFRFDDSLPNPHELVSDLLC

SEQ ID NO: 4943 - protein, 309 aa, Homo sapiens
MEAARTAVLRVKRKRSAEPAEALVLACKRLRSDAVESAAQKTSEGLERAAENNVFHLVATVCSQEEPVQPLLREVLRPSRDSQQRVRRNLRASAREVRQEGRYRVLSSRRSLGTTSSGQESEYTPGNPEAAGNSGFQLLDLVHEEGEPEAASAGSCKTSDPDVILCNSVELIRERLTVSEDGPGVRRQEEQKHDDYVYDIYYLETATPGWIENILSVQPYSQEWELVNDDQEPEDIYDDEDDENSENNWRNEYPEEESSDGDEDSRGSADYNSLSEEERGSSRQRMWSKYPLDVQKEFGYDSPHDLDSD

SEQ ID NO: 4944 - protein, 355 aa, Homo sapiens
MADNSSDECEEENNKVLREGMPQAPGHRGKDMDPVPPAPASLKCHQTPSHVLERVGWYRESQKHRKEKKKTSQLTPQRGFSENEDDDDDDDDSSETDSDSDDDDEEHGAPLEGAYDPADYEHLPVSAEIKELFQYISRYTPQLIDLDHKLKPFIPDFIPAVGDIDAFLKVPRPDGKPDNLGLLVLDEPSTKQSDPTVLSLWLTENSKQHNITQHMKVKSLEDAEKNPKAIDTWIESISELHRSKPPATVHYTRPMPDIDTLMQEWSPEFEELLGKVSLPTAEIDCSLAEYIDMICAILDIPVYKSRIQSLHLLFSLYSEFKNSQHFKALAEGKKAFTPSSNSTSQAGDMETLTFS

SEQ ID NO: 4945 - protein, 304 aa, Homo sapiens
MADNSSDECEEENNKEKKKTSQLTPQRGFSENEDDDDDDDDSSETDSDSDDDDEEHGAPLEGAYDPADYEHLPVSAEIKELFQYISRYTPQLIDLDHKLKPFIPDFIPAVGDIDAFLKVPRPDGKPDNLGLLVLDEPSTKQSDPTVLSLWLTENSKQHNITQHMKVKSLEDAEKNPKAIDTWIESISELHRSKPPATVHYTRPMPDIDTLMQEWSPEFEELLGKVSLPTAEIDCSLAEYIDMICAILDIPVYKSRIQSLHLLFSLYSEFKNSQHFKALAEGKKAFTPSSNSTSQAGDMETLTFS

SEQ ID NO: 4946 - protein, 444 aa, Homo sapiens
MREIVHLQAGQCGNQIGAKFWEVISDEHGIDPTGTYHGDSDLQLERINVYYNEATGGNYVPRAVLVDLEPGTMDSVRSGPFGQIFRPDNFVFGQSGAGNNWAKGHYTEGAELVDAVLDVVRKEAESCDCLQGFQLTHSLGGGTGSGMGTLLISKIREEFPDRIMNTFSVVPSPKVSDTVVEPYNATLSVHQLVENTDETYCIDNEALYDICFRTLKLTTPTYGDLNHLVSATMSGVTTCLRFPGQLNADLRKLAVNMVPFPRLHFFMPGFAPLTSRGSQQYRALTVPELTQQMFDAKNMMAACDPRHGRYLTVAAVFRGRMSMKEVDEQMLSVQSKNSSYFVEWIPNNVKTAVCDIPPRGLKMAATFIGNSTAIQELFKRISEQFTAMFRRKAFLHWYTGEGMDEMEFTEAESNMNDLVSEYQQYQDATAEEGEFEEEAEEEVA

SEQ ID NO: 4947 - protein, 465 aa, Homo sapiens
MEPSSLELPADTVQRIAAELKCHPTDERVALHLDEEDKLRHFRECFYIPKIQDLPPVDLSLVNKDENAIYFLGNSLGLQPKMVKTYLEEELDKWAKIAAYGHEVGKRPWITGDESIVGLMKDIVGANEKEIALMNALTVNLHLLMLSFFKPTPKRYKILLEAKAFPSDHYAIESQLQLHGLNIEESMRMIKPREGEETLRIEDILEVIEKEGDSIAVILFSGVHFYTGQHFNIPAITKAGQAKGCYVGFDLAHAVGNVELYLHDWGVDFACWCSYKYLNAGAGGIAGAFIHEKHAHTIKPALVGWFGHELSTRFKMDNKLQLIPGVCGFRISNPPILLVCSLHASLEIFKQATMKALRKKSVLLTGYLEYLIKHNYGKDKAATKKPVVNIITPSHVEERGCQLTITFSVPNKDVFQELEKRGVVCDKRNPNGIRVAPVPLYNSFHDVYKFTNLLTSILDSAETKN

SEQ ID NO: 4948 - protein, 1585 aa, Homo sapiens
MNSQPQTRSPFFQRPQIQPPRATIPNSSPSIRPGAQTPTAVYQANQHIMMVNHLPMPYPVPQGPQYCIPQYRHSGPPYVGPPQQYPVQPPGPGPFYPGPGPGDFPNAYGTPFYPSQPVYQSAPIIVPTQQQPPPAKREKKTIRIRDPNQGGKDITEEIMSGGGSRNPTPPIGRPTSTPTPPQQLPSQVPEHSPVVYGTVESAHLAASTPVTAASDQKQEEKPKPDPVLKSPSPVLRLVLSGEKKEQEGQTSETTAIVSIAELPLPPSPTTVSSVARSTIAAPTSSALSSQPIFTTAIDDRCELSSPREDTIPIPSLTSCTETSDPLPTNENDDDICKKPCSVAPNDIPLVSSTNLINEINGVSEKLSATESIVEIVKQEVLPLTLELEILENPPEEMKLECIPAPITPSTVPSFPPTPPTPPASPPHTPVIVPAAATTVSSPSAAITVQRVLEEDESIRTCLSEDAKEIQNKIEVEADGQTEEILDSQNLNSRRSPVPAQIAITVPKTWKKPKDRTRTTEEMLEAELELKAEEELSIDKVLESEQDKMSQGFHPERDPSDLKKVKAVEENGEEAEPVRNGAESVSEGEGIDANSGSTDSSGDGVTFPFKPESWKPTDTEGKKQYDREFLLDFQFMPACIQKPEGLPPISDVVLDKINQPKLPMRTLDPRILPRGPDFTPAFADFGRQTPGGRGVPLLNVGSRRSQPGQRREPRKIITVSVKEDVHLKKAENAWKPSQKRDSQADDPENIKTQELFRKVRSILNKLTPQMFNQLMKQVSGLTVDTEERLKGVIDLVFEKAIDEPSFSVAYANMCRCLVTLKVPMADKPGNTVNFRKLLLNRCQKEFEKDKADDDVFEKKQKELEAASAPEERTRLHDELEEAKDKARRRSIGNIKFIGELFKLKMLTEAIMHDCVVKLLKNHDEESLECLCRLLTTIGKDLDFEKAKPRMDQYFNQMEKIVKERKTSSRIRFMLQDVIDLRLCNWVSRRADQGPKTIEQIHKEAKIEEQEEQRKVQQLMTKEKRRPGVQRVDEGGWNTVQGAKNSRVLDPSKFLKITKPTIDEKIQLVPKAQLGSWGKGSSGGAKASETDALRSSASSLNRFSALQPPAPSGSTPSTPVEFDSRRTLTSRGSMGREKNDKPLPSATARPNTFMRGGSSKDLLDNQSQEEQRREMLETVKQLTGGVDVERNSTEAERNKTRESAKPEISAMSAHDKAALSEEELERKSKSIIDEFLHINDFKEAMQCVEELNAQGLLHVFVRVGVESTLERSQITRDHMGQLLYQLVQSEKLSKQDFFKGFSETLELADDMAIDIPHIWLYLAELVTPMLKEGGISMRELTIEFSKPLLPVGRAGVLLSEILHLLCKQMSHKKVGALWREADLSWKDFLPEGEDVHNFLLEQKLDFIESDSPCSSEALSKKELSAEELYKRLEKLIIEDKANDEQIFDWVEANLDEIQMSSPTFLRALMTAVCKAAIIADSSTFRVDTAVIKQRVPILLKYLDSDTEKELQALYALQASIVKLDQPANLLRMFFDCLYDEEVISEDAFYKWESSKDPAEQNGKGVALKSVTAFFTWLREAEEESEDN

SEQ ID NO: 4949 - protein, 125 aa, Homo sapiens [sequence omitted]

SEQ ID NO: 4950 - protein, 529 aa, Homo sapiens
MLVLFETSVGYAIFKVLNEKKLQEVDSLWKEFETPEKANKIVKLKHFEKFQDTAEALAAFTALMEGKINKQLKKVLKKIVKEAHEPLAVADAKLGGVIKEKLNLSCIHSPVVNELMRGIRSQMDGLIPGVEPREMAAMCLGLAHSLSRYRLKFSADKVDTMIVQAISLLDDLDKELNNYIMRCREWYGWHFPELGKIISDNLTYCKCLQKVGDRKNYASAKLSELLPEEVEAEVKAAAEISMGTEVSEEDICNILHLCTQVIEISEYRTQLYEYLQNRMMAIAPNVTVMVGELVGARLIAHAGSLLNLAKHAASTVQILGAEKALFRALKSRRDTPKYGLIYHASLVGQTSPKHKGKISRMLAAKTVLAIRYDAFGEDSSSAMGVENRAKLEARLRTLEDRGIRKISGTGKALAKTEKYEHKSEVKTYDPSGDSTLPTCSKKRKIEQVDKEDEITEKKAKKAKIKVKVEEEEEEKVAEEEETSVKKKKKRGKKKHIKEEPLSEEEPCTSTAIASPEKKKKKKKKRENED

SEQ ID NO: 4951 - protein, 245 aa, Homo sapiens
MNGRADFREPNAEVPRPIPHIGPDYIPTEEERRVFAECNDESFWFRSVPLAATSMLITQGLISKGILSSHPKYGSIPKLILACIMGYFAGKLSYVKTCQEKFKKLENSPLGEALRSGQARRSSPPGHYYQKSKYDSSVSGQSSFVTSPAADNIEMLPHYEPIPFSSSMNESAPTGITDHIVQGPDPNLEESPKRKNITYEELRNKNRESYEVSLTQKTDPSVRPMHERVPKKEVKVNKYGDTWDE

SEQ ID NO: 4952 - protein, 581 aa, Homo sapiens [sequence omitted]

SEQ ID NO: 4953 - protein, 1050 aa, Homo sapiens
MLCWGYWSLGQPGISTNLQGIVAEPQVCGFISDRSVKEVACGGNHSVFLLEDGEVYTCGLNTKGQLGHEREGNKPEQIGALADQHIIHVACGESHSLALSDRGQLFSWGAGSDGQLGLMTTEDSVAVPRLIQKLNQQTILQVSCGNWHCLALAADGQFFTWGKNSHGQLGLGKEFPSQASPQRVRSLEGIPLAQVAAGGAHSFALSLSGAVFGWGMNNAGQLGLSDEKDRESPCHVKLLRTQKVVYISCGEEHTAVLTKSGGVFTFGAGSCGQLGHDSMNDEVNPRRVLELMGSEVTQIACGRQHTLAFVPSSGLIYAFGCGARGQLGTGHTCNVKCPSPVKGYWAAHSGQLSARADRFKYHIVKQIFSGGDQTFVLCSKYENYSPAVDFRTMNQAHYTSLINDETIAVWRQKLSEHNNANTINGVVQILSSAACWNGSFLEKKIDEHFKTSPKIPGIDLNSTRVLFEKLMNSQHSMILEQILNSFESCLIPQLSSSPPDVEAMRIYLILPEFPLLQDSKYYITLTIPLAMAILRLDTNPSKVLDNWWSQVCPKYFMKLVNLYKGAVLYLLRGRKTFLIPVLFNNYITAALKLLEKLYKVNLKVKHVEYDTFYIPEISNLVDIQEDYLMWFLHQAGMKARPSIIQDTVTLCSYPFIFDAQAKTKMLQTDAELQMQVAVNGANLQNVFMLLTLEPLLARSPFLVLHVRRNNLVGDALRELSIHSDIDLKKPLKVIFDGEEAVDAGGVTKEFFLLLLKELLNPIYGMFTYYQDSNLLWFSDTCFVEHNWFHLIGITCGLAIYNSTVVDLHFPLALYKKLLNVKPGLEDLKELSPTEGRSLQELLDYPGEDVEETFCLNFTICRESYGVIEQKKLIPGGDNVTVCKDNRQEFVDAYVNYVFQISVHEWYTAFSSGFLKVCGGKVLELFQPSELRAMMVGNSNYNWEELEETAIYKGDYSATHPTVKLFWETFHEFPLEKKKKFLLFLTGSDRIPIYGMASLQIVIQSTASGEEYLPVAHTCYNLLDLPKYSSKEILSARLTQALDNYEGFSLA

SEQ ID NO: 4954 - protein, 1022 aa, Homo sapiens
MYFCWGADSRELQRRRTAGSPGAELLQAASGERHSLLLLTNHRVLSCGDNSRGQLGRRGAQRGELPEPIQALETLIVDLVSCGKEHSLAVCHKGRVFAWGAGSEGQLGIGEFKEISFTPKKIMTLNDIKIIQVSCGHYHSLALSKDSQVFSWGKNSHGQLGLGKEFPSQASPQRVRSLEGIPLAQVAAGGAHSFALSLCGTSFGWGSNSAGQLALSGRNVPVQSNKPLSVGALKNLGVVYISCGDAHTAVLTQDGKVFTFGDNRSGQLGYSPTPEKRGPQLVERIDGLVSQIDCGSYHTLAYVHTTGQVVSFGHGPSDTSKPTHPEALTENFDISCLISAEDFVDVQVKHIFAGTYANFVTTHQDTSSTRAPGKTLPEISRISQSMAEKWIAVKRRSTEHEMAKSEIRMIFSSPACLTASFLKKRGTGETTSIDVDLEMARDTFKKLTKKEWISSMITTCLEDDLLRALPCHSPHQEALSVFLLLPECPVMHDSKNWKNLVVPFAKAVCEMSKQSLQVLKKCWAFLQESSLNPLIQMLKAAIISQLLHQTKTEQDHCNVKALLGMMKELHKVNKANCRLPENTFNINELSNLLNFYIDRGRQLFRDNHLIPAETPSPVIFSDFPFIFNSLSKIKLLQADSHIKMQMSEKKAYMLMHETILQKKDEFPPSPRFILRVRRSRLVKDALRQLSQAEATDFCKVLVVEFINEICPESGGVSSEFFHCMFEEMTKPEYGMFMYPEMGSCMWFPAKPKPEKKRYFLFGMLCGLSLFNLNVANLPFPLALYKKLLDQKPSLEDLKELSPRLGKSLQEVLDDAADDIGDALCIRFSIHWDQNDVDLIPNGISIPVDQTNKRDYVSKYIDYIFNVSVKAVYEEFQRGFYRVCEKEILRHFYPEELMTAIIGNTDYDWKQFEQNSKYEQGYQKSHPTIQLFWKAFHKLTLDEKKKFLFFLTGRDRLHARGIQKMEIVFRCPETFSERDHPTSITCHNILSLPKYSTMERMEEALQVAINNNRGFVSPMLTQS

SEQ ID NO: 4955 - protein, 406 aa, Homo sapiens
MAAAVRQDLAQLMNSSGSHKDLAGKYRQILEKAIQLSGAEQLEALKAFVEAMVNENVSLVISRQLLTDFCTHLPNLPDSTAKEIYHFTLEKIQPRVISFEEQVASIRQHLASIYEKEEDWRNAAQVLVGIPLETGQKQYNVDYKLETYLKIARLYLEDDDPVQAEAYINRASLLQNESTNEQLQIHYKVCYARVLDYRRKFIEAAQRYNELSYKTIVHESERLEALKHALHCTILASAGQQRSRMLATLFKDERCQQLAAYGILEKMYLDRIIRGNQLQEFAAMLMPHQKATTADGSSILDRAVIEHNLLSASKLYNNITFEELGALLEIPAAKAEKIASQMITEGRMNGFIDQIDGIVHFETREALPTWDKQIQSLCFQVNNLLEKISQTAPEWTAQAMEAQMAQ

SEQ ID NO: 4956 - protein, 525 aa, Homo sapiens
MAAGLLGSEDPPWSWNLTCRALRTCQVRNIRVLQLLLKPWCISRAVYQMTEGRRCQVHLLDDRKLELLVQPKLLAKELLDLVASHFNLKEKEYFGIAFTDETGHLNWLQLDRRVLEHDFPKKSGPVVLYFCVRFYIESISYLKDNATIELFFLNAKSCIYKELIDVDSEVVFELASYILQEAKGDFSSNEVVRSDLKKLPALPTQALKEHPSLAYCEDRVIEHYKKLNGQTRGQAIVNYMSIVESLPTYGVHYYAVKDKQGIPWWLGLSYKGIFQYDYHDKVKPRKIFQWRQLENLYFREKKFSVEVHDPRRASVTRRTFGHSGIAVHTWYACPALIKSIWAMAISQHQFYLDRKQSKSKIHAARSLSEIAIDLTETGTLKTSKLANMGSKGKIISGSSGSLLSSGSQESDSSQSAKKDMLAALKSRQEALEETLRQRLEELKKLCLREAELTGKLPVEYPLDPGEEPPIVRRRIGTAFKLDEQKILPKGEEAELERLEREFAIQSQITEAARRLASDPNVSKKL

SEQ ID NO: 4957 - protein, 533 aa, Homo sapiens
MKQEGSARRRGADKAKPPPGGGEQEPPPPPAPQDVEMKEEAATGGGSTGEADGKTAAAAAEHSQRELDTVTLEDIKEHVKQLEKAVSGKEPRFVLRALRMLPSTSRRLNHYVLYKAVQGFFTSNNATRDFLLPFLEEPMDTEADLQFRAAGKAASTPLLPEVEAYLQLLVVIFMMNSKRYKEAQKISDDLMQKISTQNRRALDLVAAKCYYYHARVYEFLDKLDVVRSFLHARLRTATLRHDADGQATLLNLLLRNYLHYSLYDQAEKLVSKSVFPEQANNNEWARYLYYTGRIKAIQLEYSEARRTMTNALRKAPQHTAVGFKQTVHKLLIVVELLLGEIPDRLQFRQPSLKRSLMPYFLLTQAVRTGNLAKFNQVLDQFGEKFQADGTYTLIIRLRHNVIKTGVRMISLSYSRISLADIAQKLQLDSPEDAEFIVAKAIRDGVIEASINHEKGYVQSKEMIDIYSTREPQLAFHQRISFCLDIHNMSVKAMRFPPKSYNKDLESAEERREREQQDLEFAKEMAEDDDDSFP

SEQ ID NO: 4958 - protein, 436 aa, Homo sapiens
MRRDVNGVTKSRFEMFSNSDEAVINKKLPKELLLRIFSFLDVVTLCRCAQVSRAWNVLALDGSNWQRIDLFDFQRDIEGRVVENISKRCGGFLRKLSLRGCLGVGDNALRTFAQNCRNIEVLNLNGCTKTTDATCTSLSKFCSKLRHLDLASCTSITNMSLKALSEGCPLLEQLNISWCDQVTKDGIQALVRGCGGLKALFLKGCTQLEDEALKYIGAHCPELVTLNLQTCLQITDEGLITICRGCHKLQSLCASGCSNITDAILNALGQNCPRLRILEVARCSQLTDVGFTTLARNCHELEKMDLEECVQITDSTLIQLSIHCPRLQVLSLSHCELITDDGIRHLGNGACAHDQLEVIELDNCPLITDASLEHLKSCHSLERIELYDCQQITRAGIKRLRTHLPNIKVHAYFAPVTPPPSVGGSRQRFCRCCIIL

SEQ ID NO: 4959 - protein, 388 aa, Homo sapiens
MRCLYGRVGGARRKMAASAAAAELQASGGPRHPVCLLVLGMAGSGKTTFVQRLTGHLHAQGTPPYVINLDPAVHEVPFPANIDIRDTVKYKEVMKQYGLGPNGGIVTSLNLFATRFDQVMKFIEKAQNMSKYVLIDTPGQIEVFTWSASGTIITEALASSFPTVVIYVMDTSRSTNPVTFMSNMLYACSILYKTKLPFIVVMNKTDIIDHSFAVEWMQDFEAFQDALNQETTYVSNLTRSMSLVLDEFYSSLRVVGVSAVLGTGLDELFVQVTSAAEEYEREYRPEYERLKKSLANAESQQQREQLERLRKDMGSVALDAGTAKDSLSPVLHPSDLILTRGTLDEEDEEADSDTDDIDHRVTEESHEEPAFQNFMQESMAQYWKRNNK

SEQ ID NO: 4960 - protein, 555 aa, Homo sapiens
MRLIGMPKEKYDPPDPRRIYTIMSAEEVANGKKSHWAELEISGRVRSLSTSLWSLTHLTALHLNDNYLSRIPPDIAKLHNLVYLDLSSNKLRSLPAELGNMVSLRELLLNNNLLRVLPYELGRLFQLQTLGLKGNPLSQDILNLYQDPDGTRKLLNFMLDNLAVHPEQLPPRPWITLKERDQILPSASFTVMCYNVLCDKYATRQLYGYCPSWALNWEYRKKGIMEEIVNCDADIISLQEVETEQYFTLFLPALKERGYDGFFSPKSRAKIMSEQERKHVDGCAIFFKTEKFTLVQKHTVEFNQVAMANSDGSEAMLNRVMTKDNIGVAVVLEVHKELFGAGMKPIHAADKQLLIVANAHMHWDPEYSDVKLIQTMMFVSEVKNILEKASSRPGSPTADPNSIPLVLCADLNSLPDSGVVEYLSNGGVADNHKDFKELRYNECLMNFSCNGKNGSSEGRITHGFQLKSAYENNLMPYTNYTFDFKGVIDYIFYSKTHMNVLGVLGPLDPQWLVENNITGCPHPHIPSDHFSLLTQLELHPPLLPLVNGVHLPNRR

SEQ ID NO: 4961 - protein, 890 aa, Homo sapiens
SSDSEIIGYALDTLYNIISNEEEEEVEENSTRQSEDLGSQFTEIFIKQQENVTLLLSLLEEFDFHVRWPGVKLLTSLLKQLGPQVQQIILVSPMGVSRLMDLLADSREVIRNDGVLLLQALTRSNGAIQKIVAFENAFERLLDIISEEGNSDGGIVVEDCLILLQNLLKNNNSNQNFFKEGSYIQRMKPWFEVGDENSGWSAQKVTNLHLMLQLVRVLVSPTNPPGATSSCQKAMFQCGLLQQLCTILMATGVPADILTETINTVSEVIRGCQVNQDYFASVNAPSNPPRPAIVVLLMSMVNERQPFVLRCAVLYCFQCFLYKNQKGQGEIVSTLLPSTIDATGNSVSAGQLLCGGLFSTDSLSNWCAAVALAHALQENATQKEQLLRVQLATSIGNPPVSLLQQCTNILSQGSKIQTRVGLLMLLCTWLSNCPIAVTHFLHNSANVPFLTGQIAENLGEEEQLVQGLCALLLGISIYFNDNSLESYMKEKLKQLIEKRIGKENFIEKLGFISKHELYSRASQKPQPNFPSPEYMIFDHEFTKLVKELEGVITKAIYKSSEEDKKEEEVKKTLEQHDNIVTHYKNMIREQDLQLEELRQQVSTLKCQNEQLQTAVTQQVSQIQQHKDQYNLLKIQLGKDNQHQGSYSEGAQMNGIQPEEIGRLREEIEELKRNQELLQSQLTEKDSMIENMKSSQTSGTNEQSSAIVSARDSEQVAELKQELATLKSQLNSQSVEITKLQTEKQELLQKTEAFAKSVEVQGETETIIATKTTDVEGRLSALLQETKELKNEIKALSEERTAIKEQLDSSNSTIAILQTEKDKLELEITDSKKEQDDLLVLLADQDQKILSLKNKLKDLGHPVEEEDELESGDQEDEDDESEDPGKDLDHI

SEQ ID NO: 4962 - protein, 647 aa, Homo sapiens
MARAGPRLVLSEEAVRAKSGLGPHRDLAELQSLSIPGTYQEKITHLGHSLMSLTGLKSLDLSRNSLVSLEGIQYLTALESLNLYYNCISSLAEVFRLHALTELVDVDFRLNPVVKVEPDYRLFVVHLLPKLQQLDDRPVRASERKASRLHFASEDSLDSKESVPASLKEGRPHHPRAKCTEALAKQSLVMDADDEAVLNLIAECEWDLGRPPGSTSFSQKGREADSRGSQESRHLLSPQLVQYQCGDSGKQGRETRRSSCRGCCLEKMPWSQLCGELPPLYGAEPEASRAPRPHTYFTPHPDSMDTEDSASSQKLDLSGEMVPGPLPAPGKCRKRRMPVGRFQTFSDQEGLGCPERTHGSSVPKESLSRQDSSESRNGRTLSQPEASETEEQRSRGVTDTREPSPGSHSALPGKKTALQAALLETLLDLVDRSWGGCRSLHSNEAFLAQARHILSSVEEFTAAQDSSAMVGEDVGSLALESKSLQSRLAEQQQQHAREMSEVTAELHHTHKELDDLRQHLDKSLEENSRLKSLLLSMKKEVKSADTAATLNLQIAGLQTSVKRLCGEIVELKQHLEHYDKIQELTQMLQESHSSLVSTNEHLLQELSQVRAQHRAEVEQMHWSYQELKKTMALFPHSSASHGGCQAC

SEQ ID NO: 4963 - protein, 258 aa, Homo sapiens
MAETEERSLDNFFAKRDKKKKKERSNRAASAAGAAGSAGGSSGAAGAAGGGAGAGTRPGDGGTASAGAAGPGAATKAVTKDEDEWKELEQKEVDYSGLRVQAMQISSEKEEDDNEKRQDPGDNWEEGGGGGGGMEKSSGPWNKTAPVQAPPAPVIVTETPEPAMTSGVYRPPGARLTTTRKTPQGPPEIYSDTQFPSLQSTAKHVESRKDKEMEKSFEVVRHKNRGRDEVSKNQALKLQLDNQYAVLENQKSSHSQYN

SEQ ID NO: 4964 - protein, 358 aa, Homo sapiens
MAPQNLSTFCLLLLYLIGAVIAGRDFYKILGVPRSASIKDIKKAYRKLALQLHPDRNPDDPQAQEKFQDLGAAYEVLSDSEKRKQYDTYGEEGLKDGHQSSHGDIFSHFFGDFGFMFGGTPRQQDRNIPRGSDIIVDLEVTLEEVYAGNFVEVVRNKPVARQAPGKRKCNCRQEMRTTQLGPGRFQMTQEVVCDECPNVKLVNEERTLEVEIEPGVRDGMEYPFIGEGEPHVDGEPGDLRFRIKVVKHPIFERRGDDLYTNVTISLVESLVGFEMDITHLDGHKVHISRDKITRPGAKLWKKGEGLPNFDNNNIKGSLIITFDVDFPKEQLTEEAREGIKQLLKQGSVQKVYNGLQGY

SEQ ID NO: 4965 - protein, 207 aa, Homo sapiens
MTSRKKVLLKVIILGDSGVGKTSLMNQYVNKKFSNQYKATIGADFLTKEVMVDDRLVTMQIWDTAGQERFQSLGVAFYRGADCCVLVFDVTAPNTFKTLDSWRDEFLIQASPRDPENFPFVVLGNKIDLENRQVATKRAQAWCYSKNNIPYFETSAKEAINVEQAFQTIARNALKQETEVELYNEFPEPIKLDKNDRAKASAESCSC

SEQ ID NO: 4966 - protein, 1074 aa, Homo sapiens
MIPICPVVSFTYVPSRLGEDAKMATGNYFGFTHSGAAAAAAAAQYSQQPASGVAYSHPTTVASYTVHQAPVAAHTVTAAYAPAAATVAVARPAPVAVAAAATAAAYGGYPTAHTATDYGYTQRQQEAPPPPPPATTQNYQDSYSYVRSTAPAVAYDSKQYYQQPTATAAAVAAAAQPQPSVAETYYQTAPKAGYSQGATQYTQAQQTRQVTAIKPATPSPATTTFSIYPVSSTVQPVAAAATVVPSYTQSATYSTTAVTYSGTSYSGYEAAVYSAASSYYQQQQQQQKQAAAAAAAAAATAAWTGTTFTKKAPFQNKQLKPKQPPKPPQIHYCDVCKISCAGPQTYKEHLEGQKHKKKEAALKASQNTSSSNSSTRGTQNQLRCELCDVSCTGADAYAAHIRGAKHQKVVKLHTKLGKPIPSTEPNVVSQATSSTAVSASKPTASPSSIAANNCTVNTSSVATSSMKGLTTTGNSSLNSTSNTKVSAVPTNMAAKKTSTPKINFVGGNKLQSTGNKAEDIKGTECVKSTPVTSAVQIPEVKQDTVSEPVTPASLAALQSDVQPVGHDYVEEVRNDEGKVIRFHCKLCECSFNDPNAKEMHLKGRRHRLQYKKKVNPDLQVEVKPSIRARKIQEEKMRKQMQKEEYWRRREEEERWRMEMRRYEEDMYWRRMEEEQHHWDDRRRMPDGGYPHGPPGPLGLLGVRPGMPPQPQGPAPLRRPDSSDDRYVMTKHATIYPTEEELQAVQKIVSITERALKLVSDSLSEHEKNKNKEGDDKKEGGKDRALKGVLRVGVLAKGLLLRGDRNVNLVLLCSEKPSKTLLSRIAENLPKQLAVISPEKYDIKCAVSEAAIILNSCVEPKMQVTITLTSPIIREENMREGDVTSGMVKDPPDVLDRQKCLDALAALRHAKWFQARANGLQSCVIIIRILRDLCQRVPTWSDFPSWAMELLVEKAISSASSPQSPGDALRRVFECISSGIILKGSPGLLDPCEKDPFDTLATMTDQQREDITSSAQFALRLLAFRQIHKVLGMDPLPQMSQRFNIHNNRKRRRDSDGVDGFEAEGKKDKKDYDNF

SEQ ID NO: 4967 - protein, 145 aa, Homo sapiens
MKFNPFVTSDRSKNRKRHFNAPSHVRRKIMSSPLSKELRQKYNVRSMPIRKDDEVQVVRGHYKGQQIGKVVQVYRKKYVIYIERVQREKANGTTVHVGIHPSKVVITRLKLDKDRKKILERKAKSRQVGKEKGKYKEELIEKMQE

SEQ ID NO: 4968 - protein, 1058 aa, Homo sapiens
MEDGTPKHIIQMTGFKMEEKEALVKLLLKLDCTFIKSEKYKNCTHLIAERLCKSEKFLAACAAGKWILTKDYIIHSAKSGRWLDETTYEWGYKIEKDSRYSPQMQSAPKRWREELKRTGAPGAFHRWKVVLLVRTDKRSDSLIRVLEAGKANVILPKSSPSGITHVIASNARIKAEKEKDNFKAPFYPIQYLGDFLLEKEIQNDEDSQTNSVWTEHSNEETNKDFRKDAGFLEMKGALRETMYRTQKEMQNHEDVNVGSILIQHHKKEKFSGSSKDLKFVKMRNTFGSHTYENQKEIKKKDEDIQRSYTLRRKRKKGKESNCKKGVEHEKIKSTLRRHIYNRDQKEMKNSIFAEYAKESKAMAIKTDVDVVEIKNTLRKHIYRAQAVRYNCIRIDKQPVYNVEVKNAEFPRGVLNLIESLIEGHFFKEAIEELSTLQAHYIPPVCVLHALLENVLQDNIDTFSGRYFHILSALLHLHPPWKSPAMSRYYLELFQCPTCMKGAWSLVEVLIRSCLFNESFCHQISENIGSKVLHLTLLKFFFNLIESEVQHLSQKLYDWSDSQNLKITGKAMLLEIFWSGSETSGLLTKPVNMLLEWTIYSHKEKFKSNDVFKHELAYLLAGILGAAIDYWIFLGLKMGRNVMRHMSDDLGSYVSLSCDDFSSQELEIFICSFSSSWLQMFVAEAVFKKLCLQSSGSVSSEPLSLQKMVYSYLPALGKTGVLGSGKIQVSKKIGQRPCFDSQRTLLMLNGTKQKQVEGLPELLDLNLAKCSSSLKKLKKKSEGELSCSKENCPSVVKKMNFHKTNLKGETALHRACINNQVEKLILLLSLPGIDINVKDNAGWTPLHEACNYGNTVCVQEILQRCPEVDLLTQVDGVTPLHDALSNGHVEIGKLLLQHGGPVLLQQRNAKGELPLDYVVSPQIKEELFAITKIEDTVENFHAQAEKHFHYQQLEFGSFLLSRMLLNFCSIFDLSSEFILASKGLTHLNELLMACKSHKETTSVHTDWLLDLYAGNIKTLQKLPHILKELPENLKVCPGVHTEALMITLEMMCRSVMEFS

SEQ ID NO: 4969 - protein, 219 aa, Homo sapiens
MEPKEATGKENMVTKKKNLAFLRSRLYMLERRKTDTVVESSVSGDHSGTLRRSQSDRTEYNQKLQEKMTPQGECSVAETLTPEEEHHMKRMMAKREKIIKELIQTEKDYLNDLELCVREVVQPLRNKKTDRLDVDSLFSNIESVHQISAKLLSLLEEATTDVEPAMQVIGEVFLQIKGPLEDIYKIYCYHHDEAHSILESYEKEEELKEHLSHCIQSLK

SEQ ID NO: 4970 - protein, 1060 aa, Homo sapiens
MLIEDVDALKSWLAKLLEPICDADPSALANYVVALVKKDKPEKELKAFCADQLDVFLQKETSGFVDKLFESLYTKNYLPLLEPVKPEPKPLVQEKEEIKEEVFQEPAEEERDGRKKKYPSPQKTRSESSERRTREKKREDGKWRDYDRYYERNELYREKYDWRRGRSKSRSKSRGLSRSRSRSRGRSKDRDPNRNVEHRERSKFKSERNDLESSYVPVSAPPPNSSEQYSSGAQSIPSTVTVIAPAHHSENTTESWSNYYNNHSSSNSFGRNLPPKRRCRDYDERGFCVLGDLCQFDHGNDPLVVDEVALPSMIPFPPPPPGLPPPPPPGMLMPPMPGPGPGPGPGPGPGPGPGPGPGHSMRLPVPQGHGQPPPSVVLPIPRPPITQSSLINSRDQPGTSAVPNLASVGTRLPPPLPQNLLYTVSERQPMYSREHGAAASERLQLGTPPPLLAARLVPPRNLMGSSIGYHTSVSSPTPLVPDTYEPDGYNPEAPSITSSGRSQYRQFFSRTQTQRPNLIGLTSGDMDVNPRAANIVIQTEPPVPVSINSNITRVVLEPDSRKRAMSGLEGPLTKKPWLGKQGNNNQNKPGFLRKNQYTNTKLEVKKIPQELNNITKLNEHFSKFGTIVNIQVAFKGDPEAALIQYLTNEEARKAISSTEAVLNNRFIRVLWHRENNEQPTLQSSAQLLLQQQQTLSHLSQQHHHLPQHLHQQQVLVAQSAPSTVHGGIQKMMSKPQTSGAYVLNKVPVKHRLGHAGGNQSDASHLLNQSGGAGEDCQIFSTPGHPKMIYSSSNLKTPSKLCSGSKSHDVQEVLKKKQEAMKLQQDMRKKRQEVLEKQIECQKMLISKLEKNKNMKPEERANIMKTLKELGEKISQLKDELKTSSAVSTPSKVKTKTEAQKELLDTELDLHKRLSSGEDTTELRKKLSQLQVEAARLGILPVGRGKTMSSQGRGRGRGRGGRGRGSLNHMVVDHRPKALTVGGFIEEEKEDLLQHFSTANQGPKFKDRRLQISWHKPKVPSISTETEEEEVKEEETETSDLFLPDDDDEDEDEYESRSWRR

SEQ ID NO: 4971 - protein, 605 aa, Homo sapiens
MEADIITNLRCRLKEAEEERLKAAQYGLQLVESQNELQNQLDKCRNEMMTMTESYEQEKYTLQREVELKSRMLESLSCECEAIKQQQKMHLEKLEEQLSRSHGQEVNELKTKIEKLKVELDEARLSEKQLKHQVDHQKELLSCKSEELRVMSERVQESMSSEMLALQIELTEMESMKTTLKEEVNELQYRQEQLELLITNLMRQVDRLKEEKEEREKEAVSYYNALEKARVANQDLQVQLDQALQQALDPNSKGNSLFAEVEDRRAAMERQLISMKVKYQSLKKQNVFNREQMQRMKLQIATLLQMKGSQTEFEQQERLLAMLEQKNGEIKHLLGEIRNLEKFKNLYDSMESKPSVDSGTLEDNTYYTDLLQMKLDNLNKEIESTKGELSIQRMKALFESQRALDIERKLFANERCLQLSESENMKLRAKLDELKLKYEPEETVEVPVLKKRREVLPVDITTAKDACVNNSALGGEVYRLPPQKEETQSCPNSLEDNNLQLEKSVSIYTPVVSLSPHKNLPVDMQLKKEKKCVKLIGVPADAEALSERSGNTPNSPRLAAESKLQTEVKEGKETSSKLEKETCKKLHPILYVSSKSTPETQCPQQ

SEQ ID NO: 4972 - protein, 295 aa, Homo sapiens
MMAKKPPKPAPRRIFQERLKITALPLYFEGFLLIKRSGYREYEHYWTELRGTTLFFYTDKKSIIYVDKLDIVDLTCLTEQNSTEKNCAKFTLVLPKEEVQLKTENTESGEEWRGFILTVTELSVPQNVSLLPGQVIKLHEVLEREKKRRIETEQSTSVEKEKEPTEDYVDVLNPMPACFYTVSRKEATEMLQKNPSLGNMILRPGSDSRNYSITIRQEIDIPRIKHYKVMSVGQNYTIELEKPVTLPNLFSVIDYFVKETRGNLRPFICSTDENTGQEPSMEGRSEKLKKNPHIA

SEQ ID NO: 4973 - protein, 1605 aa, Homo sapiens
MFHICPAENLYQNRFLGLAAMASPSRNSQSRRRCKEPLRYSYNPDQFHNMDLRGGPHDGVTIPRSTSDTDLVTSDSRSTLMVSSSYYSIGHSQDLVIHWDIKEEVDAGDWIGMYLIDEVLSENFLDYKNRGVNGSHRGQIIWKIDASSYFVEPETKICFKYYHGVSGALRATTPSVTVKNSAAPIFKSIGADETVQGQGSRRLISFSLSDFQAMGLKKGMFFNPDPYLKISIQPGKHSIFPALPHHGQERRSKIIGNTVNPIWQAEQFSFVSLPTDVLEIEVKDKFAKSRPIIKRFLGKLSMPVQRLLERHAIGDRVVSYTLGRRLPTDHVSGQLQFRFEITSSIHPADDEEISLSTEPESAQIQDSPMNNLMESGSGEPRSEAPESSESWKPEQLGEGSVPDGPGNQSIELSRPAEEAAVITEAGDQGMVSVGPEGAGELLAQVQKDIQPAPSAEELAEQLDLGEEASALLLEDGEAPASTKEEPLEEEATTQSRAGREEEEKEQEEEGDVSTLEQGEGRLQLRASVKRKSRPCSLPVSELETVIASACGDPETAAHYIRIHTLLHSMPSAQGGSAAEEEDGAEEESTLKDSSEKDGLSEVDTVAADPSALEEDREEPEGATPGTAHPGHSGGHFPSLANGAAQDGDTHPSTGSESDSSPRQGGDHSCEGCDASCCSPSCYSSSCYSTSCYSSSCYSASCYSPSCYNGNRFASHTRFSSVDSAKISESTVFSSQDDEEEENSAFESVPDSMQSPELDPESTNGAGPWQDELAAPSGHVERSPEGLESPVAGPSNRREGECPILHNSQPVSQLPSLRPEHHHYPTIDEPLPPNWEARIDSHGRVFYVDHVNRTTTWQRPTAAATPDGMRRSGSIQQMEQLNRRYQNIQRTIATERSEEDSGSQSCEQAPAGGGGGGGSDSEAESSQSSLDLRREGSLSPVNSQKITLLLQSPAVKFITNPEFFTVLHANYSAYRVFTSSTCLKHMILKVRRDARNFERYQHNRDLVNFINMFADTRLELPRGWEIKTDQQGKSFFVDHNSRATTFIDPRIPLQNGRLPNHLTHRQHLQRLRSYSAGEASEVSRNRGASLLARPGHSLVAAIRSQHQHESLPLAYNDKIVAFLRQPNIFEMLQERQPSLARNHTLREKIHYIRTEGNHGLEKLSCDADLVILLSLFEEEIMSYVPLQAAFHPGYSFSPRCSPCSSPQNSPGLQRASARAPSPYRRDFEAKLRNFYRKLEAKGFGQGPGKIKLIIRRDHLLEGTFNQVMAYSRKELQRNKLYVTFVGEEGLDYSGPSREFFFLLSQELFNPYYGLFEYSANDTYTVQISPMSAFVENHLEWFRFSGRILGLALIHQYLLDAFFTRPFYKALLRLPCDLSDLEYLDEEFHQSLQWMKDNNITDILDLTFTVNEEVFGQVTERELKSGGANTQVTEKNKKEYIERMVKWRVERGVVQQTEALVRGFYEVVDSRLVSVFDARELELVIAGTAEIDLNDWRNNTEYRGGYHDGHLVIRWFWAAVERFNNEQRLRLLQFVTGTSSVPYEGFAALRGSNGLRRFCIEKWGKITSLPRAHTCFNRLDLPPYPSYSMLYEKLLTAVEETSTFGLE

SEQ ID NO: 4974 - protein, 790 aa, Homo sapiens
MGTRKKVHAFVRVKPTDDFAHEMIRYGDDKRSIDIHLKKDIRRGVVNNQQTDWSFKLDGVLHDASQDLVYETVAKDVVSQALDGYNGTIMCYGQTGAGKTYTMMGATENYKHRGILPRALQQVFRMIEERPTHAITVRVSYLEIYNESLFDLLSTLPYVGPSVTPMTIVENPQGVFIKGLSVHLTSQEEDAFSLLFEGETNRIIASHTMNKNSSRSHCIFTIYLEAHSRTLSEEKYITSKINLVDLAGSERLGKSGSEGQVLKEATYINKSLSFLEQAIIALGDQKRDHIPFRQCKLTHALKDSLGGNCNMVLVTNIYGEAAQLEETLSSLRFASRMKLVTTEPAINEKYDAERMVKNLEKELALLKQELAIHDSLTNRTFVTYDPMDEIQIAEINSQVRRYLEGTLDEIDIISLRQIKEVFNQFRVVLSQQEQEVESTLRRKYTLIDRNDFAAISAIQKAGLVDVDGHLVGEPEGQNFGLGVAPFSTKPGKKAKSKKTFKEPLSSLARKEGASSPVNGKDLDYVSTSKTQLVPSSKDGDVKDMLSRDRETSSIEPLPSDSPKEELRPIRPDTPPSKPVAFEEFKNEQGSEINRIFKENKSILNERRKRASETTQHINAIKREIDVTKEALNFQKSLREKQGKYENKGLMIIDEEEFLLILKLKDLKKQYRSEYQDLRDLRAEIQYCQHLVDQCRHRLLMEFDIWYNESFVIPEDMQMALKPGGSIRPGMVPVNRIVSLGEDDQDKFSQLQQRVLPEGPDSISFYNAKVKIEQKHNYLKTMMGLQQAHRK

SEQ ID NO: 4975 - protein, 291 aa, Homo sapiens [sequence omitted]

SEQ ID NO: 4976 - protein, 793 aa, Homo sapiens
MFWKFDLHSSSHIDTLLEREDVTLKELMDEEDVLQECKAQNRKLIEFLLKAECLEDLVSFIIEEPPQDMDEKIRYKYPNISCELLTSDVSQMNDRLGEDESLLMKLYSFLLNDSPLNPLLASFFSKVLSILISRKPEQIVDFLKKKHDFVDLIIKHIGTSAIMDLLLRLLTCIEPPQPRQDVLNWLNEEKIIQRLVEIVHPSQEEDRHSNASQSLCEIVRLSRDQMLQIQNSTEPDPLLATLEKQEIIEQLLSNIFHKEKNESAIVSAIQILLTLLETRRPTFEGHIEICPPGMSHSACSVNKSVLEAIRGRLGSFHELLLEPPKNMFFKYTWNNFLHTQVEICIALILASPFENTENATITDQDSTGDNLLLKHLFQKCQLIERILEAWEMNEKKQAEGGRRHGYMGHLTRIANCIVHSTDKGPNSALVQQLIKDLPDEVRERWETFCTSSLGETNKRNTVDLAFSDYQMQQMTSNFIDQFGFNDEKFADQDDIGNVSFDRVSDINFTLNTNESGNIALFEACCKERIQQFDDGGSDEEDIWEEKHIAFTPESQRRSSSGSTDSEESTDSEEEDGAKQDLFEPSSANTEDKMEVDLSEPPNWSANFDVPMETTHGAPLDSVGSDVWSTEEPMPTKETGWASFSEFTSSLSTKDSLRSNSPVEMETSTEPMDPLTPSAAALAVQPEAAGSVAMEASSDGEEDAESTDKVTETVMNGGMKETLSLTVDAKTETAVFKSEEGKLSTSQDAACKDAEECPETAEAKCAAPRPPSSSPEQRTGQPSAPGDTSVNGPV

SEQ ID NO: 4977 - protein, 1126 aa, Homo sapiens
MDPFTEKLLERTRARRENLQRKMAERPTAAPRSMTHAKRARQPLSEASNQQPLSGGEEKSCTKPSPSKKRCSDNTEVEVSNLENKQPVESTSAKSCSPSPVSPQVQPQAADTISDSVAVPASLLGMRRGLNSRLEATAASSVKTRMQKLAEQRRRWDNDDMTDDIPESSLFSPMPSEEKAASPPRPLLSNASATPVGRRGRLANLAATICSWEDDVNHSFAKQNSVQEQPGTACLSKFSSASGASARINSSSVKQEATFCSQRDGDASLNKALSSSADDASLVNASISSSVKATSPVKSTTSITDAKSCEGQNPELLPKTPISPLKTGVSKPIVKSTLSQTVPSKGELSREICLQSQSKDKSTTPGGTGIKPFLERFGERCQEHSKESPARSTPHRTPIITPNTKAIQERLFKQDTSSSTTHLAQQLKQERQKELACLRGRFDKGNIWSAEKGGNSKSKQLETKQETHCQSTPLKKHQGVSKTQSLPVTEKVTENQIPAKNSSTEPKGFTECEMTKSSPLKITLFLEEDKSLKVTSDPKVEQKIEVIREIEMSVDDDDINSSKVINDLFSDVLEEGELDMEKSQEEMDQALAESSEEQEDALNISSMSLLAPLAQTVGVVSPESLVSTPRLELKDTSRSDESPKPGKFQRTRVPRAESGDSLGSEDRDLLYSIDAYRSQRFKETERPSIKQVIVRKEDVTSKLDEKNNAFPCQVNIKQKMQELNNEINMQQTVIYQASQALNCCVDEEHGKGSLEEAEAERLLLIATGKRTLLIDELNKLKNEGPQRKNKASPQSEFMPSKGSVTLSEIRLPLKADFVCSTVQKPDAANYYYLIILKAGAENMVATPLASTSNSLNGDALTFTTTFTLQDVSNDFEINIEVYSLVQKKDPSGLDKKKKTSKSKAITPKRLLTSITTKSNIHSSVMASPGGLSAVRTSNFALVGSYTLSLSSVGNTKFVLDKVPFLSSLEGHIYLKIKCQVNSSVEERGFLTIFEDVSGFGAWHRRWCVLSGNCISYWTYPDDEKARGSNPIGRINLANCTSRQIEPANREFCARRNTFELITVRPQREDDRETLVSQCRDTLCVTKNWLSADTKEERDLWMQKLNQVLVDIRLWQPDACYKPIGKP

SEQ ID NO: 4978 - protein, 454 aa, Homo sapiens
MLKQILSEMYIDPDLLAELSEEQKQILFFKMREEQIRRWKEREAAMERKESLPVKPRPKKENGKSVHWKLGADKEVWVWVMGEHHLDKPYDVLCNEIIAERARLKAEQEAEEPRKTHSEEFTNSLKTKSQYHDLQAPDNQQTKDIWKKVAEKEELEQGSRPAPTLEEEKIRSLSSSSRNIQQMLADSINRMKAYAFHQKKESMKKKQDEEINQIEEERTKQICKSWKEDSEWQASLRKSKAADEKRRSLAKQAREDYKRLSLGAQKGRGGERLQSPLRVPQKPERPPLPPKPQFLNSGAYPQKPLRNQGVVRTLSSSAQEDIIRWFKEEQLPLRAGYQKTSDTIAPWFHGILTLKKANELLLSTGMPGSFLIRVSERIKGYALSYLSEDGCKHFLIDASADAYSFLGVDQLQHATLADLVEYHKEEPITSLGKELLLYPCGQQDQLPDYLELFE

SEQ ID NO: 4979 - protein, 497 aa, Homo sapiens
MDETEWIHRHPKAEDLRVGLISWAGTYLTFEACKNTVTATAKSLGRRQTWEILVSNEHETQAVVRLKSVQGLYLLCECDGTVCYGRAASHHGCFLLRFHRNSKWTLQCLISGRYLESNGKDVFCTSHVLSAYHMWTPRPALHVHVILYSPIHRCYARADPTMGRIWVDAAVPCLEECGFLLHFRDGCYHLETSTHHFLSHVDRLFSQPSSQTAFHMQVRPGGLVALCDGEGGMLYPQGTHLLLGMGCNPMRGEEWFILQHCPTWVSLRSKTGRFISVIYDGEVRAASERLNRMSLFQFECDSESPTVQLRSANGYYLSQRRHRAVMADGHPLESDTFFRMHWNCGRIILQSCRGRFLGIAPNSLLMANVILPGPNEEFGILFANRSFLVLRGRYGYVGSSSGHDLIQCNQDQPDRIHLLPCRPGIYHFQAQGGSFWSITSFGTFRPWGKFALNFCIELQGSNLLTVLAPNGFYMRADQSGTLLADSEDITRECIWEF

SEQ ID NO: 4980 - protein, 458 aa, Homo sapiens [sequence omitted]

SEQ ID NO: 4981 - protein, 986 aa, Homo sapiens
MERMNWLSRLASRGPGHRIPQGANLQTPVMADPETCLMVFKNHWSQVVRILERQGPRAAPGGADDLSAVRNHTYQMLTLLAEDRAVPSAPTGPGPLLEFALHEDLLTRVLTWQLQWDELGDGVEERRAEQLKLFEMLVSEARQPLLRHGPVREALLTLLDACGRPVPSSPALDEGLVLLLSQLCVCVAQEPSLLEFFLQPPPEPGAAPRLLLFSRLVPFVHREGTLGQQARDALLLLMALSAGSPTVGRYIADHSYFCPVLATGLSALYSSLPRKIEVPGDDWHCLRREDWLGVPALALFMSSLEFCNAVIQVAHPLVQKQLVDYIHNGFLVPVMGPALHKTSVEEMIASTAYLELFLRSISEPALLRTFLRFLLLHRHDTHTILDTLVARIGSNSRLCMVSLSLFRTLLNLSCEDVLLQLVLRYLVPCNHVMLSQKPAVRDVDLYGRAADKFLSLIPRCCRHHAPSPPRPEHASWARGGPSRETGRREDITGPGSPSVDSSSVTTVPRPSTPSRLALFLRQQSLGGSESPGPAPCSPGLSASPASSPGRRPTPAEEPGELEDNYLEYLREARRGVDRCVRACRTWSAPYDGERPSPEPSPFGSRTKKRSLLPEEDRNNVGEGEEEELGRRGRAGGAGEGPGHLPPPQLNGVPGSWPEGAKKVRLVPKEGAGELLEGISEGMAGLEGFGQELRELEVALSNGGTGSESPLEPPLPLEEEEAYESFTCPPEPPGPFLSSPLRTLNQLPSQPFTGPFMAVLFAKLENMLQNSVYVNFLLTGLVAQLACHPQPLLRSFLLNTNMVFQPSVKSLLQVLGSVKNKIENFAASQEDFPALLSKAKKYLIARGKLDWAEGPAAGPAPRRSDPLVKSRRPSLGELLLRHAHSPTRARQAAQLVLQPGRDGAGLGLSGGSPGASTPVLLTRGGAPERQGEALRVKNAVYCAVIFPEFLKELAAISQAHAVTSPFLLETSEEGSGPLISGCGPLNP

SEQ ID NO: 4982 - protein, 2241 aa, Homo sapiens
MDDKGDPSNEEAPKAIKPTSKEFRKTWGFRRTTIAKREGAGDAEADPLEPPPPQQQLGLSLRRSGRQPKRTERVEQFLTIARRRGRRSMPVSLEDSGEPTSCPATDAETASEGSVESASETRSGPQSASTAVKERPASSEKVKGGDDHDDTSDSDSDGLTLKELQNRLRRKREQEPTERPLKGIQSRLRKKRREEGPAETVGSEASDTVEGVLPSKQEPENDQGVVSQAGKDDRESKLEGKAAQDIKDEEPGDLGRPKPECEGYDPNALYCICRQPHNNRFMICCDRCEEWFHGDCVGISEARGRLLERNGEDYICPNCTILQVQDETHSETADQQEAKWRPGDADGTDCTSIGTIEQKSSEDQGIKGRIEKAANPSGKKKLKIFQPVIEAPGASKCIGPGCCHVAQPDSVYCSNDCILKHAAATMKFLSSGKEQKPKPKEKMKMKPEKPSLPKCGAQAGIKISSVHKRPAPEKKETTVKKAVVVPARSEALGKEAACESSTPSWASDHNYNAVKPEKTAAPSPSLLYKSTKEDRRSEEKAAAMAASKKTAPPGSAVGKQPAPRNLVPKKSSFANVAAATPAIKKPPSGFKGTIPKRPWLSATPSSGASAARQAGPAPAAATAASKKFPGSAALVGAVRKPVVPSVPMASPAPGRLGAMSAAPSQPNSQIRQNIRRSLKEILWKRVNDSDDLIMTENEVGKIALHIEKEMFNLFQVTDNRYKSKYRSIMFNLKDPKNQGLFHRVLREEISLAKLVRLKPEELVSKELSTWKERPARSVMESRTKLHNESKKTAPRQEAIPDLEDSPPVSDSEEQQESARAVPEKSTAPLLDVFSSMLKDTTSQHRAHLFDLNCKICTGQVPSAEDEPAPKKQKLSASVKKEDLKSKHDSSAPDPAPDSADEVMPEAVPEVASEPGLESASHPNVDRTYFPGPPGDGHPEPSPLEDLSPCPASCGSGVVTTVTVSGRDAAAPSSSCTAVASAASRPDSTHMVEARQDVPKPVLTSVMVPKSILAKPSSSPDPRYLSVPPSPNISTSESRSPPEGDTTLFLSRLSTIWKGFINMQSVAKFVTKAYPVSGCFDYLSEDLPDTIHIGGRIAPKTVWDYVGKLKSSVSKELCLIRFHPATEEEEVAYISLYSYFSSRGRFGVVANNNRHVKDLYLIPLSAQDPVPSKLLPFEGPGLESPRPNIILGLVICQKIKRPANSGELDKMDEKRTRLQPEEADVPAYPKVATVPQSEKKPSKYPLCSADAAVSTTPPGSPPPPPPLPEPPVLKVLSSLKPAAPSPATAATTAAAASTAASSTASSASKTASPLEHILQTLFGKKKSFDPSAREPPGSTAGLPQEPKTTAEDGVPAPPLLDPIVQQFGQFSKDKALEEEEDDRPYDPEEEYDPERAFDTQLVERGRRHEVERAPEAAAAEREEVAYDPEDETILEEAKVTVDDLPNRMCADVRRNSVERPAEPVAGAATPSLVEQQKMLEELNKQIEEQKRQLEEQEEALRQQRAAVGVSMAHFSVSDALMSPPPKSSLPKAELFQQEQQSADKPASLPPASQASNHRDPRQARRLATETGEGEGEPLSRLSARGAQGALPERDASRGGLVGQAPMPVPEEKEPASSPWASGEKPPAGSEQDGWKAEPGEGTRPATVGDSSARPARRVLLPTPPCGALQPGFPLQHDGERDPFTCPGFASQDKALGSAQYEDPRNLHSAGRSSSPAGETEGDREPQARPGEGTAPLPPPGQKVGGSQPPFQGQREPGPHALGMSGLHGPNFPGPRGPAPPFPEENIASNDGPRGPPPARFGAQKGPIPSLFSGQHGPPPYGDSRGPSPSYLGGPRGVAPSQFEEARGSDPHGEKREFQDAPYNEVTGAPAQFEGTEQAPFLGSRGGAPFQFGGQRRPLLSQLKGPRGGPPPSQFGGQRGPPPGHFVGPRGPHPSQFETARGPHPNQFEGPRGQAPNFMPGPRGIQPQQFEDQRVHSPPRFTNQRAPAPLQFGGLRGSAPFSEKNEQTPSRFHFQGQAPQVMKPGPRPLLELPSHPPQHRKDRWEEAGPPSALSSSAPGQGPEADGQWASADFREGKGHEYRNQTFEGRQRERFDVGPKEKPLEEPDAQGRASEDRRRERERGRNWSRERDWDRPREWDRHRDKDSSRDWDRNRERSANRDREREADRGKEWDRSRERSRNRERERDRRRDRDRSRSRERDRDKARDRERGRDRKDRSKSKESARDPKPEASRASDAGTASQA

SEQ ID NO: 4983 - protein, 544 aa, Homo sapiens
MDDKGDPSNEEAPKAIKPTSKEFRKTWGFRRTTIAKREGAGDAEADPLEPPPPQQQLGLSLRRSGRQPKRTERVEQFLTIARRRGRRSMPVSLEDSGEPTSCPATDAETASEGSVESASETRSGPQSASTAVKERPASSEKVKGGDDHDDTSDSDSDGLTLKELQNRLRRKREQEPTERPLKGIQSRLRKKRREEGPAETVGSEASDTVEGVLPSKQEPENDQGVVSQAGKDDRESKLEGKAAQDIKDEEPGDLGRPKPECEGYDPNALYCICRQPHNNRFMICCDRCEEWFHGDCVGISEARGRLLERNGEDYICPNCTILQVQDETHSETADQQEAKWRPGDADGTDCTSIGTIEQKSSEDQGIKGRIEKAANPSGKKKLKIFQPVIEAPGASKCIGPGCCHVAQPDSVYCSNDCILKHAAATMKFLSSGKEQKPKPKEKMKMKPEKPSLPKCGAQAGIKISSVHKRPAPEKKETTVKKAVVVPARSEALGKEAACESSTPSWASDHNYNAVKPEKTAAPSPSLLYKCSGKYSYSLHPSLIA

SEQ ID NO: 4984 - protein, 385 aa, Homo sapiens
MERPPPRAAGRDPSALRAEAPWLRAEGPGPRAAPVTVPTPPQGSSVGGGFAGLEFARPQESEPRASDLGAAAWTGAAAGAAPSAHIPVPAQRATPGKARLDEVMAAAALTSLSTSPLLLGAPVAAFSPEPGLEPWKEALVRPPGSYSSSSNSGDWGWDLASDQSSPSTPSPPLPPEAAHFLFGEPTLRKRKSPAQVMFQCLWKSCGKVLSTASAMQRHIRLVHLGRQAEPEQSDGEEDFYYTELDVGVDTLTDGLSSLTPVSPTASMPPAFPRLELPELLEPPALPSPLRPPAPPLPPPPVLSTVANPQSCHSDRVYQGCLTPARLEPQPTEVGACPPALSSRIGVTLRKPRGDAKKCRKVYGMERRDLWCTACRWKKACQRFLD

SEQ ID NO: 4985 - protein, 137 aa, Homo sapiens
MLRFCAGLSDFAPVAVRSLQDLARIAIRGTIKKIIHQETVSKNGNGLKNTPRFKRRRVRRRRMETIVFLDKEVFASRISNPSDDNSCEDLEEERREEEEKTPPETKPDPPVNFLRQKVLSLPLPDPLKYYLLYYREK

SEQ ID NO: 4986 - protein, 833 aa, Homo sapiens
MRLLDGKQTSRYSENACEKKIFSIYGHYPVVRAALRRKGWVEKKFHFLPKVIPDVEDEGARVNDDTCAKVKENQEMALEKTDNIHDVMSRLVKNEMPYLLWTIKRDIIDYHSLTYDQMLNHYAKTASFTTKIGLCVNMRSLPWYVPANPDSFFPRCYSLCTESEQQEFLEDFRRTMASSILKWVVSHQSCSRSSRSKPRDQREEAGSSDLSSRQDAENAEAKLRGLPGQLVDIACKVCQAYLGQLEHEDIDTSADAVEDLTEAEWEDLTQQYYSLVQVPLGSSIVLCIFKIQKVMMSFEPPTARDRQCQALLNRITSVNPQTDIDGLRNIWIIKPAAKSRGRGESPDIVCMDRVEEILELAAADHPLSRDNKWVVQKYIETPLLICDTKFDIRQWFLVTDWNPLTIWFYKESYLRFSTQRFSLDKLDSAIHLCNNAVQKYLKNDVGRSPLLPAHNMWTSTRFQEYLQRQGRGAVWGSVIYPSMKKAIAHAMKVAQDHVEPRKNSFELYGADFVLGRDFRPWLIEINSSPTMHPSTPVTAQLCAQVQEDTIKVAVDRSCDIGNFELLWRQPVVEPPPFSGSDLCVAGVSVRRARRQVLPVCNLKASASLLDAQPLKARGPSAMPDPAQGPPSPALQRDLGLKEEKGLPLALLAPLRGAAESGGAAQPTRTKAAGKVELPACPCRHVDSQAPNTGVPVAQPAKSWDPNQLNAHPLEPVLRGLKTAEGALRPPPGGKGEGTVCSRLPHHGHHVAACQTTGTTWDGGPGVCFLRQLLASELPMGPGLPRDPRAPPCLVCRGLLPPAGPCKRCRSFCAAVLQGASFVRLGGRSCSAAP

SEQ ID NO: 4987 - protein, 252 aa, Homo sapiens
MCSTSGCDLEEIPLDDDDLNTIEFKILAYYTRHHVFKSTPALFSPKLLRTRSLSQRGLGNCSANESWTEVSWPCRNSQSSEKAINLGKKKSSWKAFFGVVEKEDSQSTPAKVSAQGQRTLEYQDSHSQQWSRCLSNVEQCLEHEAVDPKVISIANRVAEIVYSWPPPQATQAGGFKSKEIFVTEGLSFQLQGHVPVASSSKKDEEEQILAKIVELLKYSGDQLERKDTAFIPIPLVDTSIQGFPQDGLMACI

SEQ ID NO: 4988 - protein, 86 aa, Homo sapiens
MSLPLNPKPFLNGLTGKPVMVKLKWGMEYKGYLVSVDGYMNMQLANTEEYIDGALSGHLGEVLIRCNNVLYIRGVEEEEEDGEMRE

SEQ ID NO: 4989 - protein, 426 aa, Homo sapiens
MASGHSLLLENAQQVVLVCARGERFLARDALRSLAVLEGASLVVGKDGFIKAIGPADVIQRQFSGETFEEIIDCSGKCILPGLVDAHTHPVWAGERVHEFAMKLAGATYMEIHQAGGGIHFTVERTRQATEEELFRSLQQRLQCMMRAGTTLVECKSGYGLDLETELKMLRVIERARRELDIGISATYCGAHSVPKGKTATEAADDIINNHLPKLKELGRNGEIHVDNIDVFCEKGVFDLDSTRRILQRGKDIGLQINFHGDELHPMKAAELGAELGAQAISHLEEVSDEGIVAMATARCSAILLPTTAYMLRLKQPRARKMLDEGVIVALGSDFNPNAYCFSMPMVMHLACVNMRMSMPEALAAATINAAYALGKSHTHGSLEVGKQGDLIIINSSRWEHLIYQFGGHHELIEYVIAKGKLIYKT

SEQ ID NO: 4990 - protein, 420 aa, Homo sapiens
MFSPGQEEHCAPNKEPVKYGELVVLGYNGALPNGDRGRRKSRFALYKRPKANGVKPSTVHVISTPQASKAISCKGQHSISYTLSRNQTVVVEYTHDKDTDMFQVGRSTESPIDFVVTDTISGSQNTDEAQITQSTISRFACRIVCDRNEPYTARIFAAGFDSSKNIFLGEKAAKWKNPDGHMDGLTTNGVLVMHPRGGFTEESQPGVWREISVCGDVYTLRETRSAQQRGKLVESETNVLQDGSLIDLCGATLLWRTADGLFHTPTQKHIEALRQEINAARPQCPVGLNTLAFPSINRKEVVEEKQPWAYLSCGHVHGYHNWGHRSDTEANERECPMCRTVGPYVPLWLGCEAGFYVDAGPPTHAFTPCGHVCSEKSAKYWSQIPLPHGTHAFHAACPFCATQLVGEQNCIKLIFQGPID

SEQ ID NO: 4991 - protein, 351 aa, Homo sapiens
MIVQRVVLNSRPGKNGNPVAENFRMEEVYLPDNINEGQVQVRTLYLSVDPYMRCRMNEDTGTDYITPWQLSQVVDGGGIGIIEESKHTNLTKGDFVTSFYWPWQTKVILDGNSLEKVDPQLVDGHLSYFLGAIGMPGLTSLIGIQEKGHITAGSNKTMVVSGAAGACGSVAGQIGHFLGCSRVVGICGTHEKCILLTSELGFDAAINYKKDNVAEQLRESCPAGVDVYFDNVGGNISDTVISQMNENSHIILCGQISQYNKDVPYPPPLSPAIEAIQKERNITRERFLVLNYKDKFEPGILQLSQWFKEGKLKIKETVINGLENMGAAFQSMMTGGNIGKQIVCISEEISL

SEQ ID NO: 4992 - protein, 723 aa, Homo sapiens
MAEEEETAALTEKVIRTQRVFINLLDSYSSGNIGKFLSNCVVGASLEEITEEEEEEDENKSAMLEASSTKVKEGTFQIVGTLSKPDSPRPDFAVETYSAISREDLLMRLLECDVIIYNITESSQQMEEAIWAVSALSEEVSHFEKRKLFILLSTVMTWARSKALDPEDSEVPFTEEDYRRRKSHPNFLDHINAEKMVLKFGKKARKFAAYVVAAGLQYGAEGGMLHTFFKMAWLGEIPALPVFGDGTNVIPTIHVLDLAGVIQNVIDHVPKPHYLVAVDESVHTLEDIVKCISKNTGPGKIQKIPRENAYLTKDLTQDCLDHLLVNLRMEALFVKENFNIRWAAQTGFVENINTILKEYKQSRGLMPIKICILGPPAVGKSSIAKELANYYKLHHIQLKDVISEAIAKLEAIVAPNDVGEGEEEVEEEEEEENVEDAQELLDGIKESMEQNAGQLDDQYIIRFMKEKLKSMPCRNQGYILDGFPKTYDQAKDLFNQEDEEEEDDVRGRMFPFDKLIIPEFVCALDASDEFLKERVINLPESIVAGTHYSQDRFLRALSNYRDINIDDETVFNYFDELEIHPIHIDVGKLEDAQNRLAIKQLIKEIGEPRNYGLTDEEKAEEERKAAEERLAREAAEEAEREHQEAVEMAEKIARWEEWNKRLEEVKREERELLEAQSIPLRNYLMTYVMPTLIQGLNECCNVRPEDPVDFLAEYLFKNNPEAQ

SEQ ID NO: 4993 - protein, 414 aa, Homo sapiens
MQTFLKGKRVGYWLSEKKIKKLNFQAFAELCRKRGMEVVQLNLSRPIEEQGPLDVIIHKLTDVILEADQNDSQSLELVHRFQEYIDAHPETIVLDPLPAIRTLLDRSKSYELIRKIEAYMEDDRICSPPFMELTSLCGDDTMRLLEKNGLTFPFICKTRVAHGTNSHEMAIVFNQEGLNAIQPPCVVQNFINHNAVLYKVFVVGESYTVVQRPSLKNFSAGTSDRESIFFNSHNVSKPESSSVLTELDKIEGVFERPSDEVIRELSRALRQALGVSLFGIDIIINNQTGQHAVIDINAFPGYEGVSEFFTDLLNHIATVLQGQSTAMAATGDVALLRHSKLLAEPAGGLVGERTCSASPGCCGSMMGQDAPWKAEADAGGTAKLPHQRLGCNAGVSPSFQQHCVASLATKASSQ

SEQ ID NO: 4994 - protein, 199 aa, Homo sapiens
MRFRFCGDLDCPDWVLAEISTLAKMSSVKLRLLCSQVLKELLGQGIDYEKILKLTADAKFESGDVKATVAVLSFILSSAAKHSVDGESLSSELQQLGLPKEHAASLCRCYEEKQSPLQKHLRVCSLRMNRLAGVGWRVDYTLSSSLLQSVEEPMVHLRLEVAAAPGTPAQPVAMSLSADKFQVLLAELKQAQTLMSSLG

SEQ ID NO: 4995 - protein, 407 aa, Homo sapiens
MSHRKFSAPRHGHLGFLPHKRSHRHRGKVKTWPRDDPSQPVHLTAFLGYKAGMTHTLREVHRPGLKISKREEVEAVTIVETPPLVVVGVVGYVATPRGLRSFKTIFAEHLSDECRRRFYKDWHKSKKKAFTKACKRWRDTDGKKQLQKDFAAMKKYCKVIRVIVHTQMKLLPFRQKKAHIMEIQLNGGTVAEKVAWAQARLEKQVPVHSVFSQSEVIDVIAVTKGRGVKGVTSRWHTKKLPRKTHKGLRKVACIGAWHPARVGCSIARAGQKGYHHRTELNKKIFRIGRGPHMEDGKLVKNNASTSYDVTAKSITPLGGFPHYGEVNNDFVMLKGCIAGTKKRVITLRKSLLVHHSRQAVENIELKFIDTTSKFGHGRFQTAQEKRAFMGPQKKHLEKETPETSGDL

SEQ ID NO: 4996 - protein, 2440 aa, Homo sapiens
MSSSGYPPNQGAFSTEQSRYPPHSVQYTFPNTRHQQEFAVPDYRSSHLEVSQASQLLQQQQQQQLRRRPSLLSEFHPGSDRPQERRTSYEPFHPGPSPVDHDSLESKRPRLEQVSDSHFQRVSAAVLPLVHPLPEGLRASADAKKDPAFGGKHEAPSSPISGQPCGDDQNASPSKLSKEELIQSMDRVDREIAKVEQQILKLKKKQQQLEEEAAKPPEPEKPVSPPPVEQKHRSIVQIIYDENRKKAEEAHKIFEGLGPKVELPLYNQPSDTKVYHENIKTNQVMRKKLILFFKRRNHARKQREQKICQRYDQLMEAWEKKVDRIENNPRRKAKESKTREYYEKQFPEIRKQREQQERFQRVGQRGAGLSATIARSEHEISEIIDGLSEQENNEKQMRQLSVIPPMMFDAEQRRVKFINMNGLMEDPMKVYKDRQFMNVWTDHEKEIFKDKFIQHPKNFGLIASYLERKSVPDCVLYYYLTKKNENYKALVRRNYGKRRGRNQQIARPSQEEKVEEKEEDKAEKTEKKEEEKKDEEEKDEKEDSKENTKEKDKIDGTAEETEEREQATPRGRKTANSQGRRKGRITRSMTNEAAAASAAAAAATEEPPPPLPPPPEPISTEPVETSRWTEEEMEVAKKGLVEHGRNWAAIAKMVGTKSEAQCKNFYFNYKRRHNLDNLLQQHKQKTSRKPREERDVSQCESVASTVSAQEDEDIEASNEEENPEDSEVEAVKPSEDSPENATSRGNTEPAVELEPTTETAPSTSPSLAVPSTKPAEDESVETQVNDSISAETAEQMDVDQQEHSAEEGSVCDPPPATKADSVDVEVRVPENHASKVEGDNTKERDLDRASEKVEPRDEDLVVAQQINAQRPEPQSDNDSSATCSADEDVDGEPERQRMFPMDSKPSLLNPTGSILVSSPLKPNPLDLPQLQHRAAVIPPMVSCTPCNIPIGTPVSGYALYQRHIKAMHESALLEEQRQRQEQIDLECRSSTSPCGTSKSPNREWEVLQPAPHQVITNLPEGVRLPTTRPTRPPPPLIPSSKTTVASEKPSFIMGGSISQGTPGTYLTSHNQASYTQETPKPSVGSISLGLPRQQESAKSATLPYIKQEEFSPRSQNSQPEGLLVRAQHEGVVRGTAGAIQEGSITRGTPTSKISVESIPSLRGSITQGTPALPQTGIPTEALVKGSISRMPIEDSSPEKGREEAASKGHVIYEGKSGHILSYDNIKNAREGTRSAAAHEISLKRSYESVEGNIKQGMSMRESPVSAPLEGLICRALPRGSPHSDLKERTVLSGSIMQGTPRATTESFEDGLKYPKQIKRESPPIRAFEGAITKGKPYDGITTIKEMGRSIHEIPRQDILTQESARGSTPEVVQSTRPIIEGSISQGTPIKFDNNSGQSAIKHNVKSLITGPSKLSRGMPPLEIVPENIKVVERGKYEDVKAGETVRSRHTSVVSSGPSVLRSTLHEAPKAQLSPGIYDDTSARRTPVSYQNTMSRGSPMMNRTSDVTISSNKSTNHERKSTLTPTQRESIPAKSPVPGVDPVVSHSPFDPHHRGSTAGEVYRSHLPTHLDPAMPFHRALDPAAAAYLFQRQLSPTPGYPSQYQLYAMENTRQTILNDYITSQQMQVNLRPDVARGLSPREQPLGLPYPATRGIIDLTNMPPTILVPHPGGTSTPPMDRITYIPGTQITFPPRPYNSASMSPGHPTHLAAAASAEREREREREKERERERIAAASSDLYLRPGSEQPGRPGSHGYVRSPSPSVRTQETMLQQRPSVFQGTNGTSVITPLDPTAQLRIMPLPAGGPSISQGLPASRYNTAADALAALVDAAASAPQMDVSKTKESKHEAARLEENLRSRSAAVSEQQQLEQKTLEVEKRSVQCLYTSSAFPSGKPQPHSSVVYSEAGKDKGPPPKSRYEEELRTRGKTTITAANFIDVIITRQIASDKDARERGSQSSDSSSSLSSHRYETPSDAIEVISPASSPAPPQEKLQTYQPEVVKANQAENDPTRQYEGPLHHYRPQQESPSPQQQLPPSSQAEGMGQVAAHRLITLADHICQIITQDFARNQVSSQTPQQPPTSTFQNSPSALVSTPVRTKTSNRYSPESQAQSVHHQRPGSRVSPENLVDKSRGSRPGKSPERSHVSSEPYEPISPPQVPVVHEKQDSLLLLSQRGAEPAEQRNDARSPGSISYLPSFFTKLENTSPMVKSKKQEIFRKLNSSGGGDSDMAAAQPGTEIFNLPAVTTSGSVSSRGHSFADPASNLGLEDIIRKALMGSFDDKVEDHGVVMSQPMGVVPGTANTSVVTSGETRREEGDPSPHSGGVCKPKLISKSNSRKSKSPIPGQGYLGTERPSSVSSVHSEGDYHRQTPGWAWEDRPSSTGSTQFPYNPLTMRMLSSTPPTPIACAPSAVNQAAPHQQNRIWEREPAPLLSAQYETLSDSDD

SEQ ID NO: 4997 - protein, 770 aa, Homo sapiens
MLQQVNGHNPGSDGQAREYLREDLQEFLGGEVLLYKLDDLTRVNPVTLETVLRCLQARYMADTFYTNAGCTLVALNPFKPVPQLYSPELMREYHAAPQPQKLKPHVFTVGEQTYRNVKSLIEPVNQSIVVSGESGAGKTWTSRCLMKFYAVVATSPASWESHKIAERIEQRILNSNPVMEAFGNACTLRNNNSSRFGKFIQLQLNRAQQMTGAAVQTYLLEKTRVACQASSERNFHIFYQICKGASEDERLQWHLPEGAAFSWLPNPERSLEEDCFEVTREAMLHLGIDTPTQNNIFKVLAGLLHLGNIQFAASEDEAQPCQPMDDAKYSVRTAASLLGLPEDVLLEMVQIRTIRAGRQQQVFRKPCARAECDTRRDCLAKLIYARLFDWLVSVINSSICADTDSWTTFIGLLDVYGFESFPDNSLEQLCINYANEKLQLEACGLVETIHISAAGFPIRVSHRNFVERYKLLRRLHPCTSSGPDSPYPAKGLPEWCPHSEEATLEPLIQDILHTLPVLTQAAAITGDSAEAMPAPMHCGRTKVFMTDSMLELLECGRARVLEQCARCIQGGWRRHRHREQERQWRAVMLIQAAIRSWLTRKHIQRLHAAATVIKRAWQKWRIRMACLAAKELDGVEEKHFSQAPCSLSTSPLQTRLLEAIIRLWPLGLVLANTAMGVGSFQRKLVVWACLQLPRGSPSSYTVQTAQDQAGVTSIRALPQGSIKFHCRKSPLRYADICPEPSPYSITGFNQILLERHRLIHVTSSAFTGLG

SEQ ID NO: 4998 - protein, 931 aa, Homo sapiens
MAEVEAVQLKEEGNRHFQLQDYKAATNSYSQALKLTKDKALLATLYRNRAACGLKTESYVQAASDASRAIDINSSDIKALYRRCQALEHLGKLDQAFKDVQRCATLEPRNQNFQEMLRRLNTSIQEKLRVQFSTDSRVQKMFEILLDENSEADKREKAANNLIVLGREEAGAEKIFQNNGVALLLQLLDTKKPELVLAAVRTLSGMCSGHQARATVILHAVRIDRICSLMAVENEEMSLAVCNLLQAIIDSLSGEDKREHRGKEEALVLDTKKDLKQITSHLLDMLVSKKVSGQGRDQALNLLNKNVPRKDLAIHDNSRTIYVVDNGLRKILKVVGQVPDLPSCLPLTDNTRMLASILINKLYDDLRCDPERDHFRKICEEYITGKFDPQDMDKNLNAIQTVSGILQGPFDLGNQLLGLKGVMEMMVALCGSERETDQLVAVEALIHASTKLSRATFIITNGVSLLKQIYKTTKNEKIKIRTLVGLCKLGSAGGTDYGLRQFAEGSTEKLAKQCRKWLCNMSIDTRTRRWAVEGLAYLTLDADVKDDFVQDVPALQAMFELAKAGTSDKTILYSVATTLVNCTNSYDVKEVIPELVQLAKFSKQHVPEEHPKDKKDFIDMRVKRLLKAGVISALACMVKADSAILTDQTKELLARVFLALCDNPKDRGTIVAQGGGKALIPLALEGTDVGKVKAAHALAKIAAVSNPDIAFPGERVYEVVRPLVRLLDTQRDGLQNYEALLGLTNLSGRSDKLRQKIFKERALPDIENYMFENHDQLRQAATECMCNMVLHKEVQERFLADGNDRLKLVVLLCGEDDDKVQNAAAGALAMLTAAHKKLCLKMTQVTTQWLEILQRLCLHDQLSVQHRGLVIAYNLLAADAELAKKLVESELLEILTVVGKQEPDEKKAEVVQTARECLIKCMDYGFIKPVS

SEQ ID NO: 4999 - protein, 673 aa, Homo sapiens
MASQFCLPESPCLSPLKPLKPHFGDIQEGIYVAIQRSDKRIHLAVVTEINRENYWVTVEWVEKAVKKGKKIDLETILLLNPALDSAEHPMPPPPLSPLALAPSSAIRDQRTATKWVAMIPQKNQTASGDSLDVRVPSKPCLMKQKKSPCLWEIQKLQEQREKRRRLQQEIRARRALDVNTRNPNYEIMHMIEEYRRHLDSSKISVLEPPQEHRICVCVRKRPLNQRETTLKDLDIITVPSDNVVMVHESKQKVDLTRYLQNQTFCFDHAFDDKASNELVYQFTAQPLVESIFRKGMATCFAYGQTGSGKTYTMGGDFSGTAQDCSKGIYALVAQDVFLLLRNSTYEKLDLKVYGTFFEIYGGKVYDLLNWKKKLQVLEDGNQQIQVVGLQEKEVCCVEEVLNLVEIGNSCRTSRQTPVNAHSSRSHAVFQIILKSGRIMHGKFSLVDLAGNERGADTTKASRKRQLEGAEINKSLLALKECILALGQNKPHTPFRASKLTLVLRDSFIGQNSSTCMIATISPGMTSCENTLNTLRYANRVKKLNVDVRPYHRGHYPIGHEAPRMLKSHIGNSEMSLQRDEFIKIPYVQSEEQKEIEEVETLPTLLGKDTTISGKGSSQWLENIQERAGGVHHDIDFCIARSLSILEQKIDALTEIQKKLKLLLADLHVKSKVE

SEQ ID NO: 5000 - protein, 411 aa, Homo sapiens
MATTATMATSGSARKRLLKEEDMTKVEFETSEEVDVTPTFDTMGLREDLLRGIYAYGFEKPSAIQQRAIKQIIKGRDVIAQSQSGTGKTATFSISVLQCLDIQVRETQALILAPTRELAVQIQKGLLALGDYMNVQCHACIGGTNVGEDIRKLDYGQHVVAGTPGRVFDMIRRRSLRTRAIKMLVLDEADEMLNKGFKEQIYDVYRYLPPATQVVLISATLPHEILEMTNKFMTDPIRILVKRDELTLEGIKQFFVAVEREEWKFDTLCDLYDTLTITQAVIFCNTKRKVDWLTEKMREANFTVSSMHGDMPQKERESIMKEFRSGASRVLISTDVWARGLDVPQVSLIINYDLPNNRELYIHRIGRSGRYGRKGVAINFVKNDDIRILRDIEQYYSTQIDEMPMNVADLI

SEQ ID NO: 5001 - protein, 560 aa, Homo sapiens
MELPAVGEHVFAVESIEKKRIRKGRVEYLVKWRGWSPKYNTWEPEENILDPRLLIAFQNRERQEQLMGYRKRGPKPKPLVVQVPTFARRSNVLTGLQDSSTDNRAKLDLGAQGKGQGHQYELNSKKHHQYQPHSKERAGKPPPPGKSGKYYYQLNSKKHHPYQPDPKMYDLQYQGGHKEAPSPTCPDLGAKSHPPDKWAQGAGAKGYLGAVKPLAGAAGAPGKGSEKGPPNGMMPAPKEAVTGNGIGGKMKIVKNKNKNGRIVIVMSKYMENGMQAVKIKSGEVAEGEARSPSHKKRAADERHPPADRTFKKAAGAEEKKVEAPPKRREEEVSGVSDPQPQDAGSRKLSPTKEAFGEQPLQLTTKPDLLAWDPARNTHPPSHHPHPHPHHHHHHHHHHHHAVGLNLSHVRKRCLSETHGEREPCKKRLTARSISTPTCLGGSPAAERPADLPPAAALPQPEVILLDSDLDEPIDLRCVKTRSEAGEPPSSLQVKPETPASAAVAVAAAAAPTTTAEKPPAEAQDEPAESLSEFKPFFGNIIITDVTANCLTVTFKEYVTV

SEQ ID NO: 5002 - protein, 405 aa, Homo sapiens
MDSLVTANTKFCFDLFQEIGKDDRHKNIFFSPLSLSAALGMVRLGARSDSAHQIDEVLHFNEFSQNESKEPDPCLKSNKQKAGSLNNESGLVSCYFGQLLSKLDRIKTDYTLSIANRLYGEQEFPICQEYLDGVIQFYHTTIESVDFQKNPEKSRQEINFWVECQSQGKIKELFSKDAINAETVLVLVNAVYFKAKWETYFDHENTVDAPFCLNANENKSVKMMTQKGLYRIGFIEEVKAQILEMRYTKGKLSMFVLLPSHSKDNLKGLEELERKITYEKMVAWSSSENMSEESVVLSFPRFTLEDSYDLNSILQDMGITDIFDETRADLTGISPSPNLYLSKIIHKTFVEVDENGTQAAAATGAVVSERSLRSWVEFNANHPFLFFIRHNKTQTILFYGRVCSP

SEQ ID NO: 5003 - protein, 1178 aa, Homo sapiens
MLRMKLPLKPTHPAEPPPEAEEPEADARPGAKAPSRRRRDCRPPPPPPPPAGPSRGPLPPPPPPRGLGPPVAGGAAAGAGMPGGGGGPSAALREQERVYEWFGLVLGSAQRLEFMCGLLDLCNPLELRFLGSCLEDLARKDYHYLRDSEAKANGLSDPGPLADFREPAVRSRLIVYLALLGSENREAAGRLHRLLPQVDSVLKSLRAARGEGSRGGAEDERGEDGDGEQDAEKDGSGPEGGIVEPRVGGGLGSRAQEELLLLFTMASLHPAFSFHQRVTLREHLERLRAALRGGPEDAEVEVEPCKFAGPRAQNNSAHGDYMQNNESSLIEQAPIPQDGLTVAPHRAQREAVHIEKIMLKGVQRKRADKYWEYTFKVNWSDLSVTTVTKTHQELQEFLLKLPKELSSETFDKTILRALNQGSLKREERRHPDLEPILRQLFSSSSQAFLQSQKVHSFFQSISSDSLHSINNLQSSLKTSKILEHLKEDSSEASSQEEDVLQHAIIHKKHTGKSPIVNNIGTSCSPLDGLTMQYSEQNGIVDWRKQSCTTIQHPEHCVTSADQHSAEKRSLSSINKKKGKPQTEKEKIKKTDNRLNSRINGIRLSTPQHAHGGTVKDVNLDIGSGHDTCGETSSESYSSPSSPRHDGRESFESEEEKDRDTDSNSEDSGNPSTTRFTGYGSVNQTVTVKPPVQIASLGNENGNLLEDPLNSPKYQHISFMPTLHCVMHNGAQKSEVVVPAPKPADGKTIGMLVPSPVAISAIRESANSTPVGILGPTACTGESEKHLELLASPLPIPSTFLPHSSTPALHLTVQRLKLPPPQGSSESCTVNIPQQPPGSLSIASPNTAFIPIHNPGSFPGSPVATTDPITKSASQVVGLNQMVPQIEGNTGTVPQPTNVKVVLPAAGLSAAQPPASYPLPGSPLAAGVLPSQNSSVLSTAATSPQPASAGISQAQATVPPAVPTHTPGPAPSPSPALTHSTAQSDSTSYISAVGNTNANGTVVPPQQMGSGPCGSCGRRCSCGTNGNLQLNSYYYPNPMPGPMYRVPSFFTLPSICNGSYLNQAHQSNGNQLPFFLPQTPYANGLVHDPVMGSQANYGMQQMAGFGRFYPVYPAPNVVANTSGSGPKKNGNVSCYNCGVSGHYAQDCKQSSMEANQQGTYRLRYAPPLPPSNDTLDSAD

SEQ ID NO: 5004 - protein, 136 aa, Homo sapiens
MPGKKARKNAQPSPARAPAGPAGTAGTARDQAGFAIGMQLRFTRGKKLLSSSLSSSPLALPRGHEEQVQVAGSRVCYSTQEIWRQTELPAETSESDIQTLLLRNLTASKTCMRGLLQKSFLRRCTFHQFEERLHCN

SEQ ID NO: 5005 - protein, 292 aa, Homo sapiens
MKATVLMRQPGRVQEIVGALRKGGGDRLQVISDFDMTLSRFAYNGKRCPSSYNILDNSKIISEECRKELTALLHHYYPIEIDPHRTVKEKLPHMVEWWTKAHNLLCQQKIQKFQIAQVVRESNAMLREGYKTFFNTLYHNNIPLFIFSAGIGDILEEIIRQMKVFHPNIHIVSNYMDFNEDGFLQGFKGQLIHTYNKNSSACENSGYFQQLEGKTNVILLGDSIGDLTMADGVPGVQNILKIGFLNDKVEERRERYMDSYDIVLEKDETLDVVNGLLQHILCQGVQLEMQGP

SEQ ID NO: 5006 - protein, 669 aa, Homo sapiens
MDLRTAVYNAARDGKLQLLQKLLSGRSREELDELTGEVAGGGTPLLIAARYGHLDVVEYLVDRCGASVEAGGSVHFDGETIEGAPPLWAASAAGHLDVVRSLLRRGASVNRTTRTNSTPLRAACFDGHLEVVRYLVGEHQADLEVANRHGHTCLMISCYKGHREIARYLLEQGAQVNRRSAKGNTALHDCAESGSLEILQLLLGCKARMERDGYGMTPLLAASVTGHTNIVEYLIQEQPGQEQVAGGEAQPGLPQEDPSTSQGCAQPQGAPCCSSSPEEPLNGESYESCCPTSREAAVEALELLGATYVDKKRDLLGALKHWRRAMELRHQGGEYLPKPEPPQLVLAYDYSREVNTTEELEALITDPDEMRMQALLIRERILGPSHPDTSYYIRYRGAVYADSGNFERCIRLWKYALDMQQSNLEPLSPMTASSFLSFAELFSYVLQDRAAKGSLGTQIGFADLMGVLTKGVREVERALQLPREPGDSAQFTKALAIILHLLYLLEKVECTPSQEHLKHQTVYRLLKCAPRGKNGFTPLHMAVDKDTTNVGRYPVGRFPSLHVVKVLLDCGADPDSRDFDNNTPLHIAAQNNCPAIMNALIEAGAHMDATNAFKKTAYELLDEKLLARGTMQPFNYVTLQCLAARALDKNKIPYKGFIPEDLEAFIELH

SEQ ID NO: 5007 - protein, 239 aa, Homo sapiens
MAATLLAARGAGPAPAWGPEAFTPDWESREVSTGTTIMAVQFDGGVVLGADSRTTTGSYIANRVTDKLTPIHDRIFCCRSGSAADTQAVADAVTYQLGFHSIELNEPPLVHTAASLFKEMCYRYREDLMAGIIIAGWDPQEGGQVYSVPMGGMMVRQSFAIGGSGSSYIYGYVDATYREGMTKEECLQFTANALALAMERDGSSGGVIRLAAIAESGVERQVLLGDQIPKFAVATLPPA

SEQ ID NO: 5008 - protein, 460 aa, Homo sapiens
MNFSEVFKLSSLLCKFSPDGKYLASCVQYRLVVRDVNTLQILQLYTCLDQIQHIEWSADSLFILCAMYKRGLVQVWSLEQPEWHCKIDEGSAGLVASCWSPDGRHILNTTEFHLRITVWSLCTKSVSYIKYPKACLQGITFTRDGRYMALAERRDCKDYVSIFVCSDWQLLRHFDTDTQDLTGIEWAPNGCVLAVWDTCLEYKILLYSLDGRLLSTYSAYEWSLGIKSVAWSPSSQFLAVGSYDGKVRILNHVTWKMITEFGHPAAINDPKIVVYKEAEKSPQLGLGCLSFPPPRAGAGPLPSSESKYEIASVPVSLQTLKPVTDRANPKIGIGMLAFSPDSYFLATRNDNIPNAVWVWDIQKLRLFAVLEQLSPVRAFQWDPQQPRLAICTGGSRLYLWSPAGCMSVQVPGEGDFAVLSLCWHLSGDSMALLSKDHFCLCFLETEAVVGTACRQLGGHT

SEQ ID NO: 5009 - protein, 93 aa, Homo sapiens
MSGLRVYSTSVTGSREIKSQQSEVTRILDGKRIQYQLVDISQDNALRDEMRALAGNPKATPPQIVNGDQYCGDYELFVEAVEQNTLQEFLKLA

SEQ ID NO: 5010 - protein, 639 aa, Homo sapiens
MNLEKLSKPELLTLFSILEGELEARDLVIEALKAQHRDTFIEERYGKYNISDPLMALQRDFETLKEKNDGEKQPVCTNPLSILKVVMKQCKNMQERMLSQLAAAESRHRKVILDLEEERQRHAQDTAEGDDVTYMLEKERERLTQQLEFEKSQVKKFEKEQKKLSSQLEEERSRHKQLSSMLVLECKKATNKAAEEGQKAGELSLKLEKEKSRVSKLEEELAAERKRGLQTEAQVEKQLSEFDIEREQLRAKLNREENRTKTLKEEMESLKKIVKDLEASHQHSSPNEQLKKPVTVSKGTATEPLMLMSVFCQTESFPAERTHGSNIAKMTNTGLPGPATPAYSYAKTNGHCDPEIQTTRELTAGNNVENQVPPREKSVALAQEKPVENGGCPVGIETPVPMPSPLSSSGSSLSPSSTASSSLTSSPCSSPVLTKRLLGSSASSPGYQSSYQVGINQRFHAARHKFQSQADQDQQASGLQSPPSRDLSPTLIDNSAAKQLARNTVTQVLSRFTSQQGPIKPVSPNSSPFGTDYRNLANTANPRGDTSHSPTPGKVSSPLSPLSPGIKSPTIPRAERGNPPPIPPKKPGLTPSPSATTPLTKTHSQAASLTTAEDLASSCSSNTVVANGKDVELLLPTSS

SEQ ID NO: 5011 - protein, 828 aa, Homo sapiens
MRFLEARSLAVAMGDTVVEPAPLKPTSEPTSGPPGNNGGSLLSVITEGVGELSVIDPEVAQKACQEVLEKVKLLHGGVAVSSRGTPLELVNGDGVDSEIRCLDDPPAQIREEEDEMGAAVASGTAKGARRRRQNNSAKQSWLLRLFESKLFDISMAISYLYNSKEPGVQAYIGNRLFCFRNEDVDFYLPQLLNMYIHMDEDVGDAIKPYIVHRCRQSINFSLQCALLLGAYSSDMHISTQRHSRGTKLRKLILSDELKPAHRKRELPSLSPAPDTGLSPSKRTHQRSKSDATASISLSSNLKRTASNPKVENEDEELSSSTESIDNSFSSPVRLAPEREFIKSLMAIGKRLATLPTKEQKTQRLISELSLLNHKLPARVWLPTAGFDHHVVRVPHTQAVVLNSKDKAPYLIYVEVLECENFDTTSVPARIPENRIRSTRSVENLPECGITHEQRAGSFSTVPNYDNDDEAWSVDDIGELQVELPEVHTNSCDNISQFSVDSITSQESKEPVFIAAGDIRRRLSEQLAHTPTAFKRDPEDPSAVALKEPWQEKVRRIREGSPYGHLPNWRLLSVIVKCGDDLRQELLAFQVLKQLQSIWEQERVPLWIKPYKILVISADSGMIEPVVNAVSIHQVKKQSQLSLLDYFLQEHGSYTTEAFLSAQRNFVQSCAGYCLVCYLLQVKDRHNGNILLDAEGHIIHIDFGFILSSSPRNLGFETSAFKLTTEFVDVMGGLDGDMFNYYKMLMLQGLIAARKHMDKVVQIVEIMQQGSQLPCFHGSSTIRNLKERFHMSMTEEQLQLLVEQMVDGSMRSITTKLYDGFQYLTNGIM

SEQ ID NO: 5012 - protein, 1409 aa, Homo sapiens
MADTDLFMECEEEELEPWQKISDVIEDSVVEDYNSVDKTTTVSVSQQPVSAPVPIAAHASVAGHLSTSTTVSSSGAQNSDSTKKTLVTLIANNNAGNPLVQQGGQPLILTQNPAPGLGTMVTQPVLRPVQVMQNANHVTSSPVASQPIFITTQGFPVRNVRPVQNAMNQVGIVLNVQQGQTVRPITLVPAPGTQFVKPTVGVPQVFSQMTPVRPGSTMPVRPTTNTFTTVIPATLTIRSTVPQSQSQQTKSTPSTSTTPTATQPTSLGQLAVQSPGQSNQTTNPKLAPSFPSPPAVSIASFVTVKRPGVTGENSNEVAKLVNTLNTIPSLGQSPGPVVVSNNSSAHGSQRTSGPESSMKVTSSIPVFDLQDGGRKICPRCNAQFRVTEALRGHMCYCCPEMVEYQKKGKSLDSEPSVPSAAKPPSPEKTAPVASTPSSTPIPALSPPTKVPEPNENVGDAVQTKLIMLVDDFYYGRDGGKVAQLTNFPKVATSFRCPHCTKRLKNNIRFMNHMKHHVELDQQNGEVDGHTICQHCYRQFSTPFQLQCHLENVHSPYESTTKCKICEWAFESEPLFLQHMKDTHKPGEMPYVCQVCQYRSSLYSEVDVHFRMIHEDTRHLLCPYCLKVFKNGNAFQQHYMRHQKRNVYHCNKCRLQFLFAKDKIEHKLQHHKTFRKPKQLEGLKPGTKVTIRASRGQAAVPVSSNDTPPSALQEAAPLTSSMDPLPVFLYPPVQRSIQKRAVRKMSVMGRQTCLECSFEIPDFPNHFPTYVHCSLCRYSTCCSRAYANHMINNHVPRKSPKYLALFKNSVSGIKLACTSCTFVTSVGDAMAKHLVFNPSHRSSSILPRGLTWIAHSRHGQTRDRVHDRNVKNMYPPPSFPTNKAATVKSAGATPAEPEELLTPLAPALPSPASTATPPPTPTHPQALALPPLATEGAECLNVDDQDEGSPVTQEPELASGGGGSGGVGKKEQLSVKKLRVVLFALCCNTEQAAEHFRNPQRRIRRWLRRFQASQGENLEGKYLSFEAEEKLAEWVLTQREQQLPVNEETLFQKATKIGRSLEGGFKISYEWAVRFMLRHHLTPHARRAVAHTLPKDVAENAGLFIDFVQRQIHNQDLPLSMIVAIDEISLFLDTEVLSSDDRKENALQTVGTGEPWCDVVLAILADGTVLPTLVFYRGQMDQPANMPDSILLEAKESGYSDDEIMELWSTRVWQKHTACQRSKGMLVMDCHRTHLSEEVLAMLSASSTLPAVVPAGCSSKIQPLDVCIKRTVKNFLHKKWKEQAREMADTACDSDVLLQLVLVWLGEVLGVIGDCPELVQRSFLVASVLPGPDGNINSPTRNADMQEELIASLEEQLKLSGEHSESSTPRPRSSPEETIEPESLHQLFEGESETESFYGFEEADLDLMEI

SEQ ID NO: 5013 - protein, 495 aa, Homo sapiens
MPQLLQNINGIIEAFRRYARTEGNCTALTRGELKRLLEQEFADVIVKPHDPATVDEVLRLLDEDHTGTVEFKEFLVLVFKVAQACFKTLSESAEGACGSQESGSLHSGASQELGEGQRSGTEVGRAGKGQHYEGSSHRQSQQGSRGQNRPGVQTQGQATGSAWVSSYDRQAESQSQERISPQIQLSGQTEQTQKAGEGKRNQTTEMRPERQPQTREQDRAHQTGETVTGSGTQTQAGATQTVEQDSSHQTGRTSKQTQEATNDQNRGTETHGQGRSQTSQAVTGGHAQIQAGTHTQTPTQTVEQDSSHQTGSTSTQTQESTNGQNRGTEIHGQGRSQTSQAVTGGHTQIQAGSHTETVEQDRSQTVSHGGAREQGQTQTQPGSGQRWMQVSNPEAGETVPGGQAQTGASTESGRQEWSSTHPRRCVTEGQGDRQPTVVGEEWVDDHSRETVILRLDQGNLHTSVSSAQGQDAAQSEEKRGITARELYSYLRSTKP

SEQ ID NO: 5014 - protein, 410 aa, Homo sapiens
MNMPSTPLAPTTGTATCSWSASTCTTTRPAVRPPSFPHRPPGNAALPSLMPSRPTQVAGQCGAGNNWAKGHYTEGAELMESVMDVVRKEAESCDCLQGFQLTHSLGGGTGSGMGTLLLSKIREEYPDRIINTFSILPSPKVSDTVVEPYNATLSVHQLIENADETFCIDNEALYDICSKTLKLPTPTYGDLNHLVSATMSGVTTCLRFPGQLNADLRKLAVNMVPFPRLHFFMPGFAPLTSRGSQQYRALTVAELTQQMFDAKNMMAACDPRHGRYLTAAAIFRGRMPMREVDEQMFNIQDKNSSYFADWLPNNVKTAVCDIPPRGLKMSATFIGNNTAIQELFKRVSEQFTAMFRRKAFLHWYTGEGMDEMEFTEAESNMNDLVSEYQQYQDATAEEEEDEEYAEEEVA

SEQ ID NO: 5015 - protein, 700 aa, Homo sapiens
MGSAADVRFSLGTTTHAPPGVHRRYSALREESAKDWETSPLPGMLAPAAGPAFDSDPEISDVDEDEPGGLVGSADVVSPSGHSDAQTLAMMLQEQLDAINEEIRMIQEEKESTELRAEEIETRVTSGSMEALNLKQLRKRGSIPTSLTALSLASASPPLSGRSTPKLTSRSAAQDLDRMGVMTLPSDLRKHRRKLLSPVSREENREDKATIKCETSPPSSAALRLEKLGHPALSQEEGKSALEDQGSNPSSSNSSQDSLHKGAKRKGIKSSIGRLFGKKEKGRLIQLSRDGATGHVLLTDSEFSMQEPMVPAKLGTQAEKDRRLKKKHQLLEDARRKGMPFAQWDGPTVVSWLELWVGMPAWYVAACRANVKSGAIMSALSDTEIQREIGISNALHRLKLRLAIQEMVSLTSPSAPPTSRTSSGNVWVTHEEMETLETSTKTDSEEGSWAQTLAYGDMNHEWIGNEWLPSLGLPQYRSYFMECLVDARMLDHLTKKDLRVHLKMVDSFHRTSLQYGIMCLKRLNYDRKELEKRREESQHEIKDVLVWTNDQVVHWVQSIGLRDYAGNLHESGVHGALLALDENFDHNTLALILQIPTQNTQARQVMEREFNNLLALGTDRKLDDGDDKVFRRAPSWRKRFRPREHHGRGGMLSASAETLPAGFRVSTLGTLQPPPAPPKKIMPEAHSHYLYGHMLSAFRD

SEQ ID NO: 5016 - protein, 342 aa, Homo sapiens
MASVTRAVFGELPSGGGTVEKFQLQSDLLRVDIISWGCTITALEVKDRQGRASDVVLGFAELEGYLQKQPYFGAVIGRVANRIAKGTFKVDGKEYHLAINKEPNSLHGGVRGFDKVLWTPRVLSNGVQFSRISPDGEEGYPGELKVWVTYTLDGGELIVNYRAQASQATPVNLTNHSYFNLAGQASPNINDHEVTIEADTYLPVDETLIPTGEVAPVQGTAFDLRKPVELGKHLQDFHLNGFDHNFCLKGSKEKHFCARVHHAASGRVLEVYTTQPGVQFYTGNFLDGTLKGKNGAVYPKHSGFCLETQNWPDAVNQPRFPPVLLRPGEEYDHTTWFKFSVA

SEQ ID NO: 5017 - protein, 764 aa, Homo sapiens
MSDTRRRVKVYTLNEDRQWDDRGTGHVSSTYVEELKGMSLLVRAESDGSLLLESKINPNTAYQKQQDTLIVWSEAENYDLALSFQEKAGCDEIWEKICQVQGKDPSVEVTQDLIDESEEERFEEMPETSHLIDLPTCELNKLEEIADLVTSVLSSPIRREKLALALENEGYIKKLLQLFQACENLENTEGLHHLYEIIRGILFLNKATLFEVMFSDECIMDVVGCLEYDPALAQPKRHREFLTKTAKFKEVIPITDSELRQKIHQTYRVQYIQDIILPTPSVFEENFLSTLTSFIFFNKVEIVSMLQEDEKFLSEVFAQLTDEATDDDKRRELVNFFKEFCAFSQTLQPQNRDAFFKTLAKLGILPALEIVMGMDDLQVRSAATDIFSYLVEFSPSMVREFVMQEAQQSDDDILLINVVIEQMICDTDPELGGAVQLMGLLRTLIDPENMLATTNKTEKSEFLNFFYNHCMHVLTAPLLTNTSEDKCEKDNIVGSNKNNTICPGALRFMRRIIGLKDEFYNRYITKGNLFEPVINALLDNGTRYNLLNSAVIELFEFIRVEDIKSLTAHIVENFYKALESIEYVQTFKGLKTKYEQEKDRQNQKLNSVPSILRSNRFRRDAKALEEDEEMWFNEDEEEEGKAVVAPVEKPKPEDDFPDNYEKFMETKKAKESEDKENLPKRTSPGGFKFTFSHSASAANGTNSKSVVAQIPPATSNGSSSKTTNLPTSVTATKGSLVGLVDYPDDEEEDEEEESSPRKRPRLGS

SEQ ID NO: 5018 - protein, 76 aa, Homo sapiens
MSKAHPPELKKFMDKKLSLKLNGGRHVQGILRGFDPFMNLVIDECVEMATSGQQNNIGMVVIRGNSIIMLEALERV

SEQ ID NO: 5019 - protein, 175 aa, Homo sapiens
MQLTHQLDLFPECRVTLLLFKDVKNAGDLRRKAMEGTIDGSLINPTVIVDPFQILVAANKAVHLYKLGKMKTRTLSTEIIFNLSPNNNISEALKKFGISANDTSILIVYIEEGEKQINQEYLISQVEGHQVSLKNLPEIMNITEVKKIYKLSSQEESIGTLLDAIICRMSTKDVL

SEQ ID NO: 5020 - protein, 302 aa, Homo sapiens
MALHDMEDFTFDGTKRLSVNYVKGILQPTDTCDIWDKIWNFQAKPDDLLISTYPKAGTTWTQEIVELIQNEGDVEKSKRAPTHQRFPFLEMKIPSLGSGLEQAHAMPSPRILKTHLPFHLLPPSLLEKNCKIIYVARNPKDNMVSYYHFQRMNKALPAPGTWEEYFETFLAGKVCWGSWHEHVKGWWEAKDKHRILYLFYEDMKKNPKHEIQKLAEFIGKKLDDKVLDKIVHYTSFDVMKQNPMANYSSIPAEIMDHSISPFMRKGAVGDWKKHFTVAQNERFDEDYKKKMTDTRLTFHFQF

SEQ ID NO: 5021 - protein, 963 aa, Homo sapiens
MWCLHCNSERTQSLLELELDSGVEGEAPSSETGTSLDSPSAYPQGPLVPGSSLSPDHYEHTSVGAYGLYSGPPGQQQRTRRPKLQHSTSILRKQAEEEAIKRSRSLSESYELSSDLQDKQVEMLERKYGGRLVTRHAARTIQTAFRQYQMNKNFERLRSSMSENRMSRRIVLSNMRMQFSFEGPEKVHSSYFEGKQVSVTNDGSQLGALVSPECGDLSEPTTLKSPAPSSDFADAITELEDAFSRQVKSLAESIDDALNCRSLHTEEAPALDAARARDTEPQTALHGMDHRKLDEMTASYSDVTLYIDEEELSPPLPLSQAGDRPSSTESDLRLRAGGAAPDYWALAHKEDKADTDTSCRSTPSLERQEQRLRVEHLPLLTIEPPSDSSVDLSDRSERGSLKRQSAYERSLGGQQGSPKHGPHSGAPKSLPREEPELRPRPPRPLDSHLAINGSANRQSKSESDYSDGDNDSINSTSNSNDTINCSSESSSRDSLREQTLSKQTYHKEARNSWDSPAFSNDVIRKRHYRIGLNLFNKKPEKGVQYLIERGFVPDTPVGVAHFLLQRKGLSRQMIGEFLGNRQKQFNRDVLDCVVDEMDFSTMELDEALRKFQAHIRVQGEAQKVERLIEAFSQRYCICNPGVVRQFRNPDTIFILAFAIILLNTDMYSPNVKPERKMKLEDFIKNLRGVDDGEDIPREMLMGIYERIRKRELKTNEDHVSQVQKVEKLIVGKKPIGSLHPGLGCVLSLPHRRLVCYCRLFEVPDPNKPQKLGLHQREIFLFNDLLVVTKIFQKKKNSVTYSFRQSFSLYGMQVLLFENQYYPNGIRLTSSVPGADIKVLINFNAPNPQDRKKFTDDLRESIAEVQEMEKHRIESELEKQKGVVRPSMSQCSSLKKESGNGTLSRACLDDSYASGEGLKRSALSSSLRDLSEAGKRGRRSSAGSLESNVEFQPFEPLQPSVLCS

SEQ ID NO: 5022 - protein, 236 aa, Homo sapiens
MASLDRVKVLVLGDSGVGKSSLVHLLCQNQVLGNPSWTVGCSVDVRVHDYKEGTPEEKTYYIELWDVGGSVGSASSVKSTRAVFYNSVNGIIFVHDLTNKKSSQNLRRWSLEALNRDLVPTGVLVTNGDYDQEQFADNQIPLLVIGTKLDQIHETKRHEVLTRTAFLAEDFNPEEINLDCTNPRYLAAGSSNAVKLSRFFDKVIEKRYFLREGNQIPGFPDRKRFGAGTLKSLHYD

SEQ ID NO: 5023 - protein, 927 aa, Homo sapiens
MQSILYHGLIRDQACRRQTDYWQFVKDIRWLSPHSALHVEKFISVHENDQSSADGASERAVAELWLQHSLQYHCLSAQLRPLLGDRQYIRKFYTDAAFLLSDAHVTAMLQCLEAVEQNNPRLLAQIDASMFARKHESPLLVTKSQSLTALPSSTYTPPNSYAQHSYFGSFSSLHQSVPNNGSERRSTSFPLSGPPRKPQESRGHVSPAEDQTIQAPPVSVSALARDSPLTPNEMSSSTLTSPIEASWVSSQNDSPGDASEGPEYLAIGNLDPRGRTASCQSHSSNAESSSSNLFSSSSSQKPDSAASSLGDQEGGGESQLSSVLRRSSFSEGQTLTVTSGAKKSHIRSHSDTSIASRGAPGGPRNITIIVEDPIAESCNDKAKLRGPLPYSGQSSEVSTPSSLYMEYEGGRYLCSGEGMFRRPSEGQSLISYLSEQDFGSCADLEKENAHFSISESLIAAIELMKCNMMSQCLEEEEVEEEDSDREIQELKQKIRLRRQQIRTKNLLPMYQEAEHGSFRVTSSSSQFSSRDSAQLSDSGSADEVDEFEIQDADIRRNTASSSKSFVSSQSFSHCFLHSTSAEAVAMGLLKQFEGMQLPAASELEWLVPEHDAPQKLLPIPDSLPISPDDGQHADIYKLRIRVRGNLEWAPPRPQIIFNVHPAPTRKIAVAKQNYRCAGCGIRTDPDYIKRLRYCEYLGKYFCQCCHENAQMAIPSRVLRKWDFSKYYVSNFSKDLLIKIWNDPLFNVQDINSALYRKVKLLNQVRLLRVQLCHMKNMFKTCRLAKELLDSFDTVPGHLTEDLHLYSLNDLTATRKGELGPRLAELTRAGATHVERCMLCQAKGFICEFCQNEDDIIFPFELHKCRTCEECKACYHKACFKSGSCPRCERLQARREALARQSLESYLSDYEEEPAEALALEAAVLEAT

SEQ ID NO: 5024 - protein, 99 aa, Homo sapiens
MASASARGNQDKDAHFPPPSKQSLLFCPKSKLHIHRAEISKIMRECQEESFWKRALPFSLVSMLVTQGLVYQGYLAANSRFGSLPKVARTASLPVRNAK

SEQ ID NO: 5025 - protein, 261 aa, Homo sapiens
MVVLSVPAEVTVILLDIEGTTTPIAFVKDILFPYIEENVKEYLQTHWEEEECQQDVSLLRKQAEEDAHLDGAVPIPAASGNGVDDLQQMIQAVVDNVCWQMSLDRKTTALKQLQGHMWRAAFTAGRMKAEFFADVVPAVRKWREAGMKVYIYSSGSVEAQKLLFGHSTEGDILELVDGHFDTKIGHKVESESYRKIADSIGCSTNNILFLTDVTREASAAEEADVHVAVVVRPGNAGLTDDEKTYYSLITSFSELYLPSST

SEQ ID NO: 5026 - protein, 395 aa, Homo sapiens
MAEDGLPKIYSHPPTESSKTPTAATIFFGADNAIPKSETTITSEGDHVTSVNEYMLESDFSTTTDNKLTAKKEKLKSEDDMGTDFIKSTTHLQKEITSLTGTTNSITRDSITEHFMPVKIGNISSPVTTVSLIDFSTDIAKEDILLATIDTGDAEISITSEVSGTLKDSSAGVADAPAFPRKKDEADMSNYNSSIKSNVPADEAVQVTDSTIPEAEIPPAPEESFTTIPDITALEEEKITEIDLSVLEDDTSAVATLTDSDEKFITVFELTTSAEKDKDKREDTLLTDEETTEGASIWMERDTANEAETHSVLLTAVESRYDFVVPASIATNLVEESSTEEDLSETDNTETVPKITEPFSGTTSVLDTPDYKEDTSTTETDIFELLKEEPDEFMI

SEQ ID NO: 5027 - protein, 306 aa, Homo sapiens
MYFCWGADSRELQRRRTAGSPGAELLQAASGERHSLLLLTNHRVLSCGDNSRGQLGRRGAQRGELPEPIQALETLIVDLVSCGKEHSLAVCHKGRVFAWGAGSEGQLGIGEFKEISFTPKKIMTLNDIKIIQVSCGHYHSLALSKDSQVFSWGKNSHGQLGLGKEFPSQASPQRVRSLEGIPLAQVAAGGAHSFALSLCGTSFGWGSNSAGQLALSGRNVPVQSNKPLSVGALKNLGVVYISCGDAHTAVLTQDGKVFTFGDNRSGQLGYSPTPEKRGPQLVERIDGLVSQIDCGRNSKHGFMTFF

SEQ ID NO: 5028 - protein, 302 aa, Homo sapiens
MGNCCWTQCFGLLRKEAGRLQRVGGGGGSKYFRTCSRGEHLTIEFENLVESDEGESPGSSHRPLTEEEIVDLRERHYDSIAEKQKDLDKKIQKELALQEEKLRLEEEALYAAQREAARAAKQRKLLEQERQRIVQQYHPSNNGEYQSSGPEDDFESCLRNMKSQYEVFRSSRLSSDATVLTPNTESSCDLMTKTKSTSGNDDSTSLDLEWEDEEGMNRMLPMRERSKTEEDILRAALKYSNKKTGSNPTSASDDSNGLEWENDFVSAEMDDNGNSEYSGFVNPVLELSDSGIRHSDTDQQTR

SEQ ID NO: 5029 - protein, 546 aa, Homo sapiens
MATLVVNKLGAGVDSGRQGSRGTAVVKVLECGVCEDVFSLQGDKVPRLLLCGHTVCHDCLTRLPLHGRAIRCPFDRQVTDLGDSGVWGLKKNFALLELLERLQNGPIGQYGAAEESIGISGESIIRCDEDEAHLASVYCTVCATHLCSECSQVTHSTKTLAKHRRVPLADKPHEKTMCSQHQVHAIEFVCLEEGCQTSPLMCCVCKEYGKHQGHKHSVLEPEANQIRASILDMAHCIRTFTEEISDYSRKLVGIVQHIEGGEQIVEDGIGMAHTEHVPGTAENARSCIRAYFYDLHETLCRQEEMALSVVDAHVREKLIWLRQQQEDMTILLSEVSAACLHCEKTLQQDDCRVVLAKQEITRLLETLQKQQQQFTEVADHIQLDASIPVTFTKDNRVHIGPKMEIRVVTLGLDGAGKTTILFKLKQDEFMQPIPTIGFNVETVEYKNLKFTIWDVGGKHKLRPLWKHYYLNTQAVVFVVDSSHRDRISEAHSELAKLLTEKELRDALLLIFANKQDVAGALSVEEITELLSLHKLCCGRSCFSDNM

SEQ ID NO: 5030 - protein, 202 aa, Homo sapiens
MAVPAALILRESPSMKKAVSLINAIDTGRFPRLLTRILQKLHLKAESSFSEEEEEKLQAAFSLEKQDLHLVLETISFILEQAVYHNVKPAALQQQLENIHLRQDKAEAFVNTWSSMGQETVEKFRQRILAPCKLETVGWQLNLQMAHSAQAKLKSPQAVLQLGVNNEDSKSLEKVLVEFSHKELFDFYNKLETIQAQLDSLT

SEQ ID NO: 5031 - protein, 506 aa, Homo sapiens
MEADIITNLRCRLKEAEEERLKAAQYGLQLVESQNELQNQLDKCRNEMMTMTESYEQEKYTLQREVELKSRMLESLSCECEAIKQQQKMHLEKLEEQLSRSHGQEVNELKTKIEKLKVELDEARLSEKQLKHQVDHQKELLSCKSEELRVMSERVQESMSSEMLALQIELTEMESMKVKYQSLKKQNVFNREQMQRMKLQIATLLQMKGSQTEFEQQERLLAMLEQKNGEIKHLLGEIRNLEKFKNLYDSMESKPSVDSGTLEDNTYYTDLLQMKLDNLNKEIESTKGELSIQRMKALFESQRALDIERKLFANERCLQLSESENMKLRAKLDELKLKYEPEETVEVPVLKKRREVLPVDITTAKDACVNNSALGGEVYRLPPQKEETQSCPNSLEDNNLQLEKSVSIYTPVVSLSPHKNLPVDMQLKKEKKCVKLIGVPADAEALSERSGNTPNSPRLAAESKLQTEVKEGKETSSKLEKETCKKLHPILYVSSKSTPETQCPQQ

SEQ ID NO: 5032 - protein, 613 aa, Homo sapiens
MATIPDWKLQLLARRRQEEASVRGREKAERERLSQMPAWKRGLLERRRAKLGLSPGEPSPVLGTVEAGPPDPDESAVLLEAIGPVHQNRFIRQERQQQQQQQQRSEELLAERKPGPLEARERRPSPGEMRDQSPKGRESREERLSPRETRERRLGIGGAQELSLRPLEARDWRQSPGEVGDRSSRLSEAWKWRLSPGETPERSLRLAESREQSPRRKEVESRLSPGESAYQKLGLTEAHKWRPDSRESQEQSLVQLEATEWRLRSGEERQDYSEECGRKEEWPVPGVAPKETAELSETLTREAQGNSSAGVEAAEQRPVEDGERGMKPTEGWKWTLNSGKAREWTPRDIEAQTQKPEPPESAEKLLESPGVEAGEGEAEKEEAGAQGRPLRALQNCCSVPSPLPPEDAGTGGLRQQEEEAVELQPPPPAPLSPPPPAPTAPQPPGDPLMSRLFYGVKAGPGVGAPRRSGHTFTVNPRRSVPPATPATPTSPATVDAAVPGAGKKRYPTAEEILVLGGYLRLSRSCLAKGSPERHHKQLKISFSETALETTYQYPSESSVLEELGPEPEVPSAPNPPAAQPDDEEDEEELLLLQPELQGGLRTKALIVDESCRR

SEQ ID NO: 5033 - protein, 216 aa, Homo sapiens
MSWTCPRCQQPVFFAEKVSSLGKNWHRFCLKCERCHSILSPGGHAEHNGRPYCHKPCYGALFGPRGVNIGGVGSYLYNPPTPSPGCTTPLSPSSFSPPRAAGLPQGKKSPPHMKTFTGETSLCPGCGEPVYFAEKVMSLGRNWHRPCLRCQRCHKTLTAGSHAEHDGVPYCHVPCYGYLFGPKGGQPHPRHWDGMYMPEVWHVHGLWVCVDNFPCG

SEQ ID NO: 5034 - protein, 500 aa, Homo sapiens
MNQRRSESRPGNHRLQAYAEPGKGDSGGAGPLSGSARRGRGGGGAIRVRRPCWSGGAGRGGGPAWAVRLPTVTAGWTWPALRTLSSLRAGPSEPHSPGRRPPRAGRPLCQADPQPGKAARRSLEPDPAQTGPRPARAAGMSEARKGPDEAEESQYDSGIESLRSLRSLPESTSAPASGPSDGSPQPCTHPPGPVKEPQEKEDADGERADSTYGSSSLTYTLSLLGGPEAEDPAPRLPLPHVGALSPQQLEALTYISEDGDTLVHLAVIHEAPAVLLCCLALLPQEVLDIQNNLYQTALHLAVHLDQPGAVRALVLKGASRALQDRHGDTALHVACQRQHLACARCLLEGRPEPGRGTSHSLDLQLQNWQGLACLHIATLQKNQPLMELLLRNGADIDVQEGTSGKTALHLAVETQERGLVQFLLQAGAQVDARMLNGCTPLHLAAGRGLMGISSTLCKAGADSLLRNVEDETPQDLTEESLVLLPFDDLKISGKLLLCTD

SEQ ID NO: 5035 - protein, 626 aa, Homo sapiens
MEGPRENQDPPPRSLARHLSDADRLRKVIQELVDTEKSYVKDLSCLFELYLEPLQNETFLTQDEMESLFGSLPEMLEFQKVFLETLEDGISASSDFNTLETPSQFRKLLFSLGGSFLYYADHFKLYSGFCANHIKVQKVLERAKTDKAFKAFLDARNPTKQHSSTLESYLIKPVQRVLKYPLLLKELVSLTDQESEEHYHLTEALKAMEKVASHINEMQKIYEDYGTVFDQLVAEQSGTEKEVTELSMGELLMHSTVSWLNPFLSLGKARKDLELTVFVFKRAVILVYKENCKLKKKLPSNSRPAHNSTDLDPFKFRWLIPISALQVRLGNPAGTENNSIWELIHTKSEIEGRPETIFQLCCSDSESKTNIVKVIRSILRENFRRHIKCELPLEKTCKDRLVPLKNRVPVSAKLASSRSLKVLKNSSSNEWTGETGKGTLLDSDEGSLSSGTQSSGCPTAEGRQDSKSTSPGKYPHPGLADFADNLIKESDILSDEDDDHRQTVKQGSPTKDIEIQFQRLRISEDPDVHPEAEQQPGPESGEGQKGGEQPKLVRGHFCPIKRKANSTKRDRGTLLKAQIRHQSLDSQSENATIDLNSVLEREFSVQSLTSVVSEECFYETESHGKS

SEQ ID NO: 5036 - protein, 531 aa, Homo sapiens
MAAVKTLNPKAEVARAQAALAVNISAARGLQDVLRTNLGPKGTMKMLVSGAGDIKLTKDGNVLLHEMQIQHPTASLIAKVATAQDDITGDGTTSNVLIIGELLKQADLYISEGLHPRIITEGFEAAKEKALQFLEEVKVSREMDRETLIDVARTSLRTKVHAELADVLTEAVVDSILAIKKQDEPIDLFMIEIMEMKHKSETDTSLIRGLVLDHGARHPDMKKRVEDAYILTCNVSLEYEKTEVNSGFFYKSAEEREKLVKAERKFIEDRVKKIIELKRKVCGDSDKGFVVINQKGIDPFSLDALSKEGIVALRRAKRRNMERLTLACGGVALNSFDDLSPDCLGHAGLVYEYTLGEEKFTFIEKCNNPRSVTLLIKGPNKHTLTQIKDAVRDGLRAVKNAIDDGCVVPGAGAVEVAMAEALIKHKPSVKGRAQLGVQAFADALLIIPKVLAQNSGFDLQETLVKIQAEHSESGQLVGVDLNTGEPMVAAEVGVWDNYCVKKQLLHSCTVIATNILLVDEIMRAGMSSLKG

SEQ ID NO: 5037 - protein, 221 aa, Homo sapiens
MSAFGHDEAWMEAGGFGLEAAERTEYQSLCKSKLLFLGEQSGKTSIISRFMYNSFGCACQATVGIDFLSKTMYLEDQIVQLQLWDTAGQERFHSLIPSYIRDSTIAVVVYDITNINSFKETDKWVEHVRAERGDDVVIMLLGNKIDLDNKRQVTAEQGEEKSRNLNVMFIETSAKTGYNVKKLFRRVASALLSTRTSPPPKEGTVEIELESFEESGNRSYC

SEQ ID NO: 5038 - protein, 2077 aa, Homo sapiens
MAEVRKFTKRLSKPGTAAELRQSVSEAVRGSVVLEKAKVVEPLDYENVIAQRKTQIYSDPLRDLLMFPMEDISISVIGRQRRTVQSTVPEDAEKRAQSLFVKECIKTYSTDWHVVNYKYEDFSGDFRMLPCKSLRPEKIPNHVFEIDEDCEKDEDSSSLCSQKGGVIKQGWLHKANVNSTITVTMKVFKRRYFYLTQLPDGSYILNSYKDEKNSKESKGCIYLDACIDVVQCPKMRRHAFELKMLDKYSHYLAAETEQEMEEWLITLKKIIQINTDSLVQEKKETVETAQDDETSSQGKAENIMASLERSMHPELMKYGRETEQLNKLSRGDGRQNLFSFDSEVQRLDFSGIEPDIKPFEEKCNKRFLVNCHDLTFNILGQIGDNAKGPPTNVEPFFINLALFDVKNNCKISADFHVDLNPPSVREMLWGSSTQLASDGSPKGSSPESYIHGIAESQLRYIQQGIFSVTNPHPEIFLVARIEKVLQGNITHCAEPYIKNSDPVKTAQKVHRTAKQVCSRLGQYRMPFAWAARPIFKDTQGSLDLDGRFSPLYKQDSSKLSSEDILKLLSEYKKPEKTKLQIIPGQLNITVECVPVDLSNCITSSYVPLKPFEKNCQNITVEVEEFVPEMTKYCYPFTIYKNHLYVYPLQLKYDSQKTFAKARNIAVCVEFRDSDESDASALKCIYGKPAGSVFTTNAYAVVSHHNQNPEFYDEIKIELPIHLHQKHHLLFTFYHVSCEINTKGTTKKQDTVETPVGFAWVPLLKDGRIITFEQQLPVSANLPPGYLNLNDAESRRQCNVDIKWVDGAKPLLKIKSHLESTIYTQDLHVHKFFHHCQLIQSGSKEVPGELIKYLKCLHAMEIQVMIQFLPVILMQLFRVLTNMTHEDDVPINCTMVLLHIVSKCHEEGLDSYLRSFIKYSFRPEKPSAPQAQLIHETLATTMIAILKQSADFLSINKLLKYSWFFFEIIAKSMATYLLEENKIKLPRGQRFPETYHHVLHSLLLAIIPHVTIRYAEIPDESRNVNYSLASFLKRCLTLMDRGFIFNLINDYISGFSPKDPKVLAEYKFEFLQTICNHEHYIPLNLPMAFAKPKLQRVQDSNLEYSLSDEYCKHHFLVGLLLRETSIALQDNYEIRYTAISVIKNLLIKHAFDTRYQHKNQQAKIAQLYLPFVGLLLENIQRLAGRDTLYSCAAMPNSASRDEFPCGFTSPANRGSLSTDKDTAYGSFQNGHGIKREDSRGSLIPEGATGFPDQGNTGENTRQSSTRSSVSQYNRLDQYEIRSLLMCYLYIVKMISEDTLLTYWNKVSPQELINILILLEVCLFHFRYMGKRNIARVHDAWLSKHFGIDRKSQTMPALRNRSGVMQARLQHLSSLESSFTLNHSSTTTEADIFHQALLEGNTATEVSLTVLDTISFFTQCFKTQLLNNDGHNPLMKKVFDIHLAFLKNGQSEVSLKHVFASLRAFISKFPSAFFKGRVNMCAAFCYEVLKCCTSKISSTRNEASALLYLLMRNNFEYTKRKTFLRTHLQIIIAVSQLIADVALSGGSRFQESLFIINNFANSDRPMKATAFPAEVKDLTKRIRTVLMATAQMKEHEKDPEMLIDLQYSLAKSYASTPELRKTWLDSMAKIHVKNGDFSEAAMCYVHVAALVAEFLHARGSKLFPNGCSAFKKITPNIDEEGAMKEDAGMMDVHYSEEVLLELLEQCVDGLWKAERYEIISEISKLIVPIYEKRREFEKLTQVYRTLHGAYTKILEVMHTKKRLLGTFFRVAFYGQSFFEEEDGKEYIYKEPKLTGLSEISLRLVKLYGEKFGTENVKIIQDSDKVNAKELDPKYAHIQVTYVKPYFDDKELTEARGSTEFERNHNISRFVFEAPYTLSGKKQGCIEEQCKRRTILTTSNSFPYVKKRIPINCEQQINLKPIDVATDEIKDKTAELQKLCSSTDVDMIQLQLKLQGCVSVQVNAGPLAYARAFLNDSQASKYPPKKVSELKDMFRKFIQACSIALELNERLIKEDQVEYHEGLKSNFRDMVKELSDIIHEQILQEDTMHSPWMSNTLHVFCAISGTSSDRGYGSPRYAEV

SEQ ID NO: 5039 - protein, 547 aa, Homo sapiens
MGGCIPFLKAARALCPRIMPPLLLLSAFIFLVSVLGGAPGHNPDRRTKMVSIHSLSELERLKLQETAYHELVARHFLSEFKPDRALPIDRPNTLDKWFLILRGQQRAVSHKTFGISLEEVLVNEFTRRKHLELTATMQVEEATGQAAGRRRGNVVRRVFGRIRRFFSRRRNEPTLPREFTRRGRRGAVSVDSLAELEDGALLLQTLQLSKISFPIGQRLLGSKRKMSLNPIAKQIPQVVEACCQFIEKHGLSAVGIFTLEYSVQRVRQLREEFDQGLDVVLDDNQNVHDVAALLKEFFRDMKDSLLPDDLYMSFLLTATLKPQDQLSALQLLVYLMPPCHSDTLERLLKALHKITENCEDSIGIDGQLVPGNRMTSTNLALVFGSALLKKGKFGKRESRKTKLGIDHYVASVNVVRAMIDNWDVLFQVPPHIQRQVAKRVWKSSPEALDFIRRRNLRKIQSARIKMEEDALLSDPVETSAEARAAVLAQSKPSDEGSSEEPAVPSGTARSHDDEEGAGNPPIPEQDRPLLRVPREKEAKTGVSYFFP

SEQ ID NO: 5040 - protein, 1872 aa, Homo sapiens
MARWIPTKRQKYGVAIYNYNASQDVELSLQIGDTVHILEMYEGWYRGYTLQNKSKKGIFPETYIHLKEATVEDLGQHETVIPGELPLVQELTSTLREWAVIWRKLYVNNKLTLFRQLQQMTYSLIEWRSQILSGTLPKDELAELKKKVTAKIDHGNRMLGLDLVVRDDNGNILDPDETSTIALFKAHEVASKRIEEKIQEEKSILQNLDLRGQSIFSTIHTYGLYVNFKNFVCNIGEDAELFMALYDPDQSTFISENYLIRWGSNGMPKEIEKLNNLQAVFTDLSSMDLIRPRVSLVCQIVRVGHMELKEGKKHTCGLRRPFGVAVMDITDIIHGKVDDEEKQHFIPFQQIAMETYIRQRQLIMSPLITSHVIGENEPLTSVLNKVIAAKEVNHKGQGLWVSLKLLPGDLTQVQKNFSHLVDRSTAIARKMGFPEIILPGDVRNDIYVTLIHGEFDKGKKKTPKNVEVTMSVHDEEGKLLEKAIHPGAGYEGISEYKSVVYYQVKQPCWYETVKVSIAIEEVTRCHIRFTFRHRSSQETRDKSERAFGVAFVKLMNPDGTTLQDGRHDLVVYKGDNKKMEDAKFYLTLPGTKMEMEEKELQASKNLVTFTPSKDSTKDSFQIATLICSTKLTQNVDLLGLLNWRSNSQNIKHNLKKLMEVDGGEIVKFLQDTLDALFNIMMEMSDSETYDFLVFDALVFIISLIGDIKFQHFNPVLETYIYKHFSATLAYVKLSKVLNFYVANADDSSKTELLFAALKALKYLFRFIIQSRVLYLRFYGQSKDGDEFNNSIRQLFLAFNMLMDRPLEEAVKIKGAALKYLPSIINDVKLVFDPVELSVLFCKFIQSIPDNQLVRQKLNCMTKIVESTLFRQSECREVLLPLLTDQLSGQLDDNSNKPDHEASSQLLSNILEVLDRKDVGATAVHIQLIMERLLRRINRTVIGMNRQSPHIGSFVACMIALLQQMDDSHYSHYISTFKTRQDIIDFLMETFIMFKDLIGKNVYAKDWMVMNMTQNRVFLRAINQFAEVLTRFFMDQASFELQLWNNYFHLAVAFLTHESLQLETFSQAKRNKIVKKYGDMARGSEIGFRIRDMWYNLGPHKIKFIPSMVGPILEVTLTPEVELRKATIPIFFDMMQCEFNFSGNGNFHMFENELITKLDQEVEGGRGDEQYKVLLEKLLLEHCRKHKYLSSSGEVFALLVSSLLENLLDYRTIIMQDESKENRMSCTVNVLNFYKEKKREDIYIRYLYKLRDLHRDCENYTEAAYTLLLHAELLQWSDKPCVPHLLQKDSYYVYTQQELKEKLYQEIISYFDKGKMWEKAIKLSKELAETYESKVFDYEGLGNLLKKRASFYENIIKAMRPQPEYFAVGYYGQGFPSFLRNKIFIYRGKEYERREDFSLRLLTQFPNAEKMTSTTPPGEDIKSSPKQYMQCFTVKPVMSLPPSYKDKPVPEQILNYYRANEVQQFRYSRPFRKGEKDPDNEFATMWIERTTYTTAYTFPGILKWFEVKQISTEEISPLENAIETMELTNERISNCVQQHAWDRSLSVHPLSMLLSGIVDPAVMGGFSNYEKAFFTEKYLQEHPEDQEKVELLKRLIALQMPLLTEGIRIHGEKLTEQLKPLHERLSSCFRELKEKVEKHYGVITLPPNLTERKQSRTGSIVLPYIMSSTLRRLSITSVTSSVVSTSSNSSDNAPSRPGSDGSILEPLLERRASSGARVEDLSLREENSENRISKFKRKDWSLSKSQVIAEKAPEPDLMSPTRKAQRPKSLQLMDNRLSPFHGSSPPQSTPLSPPPLTPKATRTLSSPSLQTDGIAATPVPPPPPPKSKPYEGSQRNSTELAPPLPVRREAKAPPPPPPKARKSGIPTSEPGSQ

SEQ ID NO: 5041 - protein, 540 aa, Homo sapiens
MSASLNYKSFSKEQQTMDNLEKQLICPICLEMFTKPVVILPCQHNLCRKCASDIFQASNPYLPTRGGTTMASGGRFRCPSCRHEVVLDRHGVYGLQRNLLVENIIDIYKQESTRPEKKSDQPMCEEHEEERINIYCLNCEVPTCSLCKVFGAHKDCQVAPLTHVFQRQKSELSDGIAILVGSNDRVQGVISQLEDTCKTIEECCRKQKQELCEKFDYLYGILEERKNEMTQVITRTQEEKLEHVRALIKKYSDHLENVSKLVESGIQFMDEPEMAVFLQNAKTLLKKISEASKAFQMEKIEHGYENMNHFTVNLNREEKIIREIDFYREDEDEEEEEGGEGEKEGEGEVGGEAVEVEEVENVQTEFPGEDENPEKASELSQVELQAAPGALPVSSPEPPPALPPAADAPVTQGEVVPTGSEQTTESETPVPAAAETADPLFYPSWYKGQTRKATTNPPCTPGSEGLGQIGPPGSEDSNVRKAEVAAAAASERAAVSGKETSAPAATSQELVICLALLAFLILHYIWSQIQCLIFTLMDWI

SEQ ID NO: 5042 - protein, 1082 aa, Homo sapiens
MSQTQDYECRSHNVDLPESRIPGSNTRLEWVEIIEAARERMYANLVTGECVWDPPAGVRIKRTSENQWWELFDPNTSRFYYYNASTQRTVWHRPQGCDIIPLAKLQTLKQNTESPRASAESSPGRGSSVSREGSTSSSLEPEPDTEKAQELPARAGRPAAFGTVKEDSGSSSPPGVFLEKDYEIYRDYSADGQLLHYRTSSLRWNSGAKERMLIKVADREPSFLAAQGNGYAPDGPPGVRSRRPSGSQHSPSLQTFAPEADGTIFFPERRPSPFLKRAELPGSSSPLLAQPRKPSGDSQPSSPRYGYEPPLYEEPPVEYQAPIYDEPPMDVQFEAGGGYQAGSPQRSPGRKPRPFLQPNKQGPPSPCQQLVLTKQKCPERFLSLEYSPAGKEYVRQLVYVEQAGSSPKLRAGPRHKYAPNPGGGSYSLQPSPCLLRDQRLGVKSGDYSTMEGPELRHSQPPTPLPQAQEDAMSWSSQQDTLSSTGYSPGTRKRKSRKPSLCQATSATPTEGPGDLLVEQPLAEEQPPCGTSLAPVKRAEGEAEGARGAAEPFLAQARLAWEAQQAHFHMKQRSSWDSQQDGSGYESDGALPLPMPGPVVRAFSEDEALAQQENRHWRRGTFEKLGFPQILLEKSVSVQTNLASPEPYLHPSQSEDLAACAQFESSRQSRSGVPSSSCVFPTFTLRKPSSETDIENWASKHFNKHTQGLFRRKVSIANMLAWSSESIKKPMIVTSDRHVKKEACELFKLIQMYMGDRRAKADPLHVALEVATKGWSVQGLRDELYIQLCRQTTENFRLESLARGWELMAICLAFFPPTPKFHSYLEGYIYRHMDPVNDTKGVAISTYAKYCYHKLQKAALTGAKKGLKKPNVEEIRHAKNAVFSPSMFGSALQEVMGMQRERYPERQLPWVQTRLSEEVLALNGDQTEGIFRVPGDIDEVNALKLQVDQWKVPTGLEDPHVPASLLKLWYRELEEPLIPHEFYEQCIAHYDSPEAAVAVVHALPRINRMVLCYLIRFLQVFVQPANVAVTKMDVSNLAMVMAPNCLRCQSDDPRVIFENTRKEMSFLRVLIQHLDTSFMEGVL

SEQ ID NO: 5043 - protein, 141 aa, Homo sapiens
MGKGIPLNDQDRIPWLCNLHDILLRDVASGQRVVLACSALKKTYRDILTQGKDGVALKCEESGKEAKQAEMQLLVVHLSGSFEVISGRLLKREGHFMPPELLQSQFETLEPPAAPENFIQISVDKNVSEIIATIMETLKMK

SEQ ID NO: 5044 - protein, 566 aa, Homo sapiens
MDIQLDPARDDLPLMANTSHILVKHYVLDLDVDFESQVIEGTIVLFLEDGNRFKKQNSSIEEACQSESNKACKFGMPEPCHIPVTNARTFSSEMEYNDFAICSKGEKDTSDKDGNHDNQEHASGISSSKYCCDTGNHGSEDFLLVLDCCDLSVLKVEEVDVAAVPGLEKFTRSPELTVVSEEFRNQIVRELVTLPANRWREQLDYYARCSQAPGCGELLFDTDTWSLQIRKTGAQTATDFPHAIRIWYKTKPEGRSVTWTSDQSGRPCVYTVGSPINNRALFPCQEPPVAMSTWQATVRAAASFVVLMSGENSAKPTQLWEECSSWYYYVTMPMPASTFTIAVGCWTEMKMETWSSNDLATERPFSPSEANFRHVGVCSHMEYPCRFQNASATTQEIIPHRVFAPVCLTGACQETLLRLIPPCLSAAHSVLGAHPFSRLDVLIVPANFPSLGMASPHIMFLSQSILTGGNHLCGTRLCHEIAHAWFGLAIGARDWTEEWLSEGFATHLEDVFWATAQQLAPYEAREQQELRACLRWRRLQDEMQCSPEEMQVLRFPHVGGCSGSFS

SEQ ID NO: 5045 - protein, 421 aa, Homo sapiens
MPFLHGFRRIIFEYQPLVDAILGSLGIQDPERQESLDRPSYVASEESRILVLTELLERKAHSPFYQEGVSNALLKMAELGLTRAADVLLRHGANLNFEDPVTYYTALHIAVLRNQPDMVELLVHHGADVNRRDRIHESSPLDLASEEPERLPCLQRLLDLGADVNAADKHGKTALLHALASSDGVQIHNTENIRLLLEGGADVKATTKDGDTVFTCIIFLLGETVGGDKEEAQMINRFCFQVTRLLLAHGADPSECPAHESLTHICLKSFKLHFPLLRFLLESGAAYNCSLHGASCWSGFHIIFERLCSHPGCTEDESHADLLRKAETVLDLMVTNSQKLQLPENFDIHPVGSLAEKIQALHFSLRQLESYPPPLKHLCRVAIRLYLQPWPVDVKVKALPLPDRLKWYLLSEHSGSVEDDI

SEQ ID NO: 5046 - protein, 197 aa, Homo sapiens
MPFLHGFRRIIFEYQPLVDAILGSLGIQDPERQESLDRPSYVASEESRILVLTELLERKAHSPFYQEGVSNALLKMAELGLTRAADVLLRHGANLNFEDPVTYYTALHIAVLRNQPDMVELLVHHGADVNRRDREKLLCSMLWPAATGCRSTILRTFVSYWKEGQTSRPPPKMGTQCSPASSSCLVRPWEGTKRRPR

SEQ ID NO: 5047 - protein, 227 aa, Homo sapiens
MSDINLDWVDRRQLQRLEEMLIVVDENDKVIGADTKRNCHLNENIEKGLLHRAFSVVLFNTKNRILIQQRSDTKVTFPGYFTDSCSSHPLYNPAELEEKDAIGVRRAAQRRLQAELGIPGEQISPEDIVFMTIYHHKAKSDRIWGEHEICYLLLVRKNVTLNPDPSETKSILYLSQEELWELLEREARGEVKVTPWLRTIAERFLYRWWPHLDDVTPFVELHKIHRV

SEQ ID NO: 5048 - protein, 287 aa, Homo sapiens
MEVMEGPLNLAHQQSRRADRLLAAGKYEEAISCHKKAAAYLSEAMKLTQSEQAHLSLELQRDSHMKQLLLIQERWKRAQREERLKAQQNTDKDAAAHLQTSHKPSAEDAEGQSPLSQKYSPSTEKCLPEIQGIFDRDPDTLLYLLQQKSEPAEPCIGSKAPKDDKTIIEEQATKIADLKRHVEFLVAENERLRKENKQLKAEKARLLKGPIEKELDVDADFVETSELWSLPPHAETATASSTWQKFAANTGKAKDIPIPNLPPLDFPSPELPLMELSEDILKGFMNN

SEQ ID NO: 5049 - protein, 947 aa, Homo sapiens
MCVDSLVRICSGLSYGRIRNIKSLSDIQIVQVACGYYHSLALSKASEVFCWGQNKYGQLGLGTDCKKQTSPQLLKSLLGIPFMQVAAGGAHSFVLTLSGAIFGWGRNKFGQLGLNDENDRYVPNLLKSLRSQKIVYICCGEDHTAALTKEGGVFTFGAGGYGQLGHNSTSHEINPRKVFELMGSIVTEIACGRQHTSAFVPSSGRIYSFGLGGNGQLGTGSTSNRKSPFTVKGNWYPYNGQCLPDIDSEEYFCVKRIFSGGDQSFSHYSSPQNCGPPDDFRCPNPTKQIWTVNEALIQKWLSYPSGRFPVEIANEIDGTFSSSGCLNGSFLAVSNDDHYRTGTRFSGVDMNAARLLFHKLIQPDHPQISQQVAASLEKNLIPKLTSSLPDVEALRFYLTLPECPLMSDSNNFTTIAIPFGTALVNLEKAPLKVLENWWSVLEPPLFLKIVELFKEVVVHLLKLYKIGIPPSERRIFNSFLHTALKVLEILHRVNEKMGQIIQYDKFYIHEVQELIDIRNDYINWVQQQAYGMDVNHGLTELADIPVTICTYPFVFDAQAKTTLLQTDAVLQMQMAIDQAHRQNVSSLFLPVIESVNPCLILVVRRENIVGDAMEVLRKTKNIDYKKPLKVIFVGEDAVDAGGVRKEFFLLIMRELLDPKYGMFRYYEDSRLIWFSDKTFEDSDLFHLIGVICGLAIYNCTIVDLHFPLALYKKLLKKKPSLDDLKELMPDVGRSMQQLLDYPEDDIEETFCLNFTITVENFGATEVKELVLNGADTAVNKQNRQEFVDAYVDYIFNKSVASLFDAFHAGFHKVCGGKVLLLFQPNELQAMVIGNTNYDWKELEKNTEYKGEYWAEHPTIKIFWEVFHELPLEKKKQFLLFLTGSDRIPILGMKSLKLVIQSTGGGEEYLPVSHTCFNLLDLPKYTEKETLRSKLIQAIDHNEGFSLI

SEQ ID NO: 5050 - protein, 845 aa, Homo sapiens
MPAFLGLKCLGKLCSSEKSKVTSSERTSARGSNRKRLIVEDRRVSGTSFTAHRRATITHLLYLCPKDYCPRGRVCNSVDPFVAHPQDPHHPSEKPVIHCHKCGEPCKGEVLRVQTKHFHIKCFTCKVCGCDLAQGGFFIKNGEYLCTLDYQRMYGTRCHGCGEFVEGEVVTALGKTYHPNCFACTICKRPFPPGDRVTFNGRDCLCQLCAQPMSSSPKETTFSSNCAGCGRDIKNGQALLALDKQWHLGCFKCKSCGKVLTGEYISKDGAPYCEKDYQGLFGVKCEACHQFITGKVLEAGDKHYHPSCARCSRCNQMFTEGEEMYLQGSTVWHPDCKQSTKTEEKLRLPNIRRSSSDFFYSKSLIRRTGRSPSLQPTRTSSESIYSRPGSSIPGSPGHTIYAKVDNEILDYKDLAAIPKVKAIYDIERPDLITYEPFYTSGYDDKQERQSLGESAALSPTPSAEGYQDVRDRMIHRSTSQGSINSPVYSRHSYTPTTSRSPQHFHRPELLSPGVQRLSYLRTSSLSPTHSDSRPNPPFRHHFIPHIKGNEPSSGRNSPLPYRPDSRPLTPTYAQAPKHFHVPDQGINIYRKPPIYKQHAALAAQSKSSEDIIKFSKFPAAQAPDPSETPKIETDHWPGPPSFAVVGPDMKRRSSGREEDDEELLRRRQLQEEQLMKLNSGLGQLILKEEMEKESRERSSLLASRYDSPINSASHIPSSKTASLPGYGRNGLHRPVSTDFAQYNSYGDVSGGVRDYQTLPDGHMPAMRMDRGVSMPNMLEPKIFPYEMLMVTNRGRNKILREVDRTRLERHLAPEVFREIFGMSIQEFDRLPLWRRNDMKKKAKLF

SEQ ID NO: 5051 - protein, 197 aa, Homo sapiens
MFGCLVAGRLVQTAAQQVAEDKFVFDLPDYESINHVVVFMLGTIPFPEGMGGSVYFSYPDSNGMPVWQLLGFVTNGKPSAIFKISGLKSGEGSQHPFGAMNIVRTPSVAQIGISVELLDSMAQQTPVGNAAVSSVDSFTQFTQKMLDNFYNFASSFAVSQAQMTPSPSEMFIPANVVLKWYENFQRRLAQNPLFWKT

SEQ ID NO: 5052 - protein, 309 aa, Homo sapiens
MVFPAKRFCLVPSMEGVRWAFSCGTWLPSRAEWLLAVRSIQPEEKERIGQFVFARDAKAAMAGRLMIRKLVAEKLNIPWNHIRLQRTAKGKPVLAKDSSNPYPNFNFNISHQGDYAVLAAEPELQVGIDIMKTSFPGRGSIPEFFHIMKRKFTNKEWETIRSFKDEWTQLDMFYRNWALKESFIKAIGVGLGFELQRLEFDLSPLNLDIGQVYKETRLFLDGEEEKEWAFEESKIDEHHFVAVALRKPDGSRHQDVPSQDDSKPTQRQFTILNFNDLMSSAVPMTPEDPSFWDCFCFTEEIPIRNGTKS

SEQ ID NO: 5053 - protein, 532 aa, Homo sapiens
MQSCESSGDSADDPLSRGLRRRGQPRVVVIGAGLAGLAAAKALLEQGFTDVTVLEASSHIGGRVQSVKLGHATFELGATWIHGSHGNPIYHLAEANGLLEETTDGERSVGRISLYSKNGVACYLTNHGRRIPKDVVEEFSDLYNEVYNLTQEFFRHDKPVNAESQNSVGVFTREEVRNRIRNDPDDPEATKRLKLAMIQQYLKVESCESSSHSMDEVSLSAFGEWTEIPGAHHIIPSGFMRVVELLAEGIPAHVIQLGKPVRCIHWDQASARPRGPEIEPRGVLKRQYTSFFRPGLPTEKVAAIHRLGIGTTDKIFLEFEEPFWGPECNSLQFVWEDEAESHTLTYPPELWYRKICGFDVLYPPERYGHVLSGWICGEEALVMEKCDDEAVAEICTEMLRQFTGNPNIPKPRRILRSAWGSNPYFRGSYSYTQVGSSGADVEKLAKPLPYTESSKTAHGSSTKQQPGHLFSSKCPEQPLDANRGAVKPMQVLFSGEATHRKYYSTTHGALLSGQREAARLIEMYRDLFQQGT

SEQ ID NO: 5054 - protein, 782 aa, Homo sapiens
MDSSIHLSSLISRHDDEATRTSTSEGLEEGEVEGETLLIVESEDQASVDLSHDQSGDSLNSDEGDVSWMEEQLSYFCDKCQKWIPASQLREQLSYLKGDNFFRFTCSDCSADGKEQYERLKLTWQQVVMLAMYNLSLEGSGRQGYFRWKEDICAFIEKHWTFLLGNRKKTSTWWSTVAGCLSVGSPMYFRSGAQEFGEPGWWKLVHNKPPTMKPEGEKLSASTLKIKAASKPTLDPIITVEGLRKRASRNPVESAMELKEKRSRTQEAKDIRRAQKEAAGFLDRSTSSTPVKFISRGRRPDVILEKGEVIDFSSLSSSDRTPLTSPSPSPSLDFSAPGTPASHSATPSLLSEADLIPDVMPPQALFHDDDEMEGDGVIDPGMEYVPPPAGSVASGPVVGVRKKVRGPEQIKQEVESEEEKPDRMDIDSEDTDSNTSLQTRAREKRKPQLEKDTKPKEPRYTPVSIYEEKLLLKRLEACPGAVAMTPEARRLKRKLIVRQAKRDRGLPLFDLDQVVNAALLLVDGIYGAKEGGISRLPAGQATYRTTCQDFRILDRYQTSLPSRKGFRHQTTKFLYRLVGSEDMAVDQSIVSPYTSRILKPYIRRDYETKPPKLQLLSQIRSHLHRSDPHWTPEPDAPLDYCYVRPNHIPTINSMCQEFFWPGIDLSECLQYPDFSVVVLYKKVIIAFGFMVPDVKYNEAYISFLFVHPEWRRAGIATFMIYHLIQTCMGKDVTLHVSASNPAMLLYQKFGFKTEEYVLDFYDKYYPLESTECKHAFFLRLRR

SEQ ID NO: 5055 - protein, 913 aa, Homo sapiens
MGTTAPGPIHLLELCDQKLMEFLCNMDNKDLVWLEEIQEEAERMFTREFSKEPELMPKTPSQKNRRKKRRISYVQDENRDPIRRRLSRRKSRSSQLSSRRLRSKDSVEKLATVVGENGSVLRRVTRAAAAAAAATMALAAPSSPTPESPTMLTKKPEDNHTQCQLVPVVEIGISERQNAEQHVTQLMSTEPLAALSPTPASATAPTSQGIPTSDEESTPKKSKARILESITVSSLMATPQDPKGQGVGTGRSASKLRIAQVSPGPRDSPAFPDSPWRERVLAPILPDNFSTPTGSRTDSQSVRHSPIAPSSPSPQVLAQKYSLVAKQESVVRRASRRLAKKTAEEPAASGRIICHSYLERLLNVEVPQKVGSEQKEPPEEAEPVAAAEPEVPENNGNNSWPHNDTEIANSTPNPKPAASSPETPSAGQQEAKTDQADGPREPPQSARRKRSYKQAVSELDEEQHLEDEELQPPRSKTPSSPCPASKVVRPLRTFLHTVQRNQMLMTPTSAPRSVMKSFIKRNTPLRMDPKEKERQRLENLRRKEEAEQLRRQKVEEDKRRRLEEVKLKREERLRKVLQARERVEQMKEEKKKQIEQKFAQIDEKTEKAKEERLAEEKAKKKAAAKKMEEVEARRKQEEEARRLRWLQQEEEERRHQELLQKKKEEEQERLRKAAEAKRLAEQREQERREQERREQERREQERREQERREQERQLAEQERRREQERLQAERELQEREKALRLQKEQLQRELEEKKKKEEQQRLAERQLQEEQEKKAKEAAGASKALNVTVDVQSPACTSYQMTPQGHRAPPKINPDNYGMDLNSDDSTDDEAHPRKPIPTWARGTPLSQAIIHQYYHPPNLLELFGTILPLDLEDIFKKSKPRYHKRTSSAVWNSPPLQGARVPSSLAYSLKKH

SEQ ID NO: 5056 - protein, 1382 aa, Homo sapiens
MDEEENHYVSQLREVYSSCDTTGTGFLDRQELTQLCLKLHLEQQLPVLLQTLLGNDHFARVNFEEFKEGFVAVLSSNAGVRPSDEDSSSLESAASSAIPPKYVNGSKWYGRRSRPELCDAATEARRVPEQQTQASLKSHLWRSASLESVESPKSDEEAESTKEAQNELFEAQGQLQTWDSEDFGSPQKSCSPSFDTPESQIRGVWEELGVGSSGHLSEQELAVVCQSVGLQGLEKEELEDLFNKLDQDGDGKVSLEEFQLGLFSHEPALLLESSTRVKPSKAWSHYQVPEESGCHTTTTSSLVSLCSSLRLFSSIDDGSGFAFPDQVLAMWTQEGIQNGREILQSLDFSVDEKVNLLELTWALDNELMTVDSAVQQAALACYHQELSYQQGQVEQLARERDKARQDLERAEKRNLEFVKEMDDCHSTLEQLTEKKIKHLEQGYRERLSLLRSEVEAERELFWEQAHRQRAALEWDVGRLQAEEAGLREKLTLALKENSRLQKEIVEVVEKLSDSERLALKLQKDLEFVLKDKLEPQSAELLAQEERFAAVLKEYELKCRDLQDRNDELQAELEGLWARLPKNRHSPSWSPDGRRRQLPGLGPAGISFLGNSAPVSIETELMMEQVKEHYQDLRTQLETKVNYYEREIAALKRNFEKERKDMEQARRREVSVLEGQKADLEELHEKSQEVIWGLQEQLQDTARGPEPEQMGLAPCCTQALCGLALRHHSHLQQIRREAEAELSGELSGLGALPARRDLTLELEEPPQGPLPRGSQRSEQLELERALKLQPCASEKRAQMCVSLALEEEELELARGKRVDGPSLEAEMQALPKDGLVAGSGQEGTRGLLPLRPGCGERPLAWLAPGDGRESEEAAGAGPRRRQAQDTEATQSPAPAPAPASHGPSERWSRMQPCGVDGDIVPKEPEPFGASAAGLEQPGARELPLLGTERDASQTQPRMWEPPLRPAASCRGQAERLQAIQEERARSWSRGTQEQASEQQARAEGALEPGCHKHSVEVARRGSLPSHLQLADPQGSWQEQLAAPEEGETKIALEREKDDMETKLLHLEDVVRALEKHVDLRENDRLEFHRLSEENTLLKNDLGRVRQELEAAESTHDAQRKEIEVLKKDKEKACSEMEVLNRQNQNYKDQLSQLNVRVLQLGQEASTHQAQNEEHRVTIQMLTQSLEEVVRSGQQQSDQIQKLRVELECLNQEHQSLQLPWSELTQTLEESQDQVQGAHLRLRQAQAQHLQEVRLVPQDRVAELHRLLSLQGEQARRRLDAQREEHEKQLKATEERVEEAEMILKNMEMLLQEKVDKLKEQFEKNTKSDLLLKELYVENAHLVRALQATEEKQRGAEKQSRLLEEKVRALNKLVSRIAPAALSV

SEQ ID NO: 5057 - protein, 1462 aa, Homo sapiens
MAGRPLRIGDQLVLEEDYDETYIPSEQEILEFAREIGIDPIKEPELMWLAREGIVAPLPGEWKPCQDITGDIYYFNFANGQSMWDHPCDEHYRSLVIQERAKLSTSGAIKKKKKKKEKKDKKDRDPPKSSLALGSSLAPVHVPLGGLAPLRGLVDTPPSALRGSQSVSLGSSVESGRQLGELMLPSQGLKTSAYTKGLLGSIYEDKTALSLLGLGEETNEEDEEESDNQSVHSSSEPLRNLHLDIGALGGDFEYEESLRTSQPEEKKDVSLDSDAAGPPTPCKPSSPGADSSLSSAVGKGRQGSGARPGLPEKEENEKSEPKICRNLVTPKADPTGSEPAKASEKEAPEDTVDAGEEGSRREEAAKEPKKKASALEEGSSDASQELEISEHMKEPQLSDSIASDPKSFHGLDFGFRSRISEHLLDVDVLSPVLGGACRQAQQPLGIEDKDDSQSSQDELQSKQSKGLEERLSPPLPHEERAQSPPRSLATEEEPPQGPEGQPEWKEAEELGEDSAASLSLQLSLQREQAPSPPAACEKGKEQHSQAEELGPGQEEAEDPEEKVAVSPTPPVSPEVRSTEPVAPPEQLSEAALKAMEEAVAQVLEQDQRHLLESKQEKMQQLREKLCQEEEEEILRLHQQKEQSLSSLRERLQKAIEEEEARMREEESQRLSWLRAQVQSSTQADEDQIRAEQEASLQKLREELESQQKAERASLEQKNRQMLEQLKEEIEASEKSEQAALNAAKEKALQQLREQLEGERKEAVATLEKEHSAELERLCSSLEAKHREVVSSLQKKIQEAQQKEEAQLQKCLGQVEHRVHQKSYHVAGYEHELSSLLREKRQEVEGEHERRLDKMKEEHQQVMAKAREQYEAEERKQRAELLGHLTGELERLQRAHERELETVRQEQHKRLEDLRRRHREQERKLQDLELDLETRAKDVKARLALLEVQEETARREKQQLLDVQRQVALKSEEATATHQQLEEAQKEHTHLLQSNQQLREILDELQARKLKLESQVDLLQAQSQQLQKHFSSLEAEAQKKQHLLREVTVEENNASPHFEPDLHIEDLRKSLGTNQTKEVSSSLSQSKEDLYLDSLSSHNVWHLLSAEGVALRSAKEFLVQQTRSMRRRQTALKAAQQHWRHELASAQEVAKDPPGIKALEDMRKNLEKETRHLDEMKSAMARGSGHNLLKKKEEKLNQLESSLWEEASDEGTLGGSPTKKAVTFDLSDMDSLSSESSESFSPPHREWWRQQRIDSTPSLTSRKIHGLSHSLRQISSQLSSVLSILDSLNPQSPPPLLASMPAQLPPRDPKSTPTPTYYGSLARFSALSSATPTSTQWAWDSGQGPRLPSSVAQTVDDFLLEKWRKYFPSGIPLLSNSPTPLESRLGYMSASEQLRLLQHSHSQVPEAGSTTFQGIIEANRRWLERVKNDPRLPLFSSTPKPKATLSLLQLGLDEHNRVKVYRF

SEQ ID NO: 5058 - protein, 626 aa, Homo sapiens
MMANDAKPDVKTVQVLRDTANRLRIHSIRATCASGSGQLTSCCSAAEVVSVLFFHTMKYKQTDPEHPDNDRFILSRGHAAPILYAAWVEVGDISESDLLNLRKLHSDLERHPTPRLPFVDVATGSLGQGLGTACGMAYTGKYLDKASYRVFCLMGDGESSEGSVWEAFAFASHYNLDNLVAVFDVNRLGQSGPAPLEHGADIYQNCCEAFGWNTYLVDGHDVEALCQAFWQASQVKNKPTAIVAKTFKGRGIPNIEDAENWHGKPVPKERADAIVKLIESQIQTNENLIPKSPVEDSPQISITDIKMTSPPAYKVGDKIATQKTYGLALAKLGRANERVIVLSGDTMNSTFSEIFRKEHPERFIECIIAEQNMVSVALGCATRGRTIAFAGAFAAFFTRAFDQLRMGAISQANINLIGSHCGVSTGEDGVSQMALEDLAMFRSIPNCTVFYPSDAISTEHAIYLAANTKGMCFIRTSQPETAVIYTPQENFEIGQAKVVRHGVNDKVTVIGAGVTLHEALEAADHLSQQGISVRVIDPFTIKPLDAATIISSAKATGGRVITVEDHYREGGIGEAVCAAVSREPDILVHQLAVSGVPQRGKTSELLDMFGISTRHIIAAVTLTLMK

SEQ ID NO: 5059 - protein, 332 aa, Homo sapiens
MATIKSELIKNFAEEEAIHHNKISIVGTGSVGVACAISILLKGLSDELVLVDVDEGKLKGETMDLQHGSPFMKMPNIVSSKDYLVTANSNLVIITAGARQKKGETRLDLVQRNVSIFKLMIPNITQYSPHCKLLIVTNPVDILTYVAWKLSGFPKNRVIGSGCNLDSARFRYFIGQRLGIHSESCHGLILGEHGDSSVPVWSGVNIAGVPLKDLNPDIGTDKDPEQWENVHKKVISSGYEMVKMKGYTSWGISLSVADLTESILKNLRRVHPVSTLSKGLYGINEDIFLSVPCILGENGITDLIKVKLTLEEEACLQKSAETLWEIQKELKL

SEQ ID NO: 5060 - protein, 323 aa, Homo sapiens
MPEMPEDMEQEEVNIPNRRVLVTGATGLLGRAVHKEFQQNNWHAVGCGFRRARPKFEQVNLLDSNAVHHIIHDFQPHVIVHCAAERRPDVVENQPDAASQLNVDASGNLAKEAAAVGAFLIYISSDYVFDGTNPPYREEDIPAPLNLYGKTKLDGEKAVLENNLGAAVLRIPILYGEVEKLEESAVTVMFDKVQFSNKSANMDHWQQRFPTHVKDVATVCRQLAEKRMLDPSIKGTFHWSGNEQMTKYEMACAIADAFNLPSSHLRPITDSPVLGAQRPRNAQLDCSKLETLGIGQRTPFRIGIKESLWPFLIDKRWRQTVFH

SEQ ID NO: 5061 - protein, 1094 aa, Homo sapiens
MAESSSESDHFRCRDRLSPWAARSTHRGTRSLPTVEVTEKVNTITSTLQDTSRNLRQVDQMLGRYREYSNGQAGAIEHLKESLEQSIDQLRSQRLLRNSGGRSISVTSLSASDLDGGTGSELHHFPPTSPLKDYGDPQGIKRMRSRTGVRFVQETDDMTQLHGFHQSLRDLSSEQIRLGDDFNRELSRRSRSDAETKRALEELTEKLNEAQKQEVVSDRVERRLQELEREMRTERELVERRQDQLGLMSLQLQEALKKQEAKADEHEGAIKNKLRQTETEKNQLEQELELSRRLLNQSEGSRETLLHQVEELRTQLTKAEGDRKGLQHQVSQISKQQSNYQDEQGEDWRFRRGVEREKQDLEKQMSDLRVQLNFSAMASELEEVKRCMERKDKEKAHLASQVENLTRELENGEKQQLQMLDRLKEIQNHFDTCEAERKHADLQISELTRHAEDATKQAERYLSELQQSEALKEEAEKRREDLKLKAQESIRQWKLKHKKLERALEKQSETVDELTGKNNQILKEKDELKTQLYAALQQIENLRKELNDVLTKRALQEEELHSKEEKLRDIKSHQADLELEVKNSLDTIHRLESELKKQSKIQSQMKVEKAHLEEEIAELKKSQAQDKAKLLEMQESIKDLSAIRADLANKLAEEERAKKAVLKDLSDLTAQAKSRDEETATIITQLKLERDVHQRELKDLTSSLQSVKTKHEQNIQELMKHFKKEKSEAENHIRTLKAESLEEKNMAKIHRGQLEKLKSQCDRLTEELTQNENENKKLKLKYQCLKDQLEEREKHISIEEEHLRRMEEARLQLKDQLLCLETEQESILGVIGKEIDAACKTFSKDSVEKLKVFSSGPDIHYDPHRWLAESKTKLQWLCEELKERENREKNLRHQLMLCRQQLRNLTENKESELQCLFQQIERQEQLLDEIHREKRDLLEETQRKDEEMGSLQDRVIALETSTQVALDHLESVPEKLSLLEDFKDFRDSCSSSERTDGRYSKYRVRRNSLQHHQDDTKYRTKSFKGDRTFLEGSHTRGLDHSSSWQDHSRFLSSPRFSYVNSFTKRTVAPDSASNKEDATMNGTSSQPKKEEYGS

SEQ ID NO: 5062 - protein, 336 aa, Homo sapiens
MKKEHVLHCQFSAWYPFFRGVTIKSVILPLPQNVKDYLLDDGTLVVSGRDDPPTHSQPDSDDEAEEIQWSDDENTATLTAPEFPEFATKVQEAINSLGGSVFPKLNWSAPRDAYWIAMNSSLKCKTLSDIFLLFKSSDFITRDFTQPFIHCTDDSPDPCIEYELVLRKWCELIPGAEFRCFVKENKLIGISQRDYTQYYDHISKQKEEIRRCIQDFFKKHIQYKFLDEDFVFDIYRDSRGKVWLIDFNPFGEVTDSLLFTWEELISENNLNGDFSEVDAQEQDSPAFRCTNSEVTVQPSPYLSYRLPKDFVDLSTGEDAHKLIDFLKLKRNQQEDD

SEQ ID NO: 5063 - protein, 415 aa, Homo sapiens
MKLSLTKVVNGCRLGKIKNLGKTGDHTMDIPGCLLYTKTGSAPHLTHHTLHNIHGVPAMAQLTLSSLAEHHEVLTEYKEGVGKFIGMPESLLYCSLHDPVSPCPAGYVTNKSVSVWSVAGRVEMTVSKFMAIQKALQPDWFQCLSDGEVSCKEATSIKRVRKSVDRSLLFLDNCLRLQEESEVLQKSVIIGVIEGGDVMEERLRSARETAKRPVGGFLLDGFQGNPTTLEARLRLLSSVTAELPEDKPRLISGVSRPDEVLECIERGVDLFESFFPYQVTERGCALTFSFDYQPNPEETLLQQNGTQEEIKCMDQIKKIETTGCNQEITSFEINLKEKKYQEDFNPLVRGCSCYCCKNHTRAYIHHLLVTNELLAGVLLMMHNFEHYFGFFHYIREALKSDKLAQLKELIHRQAS

SEQ ID NO: 5064 - protein, 589 aa, Homo sapiens
MPTVSVKRDLLFQALGRTYTDEEFDELCFEFGLELDEITSEKEIISKEQGNVKAAGASDVVLYKIDVPANRYDLLCLEGLVRGLQVFKERIKAPVYKRVMPDGKIQKLIITEETAKIRPFAVAAVLRNIKFTKDRYDSFIELQEKLHQNICRKRALVAIGTHDLDTLSGPFTYTAKRPSDIKFKPLNKTKEYTACELMNIYKTDNHLKHYLHIIENKPLYPVIYDSNGVVLSMPPIINGDHSRITVNTRNIFIECTGTDFTKAKIVLDIIVTMFSEYCENQFTVEAAEVVFPNGKSHTFPELAYRKEMVRADLINKKVGIRETPENLAKLLTRMYLKSEVIGDGNQIEIEIPPTRADIIHACDIVEDAAIAYGYNNIQMTLPKTYTIANQFPLNKLTELLRHDMAAAGFTEALTFALCSQEDIADKLGVDISATKAVHISNPKTAEFQVARTTLLPGLLKTIAANRKMPLPLKLFEISDIVIKDSNTDVGAKNYRHLCAVYYNKNPGFEIIHGLLDRIMQLLDVPPGEDKGGYVIKASEGPAFFPGRCAEIFARGQSVGKLGVLHPDVITKFELTMPCSSLEINVGPFL

SEQ ID NO: 5065 - protein, 158 aa, Homo sapiens
MAAQGVGPGPGSAAPPGLEAARQKLALRRKKVLSTEEMELYELAQAAGGAIDPDVFKILVDLLKLNVAPLAVFQMLKSMCAGQRLASEPQDPAAVSLPTSSVPETRGRNKGSAALGGALALAERSSREGSSQRMPRQPSATRLPKGGGPGKSPTRGST

SEQ ID NO: 5066 - protein, 224 aa, Homo sapiens
MVEDELALFDKSINEFWNKFKSTDTSCQMAGLRDTYKDSIKAFAEKLSVKLKEEERMVEMFLEYQNQISRQNKLIQEKKDNLLKLIAEVKGKKQELEVLTANIQDLKEEYSRKKETISTANKANAERLKRLQKSADLYKDRLGLEIRKIYGEKLQFIFTNIDPKNPESPFMFSLHLNEARDYEVSDSAPHLEGLAEFQENVRKTNNFSAFLANVRKAFTATVYN

SEQ ID NO: 5067 - protein, 575 aa, Homo sapiens
MKLTDSTKGWIVWAALDSSMRGMSLSAGSSPLHSPKITPHTSPAPRRRSHTPNPASYMVPSSASTSVNNPVSQTPSSGQVIQKETVGGTTYFYTDTTPAPLTGMVFPNYHIYPPTAPHVAYMQPKANAPSFFMADELRQELINRHLITMAQIDQADMPAVPTEVDSYHSLFPLEPLPPPNRIQKSSNFGYITSCYKAVNSKDDLPYCLRRIHGFRLVNTKCMVLVDMWKKIQHSNIVTLREVFTTKAFAEPSLVFAYDFHAGGETMMSRHFNDPNADAYFTKRKWGQHEGPLPRQHAGLLPESLIWAYIVQLSSALRTIHTAGLACRVMDPTKILITGKTRLRVNCVGVFDVLTFDNSQNNNPLALMAQYQQADLISLGKVVLALACNSLAGIQRENLQKAMELVTINYSSDLKNLILYLLTDQNRMRSVNDIMPMIGARFYTQLDAAQMRNDVIEEDLAKEVQNGRLFRLLAKLGTINERPEFQKDPTWSETGDRYLLKLFRDHLFHQVTEAGAPWIDLSHIISCLNKLDAGVPEKISLISRDEKSVLVVTYSDLKRCFENTFQELIAAANGQL

SEQ ID NO: 5068 - protein, 594 aa, Homo sapiens
MESNHKSGDGLSGTQKEAALRALVQRTGYSLVQENGQRKYGGPPPGWDAAPPERGCEIFIGKLPRDLFEDELIPLCEKIGKIYEMRMMMDFNGNNRGYAFVTFSNKVEAKNAIKQLNNYEIRNGRLLGVCASVDNCRLFVGGIPKTKKREEILSEMKKVTEGVVDVIVYPSAADKTKNRGFAFVEYESHRAAAMARRKLLPGRIQLWGHGIAVDWAEPEVEVDEDTMSSVKILYVRNLMLSTSEEMIEKEFNNIKPGAVERVKKIRDYAFVHFSNREDAVEAMKALNGKVLDGSPIEVTLAKPVDKDSYVRYTRGTGGRGTMLQGEYTYSLGQVYDPTTTYLGAPVFYAPQTYAAIPSLHFPATKGHLSNRAIIRAPSVREIYMNVPVGAAGVRGLGGRGYLAYTGLGRGYQVKGDKREDKLYDILPGMELTPMNPVTLKPQGIKLAPQILEEICQKNNWGQPVYQLHSAIGQDQRQLFLYKITIPALASQNPAIHPFTPPKLSAFVDEAKTYAAEYTLQTLGIPTDGGDGTMATAAAAATAFPGYAVPNATAPVSAAQLKQAVTLGQDLAAYTTYEVYPTFAVTARGDGYGTF

SEQ ID NO: 5069 - protein, 387 aa, Homo sapiens
MLEGSWINRREDKLGVYSLVHFSPKMLGSVATTLPLSSSNSSGMPLGYYLSSPQISRVTISTTGQLTSKATVGSCSRVENSLDASPFSVPKKQDESPMIGDGEDYFLSLFGDSKKLTAHSNYTQKTLKYFSMILEEVGQFTSSSLGDVEIAEVNVKGLFVKLINSSLDKEMAIGDHILQQNVNGQTISLYRFLPNIVMQANSTVTVWAAASEAKHQPPSDFLWKEQDKFRASPDCITILCKPNGQAIAWYTPIHWKQAWEKLDADVEFNRCSVVSPTFRKRVFQWTASTATITKEKQDQPKKDISNYQVEQAQVLLKREKEIPPTVFPNRSPWCQNPYVSAHPYCPLIEPHNTSTAGGRLDRQAARSTRPNRASGSKKKKTSESQKQ

SEQ ID NO: 5070 - protein, 247 aa, Homo sapiens
MEEQPQMQDADEPADSGGEGRAGGPPQVAGAQAACSEDRMTLLLRLRAQTKQQLLEYKSMVDASEEKTPEQIMQEKQIEAKIEDLENEIEEVKVAFEIKKLALDRMRLSTALKKNLEKISRQSSVLMDNMKHLLELNKLIMKSQQESWDLEEKLLDIRKKRLQLKQASESKLLEIQTEKNKQKIDLDSMENSERIKIIRQNLQMEIKITTVIQHVFQNLILGSKVNWAEDPALKEIVLQLEKNVDMM

SEQ ID NO: 5071 - protein, 485 aa, Homo sapiens
MEFLGTTQTASYCGPKKCCGLTSLPAVQAPVIQECYQPYYLPGYRYLNSWRPSLFYKIANVQTCPDESTSTLRPPTILPTLRSALFSRYSPHDWDQSNQLQVRGAEASRLWASRLTDDSMRLLQDKDQLTHQMQEGTCRNLGQRLSDIGFWKSELSYELDRLLTENQNLETVKRRLECAANEVNCPLQVALECLYHREKRIGIDLVHDNVEKNLIREVDLLKCCQEQMRKLAQRIDIQMRDNRDAQHVLERDLEDKSSAQCIDEKCFNLRNTSDCISFFHGMEKIDGTISVPETWAKFSNDNIKHSQNMRANSIQLREEAEHLFETLSDQMWRQFTDTNLAFNARISEVTDVKNKLQTQLAKTLQEIFQAENTIMLLERSIMAKEGPLKVAQTRLECRTRRPNMELCRDIPQLKLVNEVFTIDDTLQTLKLRLRETQDTLQLLVMTKCRLEHELAIKANTLCIDKEKCMGMRKTFPCTPRLVGHT

SEQ ID NO: 5072 - protein, 278 aa, Homo sapiens
MGKSSEWCERIAGIQKFVLEKWTKKAKPEDTLNLCQLLNNDLASTVVSYPRRFVGLGTLPMQAPELAVKEMERCVKELGFPGVQIGTHVNEWDLNAQELFPVYAAAERLKCSLFVHPWDMQMDGRMAKYWLPWLVGMPAETTIAICSMIMGGVFEKFPKLKVCFAHGGGAFPFTVGRISHGFSMRPDLCAQDNPMNPKKYLGSFYTDALVHDPLSLKLLTDVIGKDKVILGTDYPFPLGELEPGKLIESMEEFDEETKNKLKAGNALAFLGLERKQFE

SEQ ID NO: 5073 - protein, 825 aa, Homo sapiens
MSSSPVNVKKLKVSELKEELKKRRLSDKGLKAELMERLQAALDDEEAGGRPAMEPGNGSLDLGGDSAGRSGAGLEQEAAAGGDEEEEEEEEEEEGISALDGDQMELGEENGAAGAADSGPMEEEEAASEDENGDDQGFQEGEDELGDEEEGAGDENGHGEQQPQPPATQQQQPQQQRGAAKEAAGKSSGPTSLFAVTVAPPGARQGQQQAGGKKKAEGGGGGGRPGAPAAGDGKTEQKGGDKKRGVKRPREDHGRGYFEYIEENKYSRAKSPQPPVEEEDEHFDDTVVCLDTYNCDLHFKISRDRLSASSLTMESFAFLWAGGRASYGVSKGKVCFEMKVTEKIPVRHLYTKDIDIHEVRIGWSLTTSGMLLGEEEFSYGYSLKGIKTCNCETEDYGEKFDENDVITCFANFESDEVELSYAKNGQDLGVAFKISKEVLAGRPLFPHVLCHNCAVEFNFGQKEKPYFPIPEEYTFIQNVPLEDRVRGPKGPEEKKDCEVVMMIGLPGAGKTTWVTKHAAENPGKYNILGTNTIMDKMMVAGFKKQMADTGKLNTLLQRAPQCLGKFIEIAARKKRNFILDQTNVSAAAQRRKMCLFAGFQRKAVVVCPKDEDYKQRTQKKAEVEGKDLPEHAVLKMKGNFTLPEVAECFDEITYVELQKEEAQKLLEQYKEESKKALPPEKKQNTGSKKSNKNKSGKNQFNRGGGHRGRGGFNMRGGNFRGGAPGNRGGYNRRGNMPQRGGGGGGSGGIGYPYPRAPVFPGRGSYSNRGNYNRGGMPNRGNYNQNFRGRGNNRGYKNQSQGYNQWQQGQFWGQKPWSQHYHQGYY

SEQ ID NO: 5074 - protein, 314 aa, Homo sapiens
MQNVINTVKGKALEVAEYLTPVLKESKFKETGVITPEEFVAAGDHLVHHCPTWQWATGEELKVKAYLPTGKQFLVTKNVPCYKRCKQMEYSDELEAIIEEDDGDGGWVDTYHNTGITGITEAVKEITLENKDNIRLQDCSALCEEEEDEDEGEAADMEEYEESGLLETDEATLDTRKIVEACKAKTDAGGEDAILQTRTYDLYITYDKYYQTPRLWLFGYDEQRQPLTVEHMYEDISQDHVKKTVTIENHPHLPPPPMCSVHPCRHAEVMKKIIETVAEGGGELGVHMYLLIFLKFVQAVIPTIEYDYTRHFTM

SEQ ID NO: 5075 - protein, 299 aa, Homo sapiens
MVDKKLVVVFGGTGAQGGSVARTLLEDGTFKVRVVTRNPRKKAAKELRLQGAEVVQGDQDDQVIMELALNGAYATFIVTNYWESCSQEQEVKQGKLLADLARRLGLHYVVYSGLENIKKLTAGRLAAAHFDGKGEVEEYFRDIGVPMTSVRLPCYFENLLSHFLPQKAPDGKSYLLSLPTGDVPMDGMSVSDLGPVVLSLLKMPEKYVGQNIGLSTCRHTAEEYAALLTKHTRKVVHDAKMTPEDYEKLGFPGARDLANMFRFYALRPDRDIELTLRLNPKALTLDQWLEQHKGDFNLL

SEQ ID NO: 5076 - protein, 856 aa, Homo sapiens
MDISKGLPGMQGGLHIWISENRKMVPVPEGAYGNFFEEHCYVILHVPQSPKATQGASSDLHYWVGKQAGAEAQGAAEAFQQRLQDELGGQTVLHREAQGHESDCFCSYFRPGIIYRKGGLASDLKHVETNLFNIQRLLHIKGRKHVSATEVELSWNSFNKGDIFLLDLGKMMIQWNGPKTSISEKARGLALTYSLRDRERGGGRAQIGVVDDEAKAPDLMQIMEAVLGRRVGSLRAATPSKDINQLQKANVRLYHVYEKGKDLVVLELATPPLTQDLLQEEDFYILDQGGFKIYVWQGRMSSLQERKAAFSRAVGFIQAKGYPTYTNVEVVNDGAESAAFKQLFRTWSEKRRRNQKLGGRDKSIHVKLDVGKLHTQPKLAAQLRMVDDGSGKVEVWCIQDLHRQPVDPKRHGQLCAGNCYLVLYTYQRLGRVQYILYLWQGHQATADEIEALNSNAEELDVMYGGVLVQEHVTMGSEPPHFLAIFQGQLVIFQERAGHHGKGQSASTTRLFQVQGTDSHNTRTMEVPARASSLNSSDIFLLVTASVCYLWFGKGCNGDQREMARVVVTVISRKNEETVLEGQEPPHFWEALGGRAPYPSNKRLPEEVPSFQPRLFECSSHMGCLVLAEVGFFSQEDLDKYDIMLLDTWQEIFLWLGEAASEWKEAVAWGQEYLKTHPAGRSPATPIVLVKQGHEPPTFIGWFFTWDPYKWTSHPSHKEVVDGSPAAASTISEITAEVNNLRLSRWPGNGRAGAVALQALKGSQDSSENDLVRSPKSAGSRTSSSVSSTSATINGGLRREQLMHQAVEDLPEGVDPARREFYLSDSDFQDIFGKSKEEFYSMATWRQRQEKKQLGFF

SEQ ID NO: 5077 - protein, 328 aa, Homo sapiens
MEANGSQGTSGSANDSQHDPGKMFIGGLSWQTSPDSLRDYFSKFGEIRECMVMRDPTTKRSRGFGFVTFADPASVDKVLGQPHHELDSKTIDPKVAFPRRAQPKMVTRTKKIFVGGLSANTVVEDVKQYFEQFGKVEDAMLMFDKTTNRHRGFGFVTFENEDVVEKVCEIHFHEINNKMVECKKAQPKEVMFPPGTRGRARGLPYTMDAFMLGMGMLGYPNFVATYGRGYPGFAPSYGYQFPGFPAAAYGPVAAAAVAAARGSGSNPARPGGFPGANSPGPVADLYGPASQDSGVGNYISAASPQPGSGFGHGIAGPLIATAFTNGYH

SEQ ID NO: 5078 - protein, 217 aa, Homo sapiens
MESVALYSFQATESDELAFNKGDTLKILNMEDDQNWYKAELRGVEGFIPKNYIRVKPHPWYSGRISRQLAEEILMKRNHLGAFLIRESESSPGEFSVSVNYGDQVQHFKVLREASGKYFLWEEKFNSLNELVDFYRTTTIAKKRQIFLRDEEPLLKSPGACFAQAQFDFSAQDPSQLSFRRGDIIEVLERPDPHWWRGRSCGRVGFFPRSYVQPVHL

SEQ ID NO: 5079 - protein, 76 aa, Homo sapiens
MGLKMSCLKGFQMCVSSSSSSHDEAPVLNDKHLDVPDIIITPPTPTGMMLPRDLGSTVWLDETGSCPDDGEIDPEA

SEQ ID NO: 5080 - protein, 6630 aa, Homo sapiens
MDQPQFSGAPRFLTRPKAFVVSVGKDATLSCQIVGNPTPQVSWEKDQQPVAAGARFRLAQDGDLYRLTILDLALGDSGQYVCRARNAIGEAFAAVGLQVDAEAACAEQAPHFLLRPTSIRVREGSEATFRCRVGGSPRPAVSWSKDGRRLGEPDGPRVRVEELGEASALRIRAARPRDGGTYEVRAENPLGAASAAAALVVDSDAADTASRPGTSTAALLAHLQRRREAMRAEGAPASPPSTGTRTCTVTEGKHARLSCYVTGEPKPETVWKKDGQLVTEGRRHVVYEDAQENFVLKILFCKQSDRGLYTCTASNLVGQTYSSVLVVVREPAVPFKKRLQDLEVREKESATFLCEVPQPSTEAAWFKEETRLWASAKYGIEEEGTERRLTVRNVSADDDAVYICETPEGSRTVAELAVQGNLLRKLPRKTAVRVGDTAMFCVELAVPVGPVHWLRNQEEVVAGGRVAISAEGTRHTLTISQCCLEDVGQVAFMAGDCQTSTQFCVSAPRKPPLQPPVDPVVKARMESSVILSWSPPPHGERPVTIDGYLVEKKKLGTYTWIRCHEAEWVATPELTVADVAEEGNFQFRVSALNSFGQSPYLEFPGTVHLAPKLAVRTPLKAVQAVEGGEVTFSVDLTVASAGEWFLDGQALKASSVYEIHCDRTRHTLTIREVPASLHGAQLKFVANGIESSIRMEVRAAPGLTANKPPAAAAREVLARLHEEAQLLAELSDQAAAVTWLKDGRTLSPGPKYEVQASAGRRVLLVRDVARDDAGLYECVSRGGRIAYQLSVQGLARFLHKDMAGSCVDAVAGGPAQFECETSEAHVHVHWYKDGMELGHSGERFLQEDVGTRHRLVAATVTRQDEGTYSCRVGEDSVDFRLRVSEPKVVFAKEQLARRKLQAEAGASATLSCEVAQAQTEVTWYKDGKKLSSSSKVCMEATGCTRRLVVQQAGQADAGEYSCEAGGQRLSFHLDVKEPKVVFAKDQVAHSEVQAEAGASATLSCEVAQAQTEVMWYKDGKKLSSSLKVHVEAKGCRRRLVVQQAGKTDAGDYSCEARGQRVSFRLHITEPKMMFAKEQSVHNEVQAEAGASAMLSCEVAQAQTEVTWYKDGKKLSSSSKVGMEVKGCTRRLVLPQAGKADAGEYSCEAGGQRVSFHLHITEPKGVFAKEQSVHNEVQAEAGTTAMLSCEVAQPQTEVTWYKDGKKLSSSSKVRMEVKGCTRRLVVQQVGKADAGEYSCEAGGQRVSFQLHITEPKAVFAKEQLVHNEVRTEAGASATLSCEVAQAQTEVTWYKDGKKLSSSSKVRIEAAGCMRQLVVQQAGQADAGEYTCEAGGQRLSFHLDVSEPKAVFAKEQLAHRKVQAEAGAIATLSCEVAQAQTEVTWYKDGKKLSSSSKVRMEAVGCTRRLVVQQACQADTGEYSCEAGGQRLSFSLDVAEPKVVFAKEQPVHREVQAQAGASTTLSCEVAQAQTEVMWYKDGKKLSFSSKVRMEAVGCTRRLVVQQAGQAVAGEYSCEAGSQRLSFHLHVAEPKAVFAKEQPASREVQAEAGTSATLSCEVAQAQTEVTWYKDGKKLSSSSKVRMEAVGCTRRLVVQEAGQADAGEYSCKAGDQRLSFHLHVAEPKVVFAKEQPAHREVQAEAGASATLSCEVAQAQTEVTWYKDGKKLSSSSKVRVEAVGCTRRLVVQQAGQAEAGEYSCEAGGQQLSFRLQVAELEPQISERPCRREPLVVKEHEDIILTATLATPSAATVTWLKDGVEIRRSKRHETASQGDTHTLTVHGAQVLDSAIYSCRVGAEGQDFPVQVEEVAAKFCRLLEPVCGELGGTVTLACELSPACAEVVWRCGNTQLRVGKRFQMVAEGPVRSLTVLGLRAEDAGEYVCESRDDHTSAQLTVSVPRVVKFMSGLSTVVAEEGGEATFQCVVSPSDVAVVWFRDGALLQPSEKFAISQSGASHSLTISDLVLEDAGQITVEAEGASSSAALRVREAPVLFKKKLEPQTVEERSSVTLEVELTRPWPELRWTRNATALAPGKNVEIHAEGARHRLVLHNVGFADRGFFGCETPDDKTQAKLTVEMRQVRLVRGLQAVEAREQGTATMEVQLSHADVDGSWTRDGLRFQQGPTCHLAVRGPMHTLTLSGLRPEDSGLMVFKAEGVHTSARLVVTELPVSFSRPLQDVVTTEKEKVTLECELSRPNVDVRWLKDGVELRAGKTMAIAAQGACRSLTIYRCEFADQGVYVCDAHDAQSSASVKVQGRTYTLIYRRVLAEDAGEIQFVAENAESRAQLRVKELPVTLVRPLRDKIAMEKHRGVLECQVSRASAQVRWFKGSQELQPGPKYELVSDGLYRKLIISDVHAEDEDTYTCDAGDVKTSAQFFVEEQSITIVRGLQDVTVMEPAPAWFECETSIPSVRPPKWLLGKTVLQAGGNVGLEQEGTVHRLMLRRTCSTMTGPVHFTVGKSRSSARLVVSDIPVVLTRPLEPKTGRELQSVVLSCDFRPAPKAVQWYKDDTPLSPSEKFKMSLEGQMAELRILRLMPADAGVYRCQAGSAHSSTEVTVEAREVTVTGPLQDAEATEEGWASFSCELSHEDEEVEWSLNGMPLYNDSFHEISHKGRRHTLVLKSIQRADAGIVRASSLKVSTSARLEVRVKPVVFLKALDDLSAEERGTLALQCEVSDPEAHVVWARGSDGVQLGPSDKYDFLHTAGTRGLVVHDVSPEDAGLYTCHVGSEETRARVRVHDLHVGITKRLKTMEVLEGESCSFECVLSHESASDPAMWTVGGKTVGSSSRFQATRQGARGSYILVVREAAPSDAGEVVFSVRGLTSKASLIVRERPAAIIKPLEDQWVAPGEDVELRCELSRAGTPVHWLKDRKAIRKSQKYDVVCEGTMAMLVIRGASLKDAGEYTCEVEASKSTASLHVEEKANCFTEELTNLQVEEKGTAVFTCKTEHPAATVTWRKGLLELRASGKHQPSQEGLTLRLTISALEKADSDTYTCDIGQAQSRAQLLVQGRRVHIIEDLEDVDVQEGSSATFRCRISPANYEPVHWFLDKTPLHANELNEIDAQPGGYHVLTLRQLALKDSGTIYFEAGDQRASAALRVTEKPSVFSRELTDATITEGEDLTLVCETSTCDIPVCWTKDGKTLRGSARCQLSHEGHRAQLLITGATLQDSGRYKCEAGGACSSSIVRVHARPVRFQEALKDLEVLEGGAATLRCVLSSVAAPVKWCYGNNVLRPGDKYSLRQEGAMLELVVRNLRPQDSGRYSCSFGDQTTSATLTVTALPAQFIGKLRNKEATEGATATLRCELSKAAPVEWRKGSETLRDGDRYCLRQDGAMCELQIRGLAMVDAAEYSCVCGEERTSASLTIRPMPAHFIGRLRHQESIEGATATLRCELSKAAPVEWRKGRESLRDGDRHSLRQDGAVCELQICGLAVADAGEYSCVCGEERTSATLTVKALPAKFTEGLRNEEAVEGATAMLWCELSKVAPVEWRKGPENLRDGDRYILRQEGTRCELQICGLAMADAGEYLCVCGQERTSATLTIRALPARFIEDVKNQEAREGATAVLQCELNSAAPVEWARGSGSETLRDGDRYSLRQDGTKCELQIRGLAMADTGEYSCVCGQERTSAMLTVRALPIKFTEGLRNEEATEGATAVLRCELSKMAPVEWWKGHETLRDGDRHSLRQDGARCELQIRGLVAEDAGEYLCMCGKERTSAMLTVRAMPSKFIEGLRNEEATEGDTATLWCELSKAAPVEWRKGHETLRDGDRHSLRQDGSRCELQIRGLAVVDAGEYSCVCGQERTSATLTVRALPARFIEDVKNQEAREGATAVLQCELSKAAPVEWRKGSETLRGGDRYSLRQDGTRCELQIHGLSVADTGEYSCVCGQERTSATLTVRAPQPVFREPLQSLQAEEGSTATLQCELSEPTATVVWSKGGLQLQANGRREPRLQGCTAELVLQDLQREDTGEYTCTCGSQATSATLTVTAAPVRFLRELQHQEVDEGGTAHLCCELSRAGASVEWRKGSLQLFPCAKYQMVQDGAAAELLVRGVEQEDAGDYTCDTGHTQSMASLSVRVPRPKFKTRLQSLEQETGDIARLCCQLSDAESGAVVQWLKEGVELHAGPKYEMRSQGATRELLIHQLEAKDTGEYACVTGGQKTAASLRVTEPEVTIVRGLVDAEVTADEDVEFSCEVSRAGATGVQWCLQGLPLQSNEVTEVAVRDGRIHTLRLKGVTPEDAGTVSFHLGNHASSAQLTVRAPEVTILEPLQDVQLSEGQDASFQCRLSRASGQEARWALGGVPLQANEMNDITVEQGTLHLLTLHKVTLEDAGTVSFHVGTCSSEAQLKVTAKNTVVRGLENVEALEGGEALFECQLSQPEVAAHTWLLDDEPVHTSENAEVVFFENGLRHLLLLKNLRPQDSCRVTFLAGDMVTSAFLTVRGWRLEILEPLKNAAVRAGAQACFTCTLSEAVPVGEASWYINGAAVQPDDSDWTVTADGSHHALLLRSAQPHHAGEVTFACRDAVASARLTVLGLPDPPEDAEVVARSSHTVTLSWAAPMSDGGGGLCGYRVEVKEGATGQWRLCHELVPGPECVVDGLAPGETYRFRVAAVGPVGAGEPVHLPQTVRLAEPPKPVPPQPSAPESRQVAAGEDVSLELEVVAEAGEVIWHKGMERIQPGGRFEVVSQGRQQMLVIKGFTAEDQGEYHCGLAQGSICPAAATFQVALSPASVDEAPQPSLPPEAAQEGDLHLLWEALAARGSRRMSREPTLDSISELPEEDGRSQRLPQEAEEVAPDLSEGYSTADELARTGDADLSHTSSDDESRAGTPSLVTYLKKAGRPGTSPLASKVGAPAAPSVKPQQQQEPLAAVRPPLGDLSTKDLGDPSMDKAAVKIQAAFKGYKVRKEMKQQEGPMFSHTFGDTEAQVGDALRLECVVASKADVRARWLKDGVELTDGRHHHIDQLGDGTCSLLITGLDRADAGCYTCQVSNKFGQVTHSACVVVSGSESEAESSSGGELDDAFRRAARRLHRLFRTKSPAEVSDEELFLSADEGPAEPEEPADWQTYREDEHFICIRFEALTEARQAVTRFQEMFATLGIGVEIKLVEQGPRRVEMCISKETPAPVVPPEPLPSLLTSDAAPVFLTELQNQEVQDGYPVSFDCVVTGQPMPSVRWFKDGKLLEEDDHYMINEDQQGGHQLIITAVVPADMGVYRCLAENSMGVSSTKAELRVDLTSTDYDTAADATESSSYFSAQGYLSSREQEGTESTTDEGQLPQVVEELRDLQVAPGTRLAKFQLKVKGYPAPRLYWFKDGQPLTASAHIRMTDKKILHTLEIISVTREDSGQYAAYISNAMGAAYSSARLLVRGPDEPEEKPASDVHEQLVPPRMLERFTPKKVKKGSSITFSVKVEGRPVPTVHWLREEAERGVLWIGPDTPGYTVASSAQQHSLVLLDVGRQHQGTYTCIASNAAGQALCSASLHVSGLPKVEEQEKVKEALISTFLQGTTQAISAQGLETASFADLGGQRKEEPLAAKEALGHLSLAEVGTEEFLQKLTSQITEMVSAKITQAKLQVPGGDSDEDSKTPSASPRHGRSRPSSSIQESSSESEDGDARGEIFDIYVVTADYLPLGAEQDAITLREGQYVEVLDAAHPLRWLVRTKPTKSSPSRQGWVSPAYLDRRLKLSPEWGAAEAPEFPGEAVSEDEYKARLSSVIQELLSSEQAFVEELQFLQSHHLQHLERCPHVPIAVAGQKAVIFRNVRDIGRFHSSFLQELQQCDTDDDVAMCFIKNQAAFEQYLEFLVGRVQAESVVVSTAIQEFYKKYAEEALLAGDPSQPPPPPLQHYLEQPVERVQRYQALLKELIRNKARNRQNCALLEQAYAVVSALPQRAENKLHVSLMENYPGTLQALGEPIRQGHFIVWEGAPGARMPWKGHNRHVFLFRNHLVICKPRRDSRTDTVSYVFRNMMKLSSIDLNDQVEGDDRAFEVWQEREDSVARGSYLLQARTAIIKSSWVKEICGIQQRLALPVWRPPDFEEELADCTAELGETVKLACRVTGTPKPVISWYKDGKAVQVDPHHILIEDPDGSCALILDSLTGVDSGQYMCFAASAAGNCSTLGKILVQVPPRFVNKVRASPFVEGEDAQFTCTIEGAPYPQIRWYKDGALLTTGNKFQTLSEPRSGLLVLVIRAASKEDLGLYECELVNRLGSARASAELRIQSPMLQAQEQCHREQLVAAVEVTEQETKVPKKTVIIEETITTVVKSPRGQRRSPSKSPSRSPSRCSASPLRPGLLAPDLLYLPGAGQPRRPEAEPGQKPVVPTLYVTEAEAHSPALPGLSGPQPKWVEVEETIEVRVKKMGPQGVSPTTEVPRSSSGHLFTLPGATPGGDPNSNNSNNKLLAQEAWAQGTAMVGVREPLVFRVDARGSVDWAASGMGSLEEEGTMEEAGEEEGEDGDAFVTEESQDTHSLGDRDPKILTHNGRMLTLADLEDYVPGEGETFHCGGPGPGAPDDPPCEVSVIQREIGEPTVGQPVLLSVGHALGPRGPLGLFRPEPRGASPPGPQVRSLEGTSFLLREAPARPVGSAPWTQSFCTRIRRSADSGQSSFTTELSTQTVNFGTVGETVTLHICPDRDGDEAAQP

SEQ ID NO: 5081 - protein, 468 aa, Homo sapiens
MAAPDLSTNLQEEATCAICLDYFTDPVMTDCGHNFCRECIRRCWGQPEGPYACPECRELSPQRNLRPNRPLAKMAEMARRLHPPSPVPQGVCPAHREPLAAFCGDELRLLCAACERSGEHWAHRVRPLQDAAEDLKAKLEKSLEHLRKQMQDALLFQAQADETCVLWQKMVESQRQNVLGEFERLRRLLAEEEQQLLQRLEEEELEVLPRLREGAAHLGQQSAHLAELIAELEGRCQLPALGLLQDIKDALRRVQDVKLQPPEVVPMELRTVCRVPGLVETLRRFRGDVTLDPDTANPELILSEDRRSVQRGDLRQALPDSPERFDPGPCVLGQERFTSGRHYWEVEVGDRTSWALGVCRENVNRKEKGELSAGNGFWILVFLGSYYNSSERALAPLRDPPRRVGIFLDYEAGHLSFYSATDGSLLFIFPEIPFSGTLRPLFSPLSSSPTPMTICRPKGGSGDTLAPQ

SEQ ID NO: 5082 - protein, 270 aa, Homo sapiens
MSPGSGVKSEYMKRYQEPRWEEYGPCYRELLHYRLGRRLLEQAHAPWLWDDWGPAGSSEDSASSESSGAGGPAPRCAPPSPPPPVEPATQEEAERRARGAPEEQDAEAGDAEAEDAEDAALPALPVKDVEDKPEQQTRTRETDKSPTSTEPRQQPSALFARGNRKAVKSPQRSSSKIKENKHPFALYGWGEKQTDTGSQKTHNVCASAPVHEIHESALRAKNRRQVEKRKLVAQRQRAHSVDVEKNRKMKASSSENPWMTEYMRCYSARA

SEQ ID NO: 5083 - protein, 888 aa, Homo sapiens
MDESALLDLLECPVCLERLDASAKVLPCQHTFCKRCLLGIVGSRNELRCPECRTLVGSGVEELPSNILLVRLLDGIKQRPWKPGPGGGSGTNCTNALRSQSSTVANCSSKDLQSSQGGQQPRVQSWSPPVRGIPQLPCAKALYNYEGKEPGDLKFSKGDIIILRRQVDENWYHGEVNGIHGFFPTNFVQIIKPLPQPPPQCKALYDFEVKDKEADKDCLPFAKDDVLTVIRRVDENWAEGMLADKIGIFPISYVEFNSAAKQLIEWDKPPVPGVDAGECSSAAAQSSTAPKHSDTKKNTKKRHSFTSLTMANKSSQASQNRHSMEISPPVLISSSNPTAAARISELSGLSCSAPSQVHISTTGLIVTPPPSSPVTTGPSFTFPSDVPYQAALGTLNPPLPPPPLLAATVLASTPPGATAAAAAAGMGPRPMAGSTDQIAHLRPQTRPSVYVAIYPYTPRKEDELELRKGEMFLVFERCQDGWFKGTSMHTSKIGVFPGNYVAPVTRAVTNASQAKVPMSTAGQTSRGVTMVSPSTAGGPAQKLQGNGVAGSPSVVPAAVVSAAHIQTSPQAKVLLHMTGQMTVNQARNAVRTVAAHNQERPTAAVTPIQVQNAAGLSPASVGLSHHSLASPQPAPLMPGSATHTAAISISRASAPLACAAAAPLTSPSITSASLEAEPSGRIVTVLPGLPTSPDSASSACGNSSATKPDKDSKKEKKGLLKLLSGASTKRKPRVSPPASPTLEVELGSAELPLQGAVGPELPPGGGHGRAGSCPVDGDGPVTTAVAGAALAQDAFHRKASSLDSAVPIAPPPRQACSSLGPVLNESRPVVCERHRVVVSYPPQSEAELELKEGDIVFVHKKREDGWFKGTLQRNGKTGLFPGSFVENI

SEQ ID NO: 5084 - protein, 189 aa, Homo sapiens
MPQTVILPGPAPWGFRLSGGIDFNQPLVITRITPGSKAAAANLCPGDVILAIDGFGTESMTHADAQDRIKAAAHQLCLKIDRGETHLWSPQVSEDGKAHPFKINLESEPQEFKPIGTAHNRRAQPFVAAANIDDKRQVVSASYNSPIGLYSTSNIQDALHGQLRGLIPSSPQKTGTTLNTSIIFGPNLS

SEQ ID NO: 5085 - protein, 364 aa, Homo sapiens
MPQTVILPGPAPWGFRLSGGIDFNQPLVITRITPGSKAAAANLCPGDVILAIDGFGTESMTHADAQDRIKAAAHQLCLKIDRGETHLWSPQVSEDGKAHPFKINLESEPQDGNYFEHKHNIRPKPFVIPGRSSGCSTPSGIDCGSGRSTPSSVSTVSTICPGDLKVAAKLAPNIPLEMELPGVKIVHAQFNTPMQLYSDDNIMETLQGQVSTALGETPLMSEPTASVPPESDVYRMLHDNRNEPTQPRQSGSFRVLQGMVDDGSDDRPAGTRSVRAPVTKVHGGSGGAQRMPLCDKCGSGIVGAVVKARDKYRHPECFVCADCNLNLKQKGYFFIEGELYCETHARARTKPPEGYDTVTLYPKA

SEQ ID NO: 5086 - protein, 316 aa, Homo sapiens
MPQTVILPGPAPWGFRLSGGIDFNQPLVITRITPGSKAAAANLCPGDVILAIDGFGTESMTHADAQDRIKAAAHQLCLKIDRGETHLWSPQVSEDGKAHPFKINLESEPQEFKPIGTAHNRRAQPFVAAANIDDKRQVVSASYNSPIGLYSTSNIQDALHGQLRGLIPSSPQNEPTASVPPESDVYRMLHDNRNEPTQPRQSGSFRVLQGMVDDGSDDRPAGTRSVRAPVTKVHGGSGGAQRMPLCDKCGSGIVGAVVKARDKYRHPECFVCADCNLNLKQKGYFFIEGELYCETHARARTKPPEGYDTVTLYPKA

SEQ ID NO: 5087 - protein, 1100 aa, Homo sapiens
MSYYQRPFSPSAYSLPASLNSSIVMQHGTSLDSTDTYPQHAQSLDGTTSSSIPLYRSSEEEKRVTVIKAPHYPGIGPVDESGIPTAIRTTVDRPKDWYKTMFKQIHMVHKPDDDTDMYNTPYTYNAGLYNPPYSAQSHPAAKTQTYRPLSKSHSDNSPNAFKDASSPVPPPHVPPPVPPLRPRDRSSTEKHDWDPPDRKVDTRKFRSEPRSIFEYEPGKSSILQHERPASLYQSSIDRSLERPMSSASMASDFRKRRKSEPAVGPPRGLGDQSASRTSPGRVDLPGSSTTLTKSFTSSSPSSPSRAKGGDDSKICPSLCSYSGLNGNPSSELDYCSTYRQHLDVPRDSPRAISFKNGWQMARQNAEIWSSTEETVSPKIKSRSCDDLLNDDCDSFPDPKVKSESMGSLLCEEDSKESCPMAWGSPYVPEVRSNGRSRIRHRSARNAPGFLKMYKKMHRINRKDLMNSEVICSVKSRILQYESEQQHKDLLRAWSQCSTEEVPRDMVPTRISEFEKLIQKSKSMPNLGDDMLSPVTLEPPQNGLCPKRRFSIEYLLEEENQSGPPARGRRGCQSNALVPIHIEVTSDEQPRAHVEFSDSDQDGVVSDHSDYIHLEGSSFCSESDFDHFSFTSSESFYGSSHHHHHHHHHHHRHLISSCKGRCPASYTRFTTMLKHERARHENTEEPRRQEMDPGLSKLAFLVSPVPFRRKKNSAPKKQTEKAKCKASVFEALDSALKDICDQIKAEKKRGSLPDNSILHRLISELLPDVPERNSSLRALRRSPLHQPLHPLPPDGAIHCPPYQNDCGRMPRSASFQDVDTANSSCHHQDRGGALQDRESPRSYSSTLTDMGRSAPRERRGTPEKEKLPAKAVYDFKAQTSKELSFKKGDTVYILRKIDQNWYEGEHHGRVGIFPISYVEKLTPPEKAQPARPPPPAQPGEIGEAIAKYNFNADTNVELSLRKGDRVILLKRVDQNWYEGKIPGTNRQGIFPVSYVEVVKKNTKGAEDYPDPPIPHSYSSDRIHSLSSNKPQRPVFTHENIQGGGEPFQALYNYTPRNEDELELRESDVIDVMEKCDDGWFVGTSRRTKFFGTFPGNYVKRL

SEQ ID NO: 5088 - protein, 1462 aa, Homo sapiens
MFRGPKPPIAPKPRLTAPNEWRASVYLNDSLNKCSNGRLPCVDRGLDEGPRSIPKCSESETDEDYIVVPRVPLREDEPKDEGSVGNKALVSPESSAEEEEEREEGGEACGLEGTGAGEDSVAPAAPGAGALSREGEEGTDLALEDEGEGCADEPGTLEQVSRSEEEEKLVQPHRECSLEDSGPWAGEGVFQSDLLLPHIHGEDQEPPDTPGEAEEDDEEGCASTDPAGADEGSGPDRPTEDMGQDAEDTSEEPPEKEELAGVQEAETATDCPEVLEEGCEEATGVTGGEQVDLSEPPDHEKKTNQEVAAATLEDHAQDESAEESCQIVPFENDCMEDFVTSLTGSPYEFFPTESTSFCSESCSPLSESAKGLESEQAPKLGLRAEENPMVGALCGQCGSLQGGAAEGPAAPDVVVVLEEEALDDALANPYVMGVGLPGQAAPGEGGQAASDALGGYGSKEELNCEAEGGLVPADRKNTSTRVRPHSGKVAGYVPETVPEETGPEAGSSAPGIGGAAEEVGKTLLSLEGKPLEASRALPAKPRAFTLYPRSFSVEGREIPVSVYQEPEGSGLDDHRIKRKEDNLSLSCVIGSSGSFSQRNHLPSSGTSTPSSMVDIPPPFDLACITKKPITKSSPSLLIESDSPDKYKKKKSSFKRFLALTFKKKTENKLHVDVNVSSSRSSSESSYHGPSRILEVDRRSLSNSPQLKSRTGKLRASESPSSLIFYRDGKRKGVPFSRTVSRVESFEDRSRPPFLPLPLTKPRSISFPSADTSDYENIPAMNSDYENIQIPPRRPARAGAFTKLFEDQSRALSTANENDGYVDMSSFNAFESKQQSADQDAESAYTEPYKVCPISSAAPKEDLTSDEEQRSSEEEDSASRDPSVTHKVEGQSRALVIAQELLSSEKAYVEMLQHLNLDFHGAVMRALDDMDHEGRDTLAREELRQGLSELPAIHDLHQGILEELEERLSNWESQQKVADVFLAREQGFDHHATHILQFDRYLGLLSENCLHSPRLAAAVREFEQSVQGGSQTAKHRLLRVVQRLFQYQVLLTDYLNNLCPDSAEYDNTQGALSLISKVTDRANDSMEQGENLQKLVHIEHSVRGQGDLLQPGREFLKEGTLMKVTGKNRRPRHLFLMNDVLLYTYPQKDGKYRLKNTLAVANMKVSRPVMEKVPYALKIETSESCLMLSASSCAERDEWYGCLSRALPEDYKAQALAAFHHSVEIRERLGVSLGERPPTLVPVTHVMMCMNCGCDFSLTLRRHHCHACGKIVCRNCSRNKYPLKYLKDRMAKVCDGCFGELKKRGRAVPGLMRERPVSMSFPLSSPRFSGSAFSSVFQSINPSTFKKQKKVPSALTEVAASGEGSAISGYLSRCKRGKRHWKKLWFVIKGKVLYTYMASEDKVALESMPLLGFTIAPEKEEGSSEVGPIFHLYHKKTLFYSFKAEDTNSAQRWIEAMEDASVL

SEQ ID NO: 5089 - protein, 255 aa, Homo sapiens
MASSDLEQLCSHVNEKIGNIKKTLSLRNCGQEPTLKTVLNKIGDEIIVINELLNKLELEIQYQEQTNNSLKELCESLEEDYKDIEHLKENVPSHLPQVTVTQSCVKGSDLDPEEPIKVEEPEPVKKPPKEQRSIKEMPFITCDEFNGVPSYMKSRLTYNQINDVIKEINKAVISKYKILHQPKKSMNSVTRNLYHRFIDEETKDTKGRYFIVEADIKEFTTLKADKKFHVLLNILRHCRRLSEVRGGGLTRYVIT

SEQ ID NO: 5090 - protein, 208 aa, Homo sapiens
MSAGGDFGNPLRKFKLVFLGEQSVGKTSLITRFMYDSFDNTYQATIGIDFLSKTMYLEDRTVRLQLWDTAGQERFRSLIPSYIRDSTVAVVVYDITNLNSFQQTSKWIDDVRTERGSDVIIMLVGNKTDLADKRQITIEEGEQRAKELSVMFIETSAKTGYNVKQLFRRVASALPGMENVQEKSKEGMIDIKLDKPQEPPASEGGCSC

SEQ ID NO: 5091 - protein, 1055 aa, Homo sapiens
MTVEQNVLQQSAAQKHQQTFLNQLREITGINDTQILQQALKDSNGNLELAVAFLTAKNAKTPQQEETTYYQTALPGNDRYISVGSQADTNVIDLTGDDKDDLQRAIALSLAESNRAFRETGITDEEQAISRVLEASIAENKACLKRTPTEVWRDSRNPYDRKRQDKAPVGLKNVGNTCWFSAVIQSLFNLLEFRRLVLNYKPPSNAQDLPRNQKEHRNLPFMRELRYLFALLVGTKRKYVDPSRAVEILKDAFKSNDSQQQDVSEFTHKLLDWLEDAFQMKAEEETDEEKPKNPMVELFYGRFLAVGVLEGKKFENTEMFGQYPLQVNGFKDLHECLEAAMIEGEIESLHSENSGKSGQEHWFTELPPVLTFELSRFEFNQALGRPEKIHNKLEFPQVLYLDRYMHRNREITRIKREEIKRLKDYLTVLQQRLERYLSYGSGPKRFPLVDVLQYALEFASSKPVCTSPVDDIDASSPPSGSIPSQTLPSTTEQQGALSSELPSTSPSSVAAISSRSVIHKPFTQSRIPPDLPMHPAPRHITEEELSVLESCLHRWRTEIENDTRDLQESISRIHRTIELMYSDKSMIQVPYRLHAVLVHEGQANAGHYWAYIFDHRESRWMKYNDIAVTKSSWEELVRDSFGGYRNASAYCLMYINDKAQFLIQEEFNKETGQPLVGIETLPPDLRDFVEEDNQRFEKELEEWDAQLAQKALQEKLLASQKLRESETSVTTAQAAGDPEYLEQPSRSDFSKHLKEETIQIITKASHEHEDKSPETVLQSAIKLEYARLVKLAQEDTPPETDYRLHHVVVYFIQNQAPKKIIEKTLLEQFGDRNLSFDERCHNIMKVAQAKLEMIKPEEVNLEEYEEWHQDYRKFRETTMYLIIGLENFQRESYIDSLLFLICAYQNNKELLSKGLYRGHDEELISHYRRECLLKLNEQAAELFESGEDREVNNGLIIMNEFIVPFLPLLLVDEMEEKDILAVEDMRNRWCSYLGQEMEPHLQEKLTDFLPKLLDCSMEIKSFHEPPKLPSYSTHELCERFARIMLSLSRTPADGR

SEQ ID NO: 5092 - protein, 1087 aa, Homo sapiens
MTVEQNVLQQSAAQKHQQTFLNQLREITGINDTQILQQALKDSNGNLELAVAFLTAKNAKTPQQEETTYYQTALPGNDRYISVGSQADTNVIDLTGDDKDDLQRAIALSLAESNRAFRETGITDEEQAISRVLEASIAENKACLKRTPTEVWRDSRNPYDRKRQDKAPVGLKNVGNTCWFSAVIQSLFNLLEFRRLVLNYKPPSNAQDLPRNQKEHRNLPFMRELRYLFALLVGTKRKYVDPSRAVEILKDAFKSNDSQQQDVSEFTHKLLDWLEDAFQMKAEEETDEEKPKNPMVELFYGRFLAVGVLEGKKFENTEMFGQYPLQVNGFKDLHECLEAAMIEGEIESLHSENSGKSGQEHWFTELPPVLTFELSRFEFNQALGRPEKIHNKLEFPQVLYLDRYMHRNREITRIKREEIKRLKDYLTVLQQRLERYLSYGSGPKRFPLVDVLQYALEFASSKPVCTSPVDDIDASSPPSGSIPSQTLPSTTEQQGALSSELPSTSPSSVAAISSRSVIHKPFTQSRIPPDLPMHPAPRHITEEELSVLESCLHRWRTEIENDTRDLQESISRIHRTIELMYSDKSMIQVPYRLHAVLVHEGQANAGHYWAYIFDHRESRWMKYNDIAVTKSSWEELVRDSFGGYRNASAYCLMYINDKAQFLIQEEFNKETGQPLVGIETLPPDLRDFVEEDNQRFEKELEEWDAQLAQKALQEKLLASQKLRESETSVTTAQAAGDPEYLEQPSRSDFSKHLKEETIQIITKASHEHEDKSPETVLQSIMMTPNMQGIIMAIGKSRSVYDRCGPEAGFFKAIKLEYARLVKLAQEDTPPETDYRLHHVVVYFIQNQAPKKIIEKTLLEQFGDRNLSFDERCHNIMKVAQAKLEMIKPEEVNLEEYEEWHQDYRKFRETTMYLIIGLENFQRESYIDSLLFLICAYQNNKELLSKGLYRGHDEELISHYRRECLLKLNEQAAELFESGEDREVNNGLIIMNEFIVPFLPLLLVDEMEEKDILAVEDMRNRWCSYLGQEMEPHLQEKLTDFLPKLLDCSMEIKSFHEPPKLPSYSTHELCERFARIMLSLSRTPADGR

SEQ ID NO: 5093 - protein, 852 aa, Homo sapiens
MSSVSPIQIPSRLPLLLTHEGVLLPGSTMRTSVDSARNLQLVRSRLLKGTSLQSTILGVIPNTPDPASDAQDLPPLHRIGTAALAVQVVGSNWPKPHYTLLITGLCRFQIVQVLKEKPYPIAEVEQLDRLEEFPNTCKMREELGELSEQFYKYAVQLVEMLDMSVPAVAKLRRLLDSLPREALPDILTSIIRTSNKEKLQILDAVSLEERFKMTIPLLVRQIEGLKLLQKTRKPKQDDDKRVIAIRPIRRITHISGTLEDEDEDEDNDDIVMLEKKIRTSSMPEQAHKVCVKEIKRLKKMPQSMPEYALTRNYLELMVELPWNKSTTDRLDIRAARILLDNDHYAMEKLKKRVLEYLAVRQLKNNLKGPILCFVGPPGVGKTSVGRSVAKTLGREFHRIALGGVCDQSDIRGHRRTYVGSMPGRIINGLKTVGVNNPVFLLDEVDKLGKSLQGDPAAALLEVLDPEQNHNFTDHYLNVAFDLSQVLFIATANTTATIPAALLDRMEIIQVPGYTQEEKIEIAHRHLIPKQLEQHGLTPQQIQIPQVTTLDIITRYTREAGVRSLDRKLGAICRAVAVKVAEGQHKEAKLDRSDVTEREGCREHILEDEKPESISDTTDLALPPEMPILIDFHALKDILGPPMYEMEVSQRLSQPGVAIGLAWTPLGGEIMFVEASRMDGEGQLTLTGQLGDVMKESAHLAISWLRSNAKKYQLTNAFGSFDLLDNTDIHLHFPAGAVTKDGPSAGVTIVTCLASLFSGRLVRSDVAMTGEITLRGLVLPVGGIKDKVLAAHRAGLKQVIIPRRNEKDLEGIPGNVRQDLSFVTASCLDEVLNAAFDGGFTVKTRPGLLNSKL

SEQ ID NO: 5094 - protein, 129 aa, Homo sapiens
MADGGGGGGTGAVGGGGTSQASAGAATGATGASGGGGPINPASLPPGDPQLIALIVEQLKSRGLFDSFRRDCLADVDTKPAYQNLRQKVDNFVSTHLDKQEWNPTMNKNQLRNGLRQSVVQIRQTPFES

SEQ ID NO: 5095 - protein, 474 aa, Homo sapiens
MDEAGSSASGGGFRPGVDSLDEPPNSRIFLVISKYTPESVLRERFSPFGDIQDIWVVRDKHTKESKGIAFVKFARSSQACRAMEEMHGQCLGPNDTKPIKVFIAQSRSSGSHRDVEDEELTRIFVMIPKSYTEEDLREKFKVYGDIEYCSIIKNKVTGESKGLGYVRYLKPSQAAQAIENCDRSFRAILAEPKNKASESSEQDYYSNMRQEALGHEPRVNMFPFEQQSEFSSFDKNDSRGQEAISKRLSVVSRVPFTEEQLFSIFDIVPGLEYCEVQRDPYSNYGHGVVQYFNVASAIYAKYKLHGFQYPPGNRIGVSFIDDGSNATDLLRKMATQMVAAQLASMVWNNPSQQQFMQFGGSSGSQLPQIQTDVVLPSCKKKAPAETPVKERLFIVFNPHPLPLDVLEDIFCRFGNLIEVYLVSGKNVGYAKYADRISANDAIATLHGKILNGVRLKVMLADSPREESNKRQRTY

SEQ ID NO: 5096 - protein, 645 aa, Homo sapiens
MRPRKAFLLLLLLGLVQLLAVAGAEGPDEDSSNRENAIEDEEEEEEEDDDEEEDDLEVKEENGVLVLNDANFDNFVADKDTVLLEFYAPWCGHCKQFAPEYEKIANILKDKDPPIPVAKIDATSASVLASRFDVSGYPTIKILKKGQAVDYEGSRTQEEIVAKVREVSQPDWTPPPEVTLVLTKENFDEVVNDADIILVEFYAPWCGHCKKLAPEYEKAAKELSKRSPPIPLAKVDATAETDLAKRFDVSGYPTLKIFRKGRPYDYNGPREKYGIVDYMIEQSGPPSKEILTLKQVQEFLKDGDDVIIIGVFKGESDPAYQQYQDAANNLREDYKFHHTFSTEIAKFLKVSQGQLVVMQPEKFQSKYEPRSHMMDVQGSTQDSAIKDFVLKYALPLVGHRKVSNDAKRYTRRPLVVVYYSVDFSFDYRAATQFWRSKVLEVAKDFPEYTFAIADEEDYAGEVKDLGLSESGEDVNAAILDESGKKFAMEPEEFDSDTLREFVTAFKKGKLKPVIKSQPVPKNNKGPVKVVVGKTFDSIVMDPKKDVLIEFYAPWCGHCKQLEPVYNSLAKKYKGQKGLVIAKMDATANDVPSDRYKVEGFPTIYFAPSGDKKNPVKFEGGDRDLEHLSKFIEEHATKLSRTKEEL

SEQ ID NO: 5097 - protein, 445 aa, Homo sapiens
MYPNPLIYCTCWDPWNLGPRKLIKTPQLPRKNSTGSSKLTPLVPAPKNHNYLQPTKPVVSPKMKIHSARQEETNKSFYEVINVSPGYQLVRNREQISVTLGDEMFDRKKRWESEIPDKGRFSRTNIISDLEEQISELTAIIEQMNRDHQSAQKLLSSEMDLRCAEMKQNFENKNRELKEAHEAELSELENNYKAALKAEKLAAQEKLEEMGKEYKYLKNMFRTYQDSIYDEMEEKWSKQKAKWKKDEKFERENILLQQKKKMTKKFEMESGEEDKKINESCSAVFENFIQEKEELLKQHQSDTLQLEELRKTKEVPWRRDQINRHWHDVLQQLLLMQVMQEELHAQALILESLNTNLYYTQLELQKEKAIVGNLEKMLQTKFAETEEKYKHTIQILTEENIHLKQKIISKNEEICEGCSGRLASITVSKDDSDTVQDGSKKGQES

SEQ ID NO: 5098 - protein, 623 aa, Homo sapiens
MEPPQETNRPFSTLDNRSGQVQVLSATPLLQRNPYSSPDIMHIKGSEASSVPYALNQGTTALPKNKNQEGTGHRLLNMLRKTLKESDSEELEITQETPNLVPFGDVVGCLGIHIKNCRHFMPKISLQHYANLFIRISINKAVKCTKMCSLLSKNDEKNTVIKFDEVKYFSVQVPRRYDDKRNNILLELIQYDNREKRAFLLGSVQIHLYEVIQKGCFIEEVQVLHGNIFVCRLEVEFMFSYGNFGYGFSHQLKPLQKITEPSMFMNLAPPPERTDPVTKVITPQTVEYPAFLSPDLNVTVGTPAVQSSNQPSVVRLEKLQQQPRERLEKMKKEYRNLNTWIDKANYLESILMPKLEHKDSEETNIDEASENTKSNHPEEELENIVGVDIPLVNEEAETTANELLDNDSEKGLTIPTLNQSDQDNSTADASKNDESTPSPTEVHSLCTISNQETIKAGRIPPLGERQSESMPDRKMKNVFFPLEVKLKDNYPSILKADSSLSEVAFSPKEYNSPSFRPEYIEFKPKFQDCSDKFEDLHDMTSFTHLKKVKSRSRLLGKSSDDIHNHARHSARPYTAPEVNKQRESYSGKFTSRRMVSSGLVHINDKTSDYEMHKMRPKKIKRGY

SEQ ID NO: 5099 - protein, 1197 aa, Homo sapiens
MHIKSIILEGFKSYAQRTEVNGFDPLFNAITGLNGSGKSNILDSICFLLGISNLSQVRASNLQDLVYKNGQAGITKASVSITFDNSDKKQSPLGFEVHDEITVTRQVVIGGRNKYLINGVNANNTRVQDLFCSVGLNVNNPHFLIMQGRITKVLNMKPPEILSMIEEAAGTRMYEYKKIAAQKTIEKKEAKLKEIKTILEEEITPTIQKLKEERSSYLEYQKVMREIEHLSRLYIAYQFLLAEDTKVRSAEELKEMQDKVIKLQEELSENDKKIKALNHEIEELEKRKDKETGGILRSLEDALAEAQRVNTKSQSAFDLKKKNLACEESKRKELEKNMVEDSKTLAAKEKEVKKITDGLHALQEASNKDAEALAAAQQHFNAVSAGLSSNEDGAEATLAGQMMACKNDISKAQTEAKQAQMKLKHAQQELKNKQAEVKKMDSGYRKDQEALEAVKRLKEKLEAEMKKLNYEENKEESLLEKRRQLSRDIGRLKETYEALLARFPNLRFAYKDPEKNWNRNCVKGLVASLISVKDTSATTALELVAGERLYNVVVDTEVTGKKLLERGELKRRYTIIPLNKISARCIAPETLRVAQNLVGPDNVHVALSLVEYKPELQKAMEFVFGTTFVCDNMDNAKKVAFDKRIMTRTVTLGGDVFDPHGTLSGGARSQAASILTKFQELKDVQDELRIKENELRALEEELAGLKNTAEKYRQLKQQWEMKTEEADLLQTKLQQSSYHKQQEELDALKKTIEESEETLKNTKEIQRKAEEKYEVLENKMKNAEAERERELKDAQKKLDCAKTKADASSKKMKEKQQEVEAITLELEELKREHTSYKQQLEAVNEAIKSYESQIEVMAAEVAKNKESVNKAQEEVTKQKEVITAQDTVIKAKYAEVAKHKEQNNDSQLKIKELDHNISKHKREAEDGAAKVSKMLKDYDWINAERHLFGQPNSAYDFKTNNPKEAGQRLQKLQEMKEKLGRNVNMRAMNVLTEAEERYNDLMKKKRIVENDKSKILTTIEDLDQKKNQALNIAWQKVNKDFGSIFSTLLPGANAMLAPPEGQTVLDGLEFKVALGNTWKENLTELSGGQRSLVALSLILSMLLFKPAPIYILDEVDAALDLSHTQNIGQMLRTHFTHSQFIVVSLKEGMFNNANVLFKTKFVDGVSTVARFTQCQNGKISKEAKSKAKPPKGAHVEV

SEQ ID NO: 5100 - protein, 359 aa, Homo sapiens
MRTADREARPGLPSLLLLLLAGAGLSAASPPAAPRFNVSLDSVPELRWLPVLRHYDLDLVRAAMAQVIGDRVPKWVHVLIGKVVLELERFLPQPFTGEIRGMCDFMNLSLADCLLVNLAYESSVFCTSIVAQDSRGHIYHGRNLDYPFGNVLRKLTVDVQFLKNGQIAFTGTTFIGYVGLWTGQSPHKFTVSGDERDKGWWWENAIAALFRRHIPVSWLIRATLSESENFEAAVGKLAKTPLIADVYYIVGGTSPREGVVITRNRDGPADIWPLDPLNGAWFRVETNYDHWKPAPKEDDRRTSAIKALNATGQANLSLEALFQILSVVPVYNNFTIYTTVMSAGSPDKYMTRIRNPSRK

SEQ ID NO: 5101 - protein, 548 aa, Homo sapiens
MALHVPKAPGFAQMLKEGAKHFSGLEEAVYRNIQACKELAQTTRTAYGPNGMNKMVINHLEKLFVTNDAATILRELEVQHPAAKMIVMASHMQEQEVGDGTNFVLVFAGALLELAEELLRIGLSVSEVIEGYEIACRKAHEILPNLVCCSAKNLRDIDEVSSLLRTSIMSKQYGNEVFLAKLIAQACVSIFPDSGHFNVDNIRVCKILGSGISSSSVLHGMVFKKETEGDVTSVKDAKIAVYSCPFDGMITETKGTVLIKTAEELMNFSKGEENLMDAQVKAIADTGANVVVTGGKVADMALHYANKYNIMLVRLNSKWDLRRLCKTVGATALPRLTPPVLEEMGHCDSVYLSEVGDTQVVVFKHEKEDGAISTIVLRGSTDNLMDDIERAVDDGVNTFKVLTRDKRLVPGGGATEIELAKQITSYGETCPGLEQYAIKKFAEAFEAIPRALAENSGVKANEVISKLYAVHQEGNKNVGLDIEAEVPAVKDMLEAGILDTYLGKYWAIKLATNAAVTVLRVDQIIMAKPAGGPKPPSGKKDWDDDQND

SEQ ID NO: 5102 - protein, 229 aa, Homo sapiens
MNIRNAQPDDLMNMQHCNLLCLPENYQMKYYLYHGLSWPQLSYIAEDEDGKIVGYVLAKMEEEPDDVPHGHITSLAVKRSHRRLGLAQKLMDQASRAMIENFNAKYVSLHVRKSNRPALHLYSNTLNFQISEVEPKYYADGEDAYAMKRDLSQMADELRRQMDLKKGGYVVLGSRENQETQGSTLSDSEEACQQKNPATEESGSDSKEPKESVESTNVQDSSESSDSTS

SEQ ID NO: 5103 - protein, 457 aa, Homo sapiens
MSALRRSGYGPSDGPSYGRYYGPGGGDVPVHPPPPLYPLRPEPPQPPISWRVRGGGPAETTWLGEGGGGDGYYPSGGAWPEPGRAGGSHQEQPPYPSYNSNYWNSTARSRAPYPSTYPVRPELQGQSLNSYTNGAYGPTYPPGPGANTASYSGAYYAPGYTQTSYSTEVPSTYRSSGNSPTPVSRWIYPQQDCQTEAPPLRGQVPGYPPSQNPGMTLPHYPYGDGNRSVPQSGPTVRPQEDAWASPGAYGMGGRYPWPSSAPSAPPGNLYMTESTSPWPSSGSPQSPPSPPVQQPKDSSYPYSQSDQSMNRHNFPCSVHQYESSGTVNNDDSDLLDSQVQYSAEPQLYGNATSDHPNNQDQSSSLPEECVPSDESTPPSIKKIIHVLEKVQYLEQEVEEFVGKKTDKAYWLLEEMLTKELLELDSVETGGQDSVRQARKEAVCKIQAILEKLEKKGL

SEQ ID NO: 5104 - protein, 1065 aa, Homo sapiens
MQSTDLGNKESGKIWHRKPSPATRDGIIVNIIHNTSDYHPKVLRFLNVAFDGTGDCLIAGDHQGNIYVFDLHGNRFNLVQRTAQACTALAFNLRRKSEFLVALADYSIKCFDTVTKELVSWMRGHESSVFSISVHASGKYAITTSSDTAQLWDLDTFQRKRKLNIRQSVGIQKVFFLPLSNTILSCFKDNSIFAWECDTLFCKYQLPAPPESSSILYKVFAVTRDGRILAAGGKSNHLHLWCLEARQLFRIIQMPTKVRAIRHLEFLPDSFDAGSNQVLGVLSQDGIMRFINMQTCKLLFEIGSLDEGISSSAISPHGRYIASIMENGSLNIYSVQALTQEINKPPPPLVKVIEDLPKNKLSSSDLKMKVTSGRVQQPAKSRESKMQTRILKQDLTGDFESKKNELPDGLNKKRLQILLKGYGEYPTKYRMFIWRSLLQLPENHTAFSTLIDKGTHVAFLNLQKKYPIKSRKLLRVLQRTLSALAHWSVIFSDTPYLPLLAFPFVKLFQNNQLICFEVIATLIINWCQHWFEYFPNPPINILSMIENVLAFHDKELLQHFIDHDITSQLYAWPLLETVFSEVLTREEWLKLFDNIFSNHPSFLLMTVVAYNICSRTPLLSCNLKDDFEFFFHHRNNLDINVVIRQVYHLMETTPTDIHPDSMLNVFVALTKGQYPVFNQYPKFIVDYQTQERERIRNDELDYLRERQTVEDMQAKVDQQRVEDEAWYQKQELLRKAEETRREMLLQEEEKMIQQRQRLAAVKRELKVKEMHLQDAARRRFLKLQQDQQEMELRRLDDEIGRKVYMRDREIAATARDLEMRQLELESQKRLYEKNLTENQEALAKEMRADADAYRRKVDLEEHMFHKLIEAGETQSQKTQKVIKENLAKAEQACLNTDWQIQSLHKQKCDDLQRNKCYQEVAKLLRENRRKEIEIINAMVEEEAKKWKEAEGKEFRLRSAKKASALSDASRKWFLKQEINAAVEHAENPCHKEEPRFQNEQDSSCLAASQLNDSSEMDPSTQISLNRRAVEWDTTGQNLIKKVRNLRQRLTARARHRCQTPHLLAA

SEQ ID NO: 5105 - protein, 205 aa, Homo sapiens
MEGNGPAAVHYQPASPPRDACVYSSCYCEENIWKLCEYIKNHDQYPLEECYAVFISNERKMIPIWKQQARPGDGPVIWDYHVVLLHVSSGGQNFIYDLDTVLPFPCLFDTYVEDAFKSDDDIHPQFRRKFRVIRADSYLKNFASDRSHMKDSSGNWREPPPPYPCIETGDSKMNLNDFISMDPKVGWGAVYTLSEFTHRFGSKNC

SEQ ID NO: 5106 - protein, 657 aa, Homo sapiens
MSQVLFHQLVPLQVKCKDCEERRVSIRMSIELQSVSNPVHRKDLVIRLTDDTDPFFLYNLVISEEDFQSLKFQQGLLVDFLAFPQKFIDLLQQCTQEHAKEIPRFLLQLVSPAAILDNSPAFLNVVETNPFKHLTHLSLKLLPGNDVEIKKFLAGCLKCSKEEKLSLMQSLDDATKQLDFTRKTLAEKKQELDKLRNEWASHTAALTNKHSQELTNEKEKALQAQVQYQQQHEQQKKDLEILHQQNIHQLQNRLSELEAANKDLTERKYKGDSTIRELKAKLSGVEEELQRTKQEVLSLRRENSTLDVECHEKEKHVNQLQTKVAVLEQEIKDKDQLVLRTKEAFDTIQEQKVVLEENGEKNQVQLGKLEATIKSLSAELLKANEIIKKLQGDLKTLMGKLKLKNTVTIQQEKLLAEKEEKLQKEQKELQDVGQSLRIKEQEVCKLQEQLEATVKKLEESKQLLKNNEKLITWLNKELNENQLVRKQDVLGPSTTPPAHSSSNTIRSGISPNLNVVDGRLTYPTCGIGYPVSSAFAFQNTFPHSISAKNTSHPGSGTKVQFNLQFTKPNASLGDVQSGATISMPCSTDKENGENVGLESKYLKKREDSIPLRGLSQNLFSNSDHQRDGTLGALHTSSKPTALPSASSAYFPGQLPNS

SEQ ID NO: 5107 - protein, 78 aa, Homo sapiens
MRFMMMRAENFFILRRKPVEGYDISFLITNFHTEQMYKHKLVDFVIHFMEEIDKEISEMKLSVNARARIVAEEFLKNF

SEQ ID NO: 5108 - protein, 310 aa, Homo sapiens
MPLLVEGRRVRLPQSAGDLVRAHPPLEERARLLRGQSVQQVGPQGLLYVQQRELAVTSPKDGSISILGSDDATTCHIVVLRHTGNGATCLTHCDGTDTKAEVPLIMNSIKSFSDHAQCGRLEVHLVGGFSDDRQLSQKLTHQLLSEFDRQEDDIHLVTLCVTELNDREENENHFPVIYGIAVNIKTAEIYRASFQDRGPEEQLRAARTLAGGPMISIYDAETEQLRIGPYSWTPFPHVDFWLHQDDKQILENLSTSPLAEPPHFVEHIRSTLMFLKKHPSPAHTLFSGNKALLYKKNEDGLWEKISSPGS

SEQ ID NO: 5109 - protein, 307 aa, Homo sapiens
MTETTKTHVILLACGSFNPITKGHIQMFERARDYLHKTGRFIVIGGIVSPVHDSYGKQGLVSSRHRLIMCQLAVQNSDWIRVDPWECYQDTWQTTCSVLEHHRDLMKRVTGCILSNVNTPSMTPVIGQPQNETPQPIYQNSNVATKPTAAKILGKVGESLSRICCVRPPVERFTFVDENANLGTVMRYEEIELRILLLCGSDLLESFCIPGLWNEADMEVIVGDFGIVVVPRDAADTDRIMNHSSILRKYKNNIMVVKDDINHPMSVVSSTKSRLALQHGDGHVVDYLSQPVIDYILKSQLYINASG

SEQ ID NO: 5110 - protein, 491 aa, Homo sapiens
MEEGKMDENEWGYHGEGNKSLVVAHAQRCVVLRFLKFPPNRKKTSEEIFQHLQNIVDFGKNVMKEFLGENYVHYGEVVQLPLEFVKQLCLKIQSERPESRCDKDLDTLSGYAMCLPNLTRLQTYRFAEHRPILCVEIKPKCGFIPFSSDVTHEMKHKVCRYCMHQHLKVATGKWKQISKYCPLDLYSGNKQRMHFALKSLLQEAQNNLKIFKNGELIYGCKDARSPVADWSELAHHLKPFFFPSNGLASGPHCTRAVIRELVHVITRVLLSGSDKGRAGTLSPGLGPQGPRVCEASPFSRSLRCQGKNTPERSGLPKGCLLYKTLQVQMLDLLDIEGLYPLYNRVERYLEEFPEERKTLQIDGPYDEAFYQKLLDLSTEDDGTVAFALTKVQQYRVAMTAKDCSIMIALSPCLQDASSDQRPVVPSSRSRFAFSVSVLDLDLKPYESIPHQYKLDGKIVNYYSKTVRAKDNAVMSTRFKESEDCTLVLHKV

SEQ ID NO: 5111 - protein, 879 aa, Homo sapiens
MMFYRLLSIVGRQRASPGWQNWSSARNSTSAAEARSMALPTQAQVVICGGGITGTSVAYHLSKMGWKDIVLLEQGRLAAGSTRFCAGILSTARHLTIEQKMADYSNKLYYQLEQETGIQTGYTRTGSIFLAQTQDRLISLKRINAGLNVIGIPSEIISPKKVAELHHLLNVHDLVGAMHVPEDAVVSSADVALALASAASQNGVQIYDRTSVLHVMVKKGQVTGVETDKGQIECQYFVNCAGQWAYELGLSNEEPVSIPLHACEHFYLLTRPLETPLQSSTPTIVDADGRIYIRNWQGGILSGGFEKNPKPIFTEGKNQLEIQNLQEDWDHFEPLLSSLLRRMPELETLEIMKLVNCPETFTPDMRCIMGESPAVQGYFVLAGMNSAGLSFGGGAGKYLAEWMVHGYPSENVWELDLKRFGALQSSRTFLRHRVMEVMPLMYDLKVPRWDFQTGRQLRTSPLYDRLDAQGARWMEKHGFERPKYFVPPDKDLLALEQSKTFYKPDWFDIVESEVKCCKEAVCVIDMSSFTKFEITSTGDQALEVLQYLFSNDLDVPVGHIVHTGMLNEGGGYENDCSIARLNKRSFFMISPTDQQVHCWAWLKKHMPKDSNLLLEDVTWKYTALNLIGPRAVDVLSELSYAPMTPDHFPSLFCKEMSVGYANGIRVMSMTHTGEPGFMLYIPIEYALHVYNEVMSVGQKYGIRNAGYYALRSLRIEKFFAFWGQDINNLTTPLECGRESRVKLEKGMDFIGRDALLQQKQNGVYKRLTMFILDDHDSDLDLWPWWGEPIYRNGQYVGKTTSSAYSYSLERHVCLGFVHNFSEDTGEEQVVTADFINRGEYEIDIAGYRFQAKAKLYPVASLFTQKRRKDDMELSDLHGK

SEQ ID NO: 5112 - protein, 479 aa, Homo sapiens
MATDSWALAVDEQEAAAESLSNLHLKEEKIKPDTNGAVVKTNANAEKTDEEEKEDRAAQSLLNKLIRSNLVDNTNQVEVLQRDPNSPLYSVKSFEELRLKPQLLQGVYAMGFNRPSKIQENALPLMLAEPPQNLIAQSQSGTGKTAAFVLAMLSQVEPANKYPQCLCLSPTYELALQTGKVIEQMGKFYPELKLAYAVRGNKLERGQKISEQIVIGTPGTVLDWCSKLKFIDPKKIKVFVLDEADVMIATQGHQDQSIRIQRMLPRNCQMLLFSATFEDSVWKFAQKVVPDPNVIKLKREEETLDTIKQYYVLCSSRDEKFQALCNLYGAITIAQAMIFCHTRKTASWLAAELSKEGHQVALLSGEMMVEQRAAVIERFREGKEKVLVTTNVCARGIDVEQVSVVINFDLPVDKDGNPDNETYLHRIGRTGRFGKRGLAVNMVDSKHSMNILNRIQEHFNKKIERLDTDDLDEIEKIAN

SEQ ID NO: 5113 - protein, 1084 aa, Homo sapiens
MEQPKGVDWTVIILTCQYKDSVQVFQRELEVRQKREQIPAGTLLLAVEDPEKRVGSGGATLNALLVAAEHLSARAGFTVVTSDVLHSAWILILHMGRDFPFDDCGRAFTCLPVENPEAPVEALVCNLDCLLDIMTYRLGPGSPPGVWVCSTDMLLSVPANPGISWDSFRGARVIALPGSPAYAQNHGVYLTDPQGLVLDIYYQGTEAEIQRCVRPDGRVPLVSGVVFFSVETAERLLATHVSPPLDACTYLGLDSGARPVQLSLFFDILHCMAENVTREDFLVGRPPELGQGDADVAGYLQSARAQLWRELRDQPLTMAYVSSGSYSYMTSSASEFLLSLTLPGAPGAQIVHSQVEEQQLLAAGSSVVSCLLEGPVQLGPGSVLQHCHLQGPIHIGAGCLVTGLDTAHSKALHGRELRDLVLQGHHTRLHGSPGHAFTLVGRLDSWERQGAGTYLNVPWSEFFKRTGVRAWDLWDPETLPAEYCLPSARLFPVLHPSRELGPQDLLWMLDHQEDGGEALRAWRASWRLSWEQLQPCLDRAATLASRRDLFFRQALHKARHVLEARQDLSLRPLIWAAVREGCPGPLLATLDQVAAGAGDPGVAARALACVADVLGCMAEGRGGLRSGPAANPEWMRPFSYLECGDLAAGVEALAQERDKWLSRPALLVRAARHYEGAGQILIRQAVMSAQHFVSTEQVELPGPGQWVVAECPARVDFSGGWSDTPPLAYELGGAVLGLAVRVDGRRPIGARARRIPEPELWLAVGPRQDEMTVKIVCRCLADLRDYCQPHAPGALLKAAFICAGIVHVHSELQLSEQLLRTFGGGFELHTWSELPHGSGLGTSSILAGTALAALQRAAGRVVGTEALIHAVLHLEQVLTTGGGWQDQVGGLMPGIKVGRSRAQLPLKVEVEEVTVPEGFVQKLNDHLLLVYTGKTRLARNLLQDVLRSWYARLPAVVQNAHSLVRQTEECAEGFRQGSLPLLGQCLTSYWEQKKLMAPGCEPLTVRRMMDVLAPHVHGQSLAGAGGGGFLYLLTKEPQQKEALEAVLAKTEGLGNYSIHLVEVDTQGLSLKLLGTEASTCCPFP

SEQ ID NO: 5114 - protein, 712 aa, Homo sapiens
MQPGSAPPPGRMDPSAPQPRAETSGKDIWHPGERCLAPSPDNGKLCEASIKSITVDENGKSFAVVLYADFQERKIPLKQLQEVKFVKDCPRNLIFDDEDLEKPYFPNRKFPSSSVAFKLSDNGDSIPYTINRYLRDYQREGTRFLYGHYIHGGGCILGDDMGLGKTVQVISFLAAVLHKKGTREDIENNMPEFLLRSMKKEPLSSTAKKMFLIVAPLSVLYNWKDELDTWGYFRVTVLHGNRKDNELIRVKQRKCEIALTTYETLRLCLDELNSLEWSAVIVDEAHRIKNPKARVTEVMKALKCNVRIGLTGTILQNNMKELWCVMDWAVPGLLGSGTYFKKQFSDPVEHGQRHTATKRELATGRKAMQRLAKKMSGWFLRRTKTLIKDQLPKKEDRMVYCSLTDFQKAVYQTVLETEDVTLILQSSEPCTCRSGQKRRNCCYKTNSHGETVKTLYLSYLTVLQKVANHVALLQAASTSKQQETLIKRICDQVFSRFPDFVQKSKDAAFETLSDPKYSGKMKVLQQLLNHCRKNRDKVLLFSFSTKLLDVLQQYCMASGLDYRRLDGSTKSEERLKIVKEFNSTQDVNICLVSTMAGGLGLNFVGANVVVLFDPTWNPANDLQAIDRAYRIGQCRDVKVLRLISLGTVEEIMYLRQIYKQQLHCVVVGSENAKRYFEAVQGSKEHQGELFGIHNLFKFRSQGSCLTKDILEV

SEQ ID NO: 5115 - protein, 403 aa, Homo sapiens
MKQRKGQGSGGSRGRKKRGLSDISPSTSLPPLVEGQLRCFLKLTVNRVIWKIAKPPTCVLVRVRWWGETSDGTLFCPRDALQTEPKAVRTTTRYAIRCGPKQFTSYLTDMAVLVLEVITKLDGLPIGRVQINGLAQLSPTHQINGFFTIVSSTSKKLGELQVSLALEPLSETYDSYHPLPTTDMTENVLLSKQGFRENTEPSSTQFQVPSRPRDIHTIKIDGKELAANSSRSTTPRGKDHVCFAENPDTIKDSSFGLQHSLNSGQSLESVTLKGRAPRKQMSLLNSSEFQPQIRTVAKSHSDSCILSSNNLPTKDLLSALLEQGNKLRNAMVISAMKSSPETSMLLDQVHPLLMKILLEHQHRSEPFLGIGLKTTLKITSSLQLRIHFGDMTQKLIPELYSCY

SEQ ID NO: 5116 - protein, 1219 aa, Homo sapiens
MGKKQKNKSEDSTKDDIDLDALAAEIEGAGAAKEQEPQKSKGKKKKEKKKQDFDEDDILKELEELSLEAQGIKADRETVAVKPTENNEEEFTSKDKKKKGQKGKKQSFDDNDSEELEDKDSKSKKTAKPKVEMYSGSDDDDDFNKLPKKAKGKAQKSNKKWDGSEEDEDNSKKIKERSRINSSGESGDESDEFLQSRKGQKKNQKNKPGPNIESGNEDDDASFKIKTVAQKKAEKKERERKKRDEEKAKLRKLKEKEELETGKKDQSKQKESQRKFEEETVKSKVTVDTGVIPASEEKAETPTAAEDDNEGDKKKKDKKKKKGEKEEKEKEKKKGPSKATVKAMQEALAKLKEEEERQKREEEERIKRLEELEAKRKEEERLEQEKRERKKQKEKERKERLKKEGKLLTKSQREARARAEATLKLLQAQGVEVPSKDSLPKKRPIYEDKKRKKIPQQLESKEVSESMELCAAVEVMEQGVPEKEETPPPVEPEEEEDTEDAGLDDWEAMASDEETEKVEGNKVHIEVKENPEEEEEEEEEEEEDEESEEEEEEEGESEGSEGDEEDEKVSDEKDSGKTLDKKPSKEMSSDSEYDSDDDRTKEERAYDKAKRRIEKRRLEHSKNVNTEKLRAPIICVLGHVDTGKTKILDKLRHTHVQDGEAGGITQQIGATNVPLEAINEQTKMIKNFDRENVRIPGMLIIDTPGHESFSNLRNRGSSLCDIAILVVDIMHGLEPQTIESINLLKSKKCPFIVALNKIDRLYDWKKSPDSDVAATLKKQKKNTKDEFEERAKAIIVEFAQQGLNAALFYENKDAAFVSLVPTSAHTGDGMGSLIYLLVELTQTMLSKRLAHCEELRAQVMEVKALPGMGTTIDVILINGRLKEGDTIIVPGVEGPIVTQIRGLLLPPPMKELRVKNQYEKHKEVEAAQGVKILGKDLEKTLAGLPLLVAYKEDEIPVLKDELIHELKQTLNAIKLEEKGVYVQASTLGSLEALLEFLKTSEVPYAGINIGPVHKKDVMKASVMLEHDPQYAVILAFDVRIERDAQEMADSLGVRIFSAEIIYHLFDAFTKYRQDYKKQKQEEFKHIAVFPCKIKILPQYIFNSRDPIVMGVTVEAGQVKQGTPMCVPSKNFVDIGIVTSIEINHKQVDVAKKGQEVCVKIEPIPGESPKMFGRHFEATDILVSKISRQSIDALKDWFRDEMQKSDWQLIVELKKVFEII

SEQ ID NO: 5117 - protein, 45 aa, Homo sapiens
MSDKPDLSEVEKFDRSKLKKTNTEEKNTLPSKETIQQEKECVQTS

SEQ ID NO: 5118 - protein, 510 aa, Homo sapiens
MPGGGASAASGRLLTAAEQRGSREAAGSASRSGFGGSGGGRGGASGPGSGSGGPGGPAGRMSLTPKELSSLLSIISEEAGGGSTFEGLSTAFHHYFSKADHFRLGSVLVMLLQQPDLLPSAAQRLTALYLLWEMYRTEPLAANPFAASFAHLLNPAPPARGGQEPDRPPLSGFLPPITPPEKFFLSQLMLAPPRELFKKTPRQIALMDVGNMGQSVDISGLQLALAERQSELPTQSKASFPSILSDPDPDSSNSGFDSSVASQITEALVSGPKPPIESHFRPEFIRPPPPLHICEDELAWLNPTEPDHAIQWDKSMCVKNSTGVEIKRIMAKAFKSPLSSPQQTQLLGELEKDPKLVYHIGLTPAKLPDLVENNPLVAIEMLLKLMQSSQITEYFSVLVNMDMSLHSMEVVNRLTTAVDLPPEFIHLYISNCISTCEQIKDKYMQNRLVRLVCVFLQSLIRNKIINVQDLFIEVQAFCIEFSRIREAAGLFRLLKTLDTGETPSETKMSK

SEQ ID NO: 5119 - protein, 727 aa, Homo sapiens
MSGRKRSFTFGAYGGVDKSFTSRRSVWRSDGQNQHFPQALDLSRVNLVPSYTPSLYPKNTDLFEMIEKMQGSRMDEQRCSFPPPLKTEEDYIPYPSVHEVLGREGPFPLILLPQFGGYWIEGTNHEITSIPETEPLQSPTTKVKLECNPTARIYRKHFLGKEHFNYYSLDAALGHLVFSLKYDVIGDQEHLRLLLRTKCRTYHDVIPISCLTEFPNVVQMAKLVCEDVNVDRFYPVLYPKASRLIVTFDEHVISNNFKFGVIYQKLGQTSEEELFSTNEESPAFVEFLEFLGQKVKLQDFKGFRGGLDVTHGQTGTESVYCNFRNKEIMFHVSTKLPYTEGDAQQLQRKRHIGNDIVAVVFQDENTPFVPDMIASNFLHAYVVVQAEGGGPDGPLYKVSVTARDDVPFFGPPLPDPAVFRKGPEFQEFLLTKLINAEYACYKAEKFAKLEERTRAALLETLYEELHIHSQSMMGLGGDEDKMENGSGGGGFFESFKRVIRSRSQSMDAMGLSNKKPNTVSTSHSGSFAPNNPDLAKAAGISLIVPGKSPTRKKSGPFGSRRSSAIGIENIQEVQEKRESPPAGQKTPDSGHVSQEPKSENSSTQSSPEMPTTKNRAETAAQRAEALKDFSRSSSSASSFASVVEETEGVDGEDTGLESVSSSGTPHKRDSFIYSTWLEDSVSTTSGGSSPGPSRSPHPDAGKLGDPACPEIKIQLEASEQHMPQLGC

SEQ ID NO: 5120 - protein, 290 aa, Homo sapiens
MVLLHVKRGDESQFLLQAPGSTELEELTVQVARVYNGRLKVQRLCSEMEELAEHGIFLPPNMQGLTDDQIEELKLKDEWGEKCVPSGGAVFKKDDIGRRNGQAPNEKMKQVLKKTIEEAKAIISKKQVEAGVCVTMEMVKDALDQLRGAVMIVYPMGLPPYDPIRMEFENKEDLSGTQAGLNVIKEAEAQLWWAAKELRRTKKLSDYVGKNEKTKIIAKIQQRGQGAPAREPIISSEEQKQLMLYYHRRQEELKRLEENDDDAYLNSPWADNTALKRHFHGVKDIKWRPR

SEQ ID NO: 5121 - protein, 188 aa, Homo sapiens [sequence omitted]

SEQ ID NO: 5122 - protein, 677 aa, Homo sapiens
MDDPDCDSTWEEDEEDAEDAEDEDCEDGEAAGARDADAGDEDEESEEPRAARPSSFQSRMTGSRNWRATRDMCRYRHNYPDLVERDCNGDTPNLSFYRNEIRFLPNGCFIEDILQNWTDNYDLLEDNHSYIQWLFPLREPGVNWHAKPLTLREVEVFKSSQEIQERLVRAYELMLGFYGIRLEDRGTGTVGRAQNYQKRFQNLNWRSHNNLRITRILKSLGELGLEHFQAPLVRFFLEETLVRRELPGVRQSALDYFMFAVRCRHQRRQLVHFAWEHFRPRCKFVWGPQDKLRRFKPSSLPHPLEGSRKVEEEGSPGDPDHEASTQGRTCGPEHSKGGGRVDEGPQPRSVEPQDAGPLERSQGDEAGGHGEDRPEPLSPKESKKRKLELSRREQPPTEPGPQSASEVEKIALNLEGCALSQGSLRTGTQEVGGQDPGEAVQPCRQPLGARVADKVRKRRKVDEGAGDSAAVASGGAQTLALAGSPAPSGHPKAGHSENGVEEDTEGRTGPKEGTPGSPSETPGPSPAGPAGDEPAESPSETPGPRPAGPAGDEPAESPSETPGPRPAGPAGDEPAESPSETPGPSPAGPTRDEPAESPSETPGPRPAGPAGDEPAESPSETPGPRPAGPAGDEPAESPSETPGPSPAGPTRDEPAKAGEAAELQDAEVESSAKSGKP

SEQ ID NO: 5123 - protein, 244 aa, Homo sapiens
MGLELFLDLVSQPSRAVYIFAKKNGIPLELRTVDLVKGQHKSKEFLQINSLGKLPTLKDGDFILTESSAILIYLSCKYQTPDHWYPSDLQARARVHEYLGWHADCIRGTFGIPLWVQVLGPLIGVQVPEEKVERNRTAMDQALQWLEDKFLGDRPFLAGQQVTLADLMALEELMQPVALGYELFEGRPRLAAWRGRVEAFLGAELCQEAHSIILSILEQAAKKTLPTPSPEAYQAMLLRIARIP

SEQ ID NO: 5124 - protein, 176 aa, Homo sapiens
MAASTDMAGLEESFRKFAIHGDPKASGQEMNGKNWAKLCKDCKVADGKSVTGTDVDIVFSKVKGKSARVINYEEFKKALEELATKRFKGKSKEEAFDAICQLVAGKEPANVGVTKAKTGGAVDRLTDTSRYTGSHKERFDESGKGKGIAGRQDILDDSGYVSAYKNAGTYDAKVKK

SEQ ID NO: 5125 - protein, 309 aa, Homo sapiens
MSDLGSEELEEEGENDIGEYEGGRNEAGERHGRGRARLPNGDTYEGSYEFGKRHGQGIYKFKNGARYIGEYVRNKKHGQGTFIYPDGSRYEGEWANDLRHGHGVYYYINNDTYTGEWFAHQRHGQGTYLYAETGSKYVGTWVNGQQEGTAELIHLNHRYQGKFLNKNPVGPGKYVFDVGCEQHGEYRLTDMERGEEEEEEELVTVVPKWKATQITELALWTPTLPKKPTSTDGPGQDAPGAESAGEPGEEAQALLEGFEGEMDMRPGDEDADVLREESREYDQEEFRYDMDEGNINSEEEETRQSDLQD

SEQ ID NO: 5126 - protein, 1980 aa, Homo sapiens
MNPTNPFSGQQPSAFSASSSNVGTLPSKPPFRFGQPSLFGQNSTLSGKSSGFSQVSSFPASSGVSHSSSVQTLGFTQTSSVGPFSGLEHTSTFVATSGPSSSSVLGNTGFSFKSPTSVGAFPSTSAFGQEAGEIVNSGFGKTEFSFKPLENAVFKPILGAESEPEKTQSQIASGFFTFSHPISSAPGGLAPFSFPQVTSSSATTSNFTFSKPVSSNNSLSAFTPALSNQNVEEEKRGPKSIFGSSNNSFSSFPVSSAVLGEPFQASKAGVRQGCEEAVSQVEPLPSLMKGLKRKEDQDRSPRRHGHEPAEDSDPLSRGDHPPDKRPVRLNRPRGGTLFGRTIQDVFKSNKEVGRLGNKEAKKETGFVESAESDHMAIPGGNQSVLAPSRIPGVNKEEETESREKKEDSLRGTPARQSNRSESTDSLGGLSPSEVTAIQCKNIPDYLNDRTILENHFGKIAKVQRIFTRRSKKLAVVHFFDHASAALARKKGKSLHKDMAIFWHRKKISPNKKPFSLKEKKPGDGEVSPSTEDAPFQHSPLGKAAGRTGASSLLNKSSPVKKPSLLKAHQFEGDSFDSASEGSEGLGPCVLSLSTLIGTVAETSKEKYRLLDQRDRIMRQARVKRTDLDKARTFVGTCLDMCPEKERYMRETRSQLSVFEVVPGTDQVDHAAAVKEYSRSSADQEEPLPHELRPLPVLSRTMDYLVTQIMDQKEGSLRDWYDFVWNRTRGIRKDITQQHLCDPLTVSLIEKCTRFHIHCAHFMCEEPMSSFDAKINNENMTKCLQSLKEMYQDLRNKGVFCASEAEFQGYNVLLSLNKGDILREVQQFHPAVRNSSEVKFAVQAFAALNSNNFVRFFKLVQSASYLNACLLHCYFSQIRKDALRALNFAYTVSTQRSTIFPLDGVVRMLLFRDCEEATDFLTCHGLTVSDGCVELNRSAFLEPEGLSKTRKSVFITRKLTVSVGEIVNGGPLPPVPRHTPVCSFNSQNKYIGESLAAELPVSTQRPGSDTVGGGRGEECGVEPDAPLSSLPQSLPAPAPSPVPLPPVLALTPSVAPSLFQLSVQPEPPPPEPVPMYSDEDLAQVVDELIQEALQRDCEEVGSAGAAYAAAALGVSNAAMEDLLTAATTGILRHIAAEEVSKERERREQERQRAEEERLKQERELVLSELSQGLAVELMERVMMEFVRETCSQELKNAVETDQRVRVARCCEDVCAHLVDLFLVEEIFQTAKETLQELQCFCKYLQRWREAVTARKKLRRQMRAFPAAPCCVDVSDRLRALAPSAECPIAEENLARGLLDLGHAGRLGISCTRLRRLRNKTAHQMKVQHFYQQLLSDVAWASLDLPSLVAEHLPGRQEHVFWKLVLVLPDVEEQSPESCGRILANWLKVKFMGDEGSVDDTSSDAGGIQTLSLFNSLSSKGDQMISVNVCIKVAHGALSDGAIDAVETQKDLLGASGLMLLLPPKMKSEDMAEEDVYWLSALLQLKQLLQAKPFQPALPLVVLVPSPGGDAVEKEVEDGLMLQDLVSAKLISDYTVTEIPDTINDLQGSTKVLQAVQWLVSHCPHSLDLCCQTLIQYVEDGIGHEFSGRFFHDRRERRLGGLASQEPGAIIELFNSVLQFLASVVSSEQLCDLSWPVTEFAEAGGSRLLPHLHWNAPEHLAWLKQAVLGFQLPQMDLPPLGAPWLPVCSMVVQYASQIPSSRQTQPVLQSQVENLLHRTYCRWKSKSPSPVHGAGPSVMEIPWDDLIALCINHKLRDWTPPRLPVTSEALSEDGQICVYFFKNDLKKYDVPLSWEQARLQTQKELQLREGRLAIKPFHPSANNFPIPLLHMHRNWKRSTECAQEGRIPSTEDLMRGASAEELLAQCLSSSLLLEKEENKRFEDQLQQWLSEDSGAFTDLTSLPLYLPQTLVSLSHTIEPVMKTSVTTSPQSDMMREQLQLSEATGTCLGERLKHLERLIRSSREEEVASELHLSALLDMVDI

SEQ ID NO: 5127 - protein, 1048 aa, Homo sapiens
MSDVNPPSDTPIPFSSSSTHSSHIPPWTFSCYPGSPCENGVMLYMRNVSHEELQRFKQLLLTELSTGTMPITWDQVETASWAEVVHLLIERFPGRRAWDVTSNIFAIMNCDKMCVVVRREINAILPTLEPEDLNVGETQVNLEEGESGKIRRYKSNVMEKFFPIWDITTWPGNQRDFFYQGVHRHEEYLPCLLLPKRPQGRQPKTVAIQGAPGIGKTILAKKVMFEWARNKFYAHKRWCAFYFHCQEVNQTTDQSFSELIEQKWPGSQDLVSKIMSKPDQLLLLLDGFEELTSTLIDRLEDLSEDWRQKLPGSVLLSSLLSKTMLPEATLLIMIRFTSWQTCKPLLKCPSLVTLPGFNTMEKIKYFQMYFGHTEEGDQVLSFAMENTILFSMCRVPVVCWMVCSGLKQQMERGNNLTQSCPNATSVFVRYISSLFPTRAENFSRKIHQAQLEGLCHLAADSMWHRKWVLGKEDLEEAKLDQTGVTAFLGMSILRRIAGEEDHYVFTLVTFQEFFAALFYVLCFPQRLKNFHVLSHVNIQRLIASPRGSKSYLSHMGLFLFGFLNEACASAVEQSFQCKVSFGNKRKLLKVIPLLHKCDPPSPGSGVPQLFYCLHEIREEAFVSQALNDYHKVVLRIGNNKEVQVSAFCLKRCQYLHEVELTVTLNFMNVWKLSSSSHPGSEAPESNGLHRWWQDLCSVFATNDKLEVLTMTNSVLGPPFLKALAAALRHPQCKLQKLLLRRVNSTMLNQDLIGVLTGNQHLRYLEIQHVEVESKAVKLLCRVLRSPRCRLQCLRLEDCLATPRIWTDLGNNLQGNGHLKTLILRKNSLENCGAYYLSVAQLERLSIENCNLTQLTCESLASCLRQSKMLTHLSLAENALKDEGAKHIWNALPHLRCPLQRLVLRKCDLTFNCCQDMISALCKNKTLKSLDLSFNSLKDDGVILLCEALKNPDCTLQILELENCLFTSICCQAMASMLRKNQHLRHLDLSKNAIGVYGILTLCEAFSSQKKREEVIFCIPAWTRITSFSPTPHPPDFTGKSDCLSQINP

SEQ ID NO: 5128 - protein, 1262 aa, Homo sapiens
MPARIGYYEIDRTIGKGNFAVVKRATHLVTKAKVAIKIIDKTQLDEENLKKIFREVQIMKMLCHPHIIRLYQVMETERMIYLVTEYASGGEIFDHLVAHGRMAEKEARRKFKQIVTAVYFCHCRNIVHRDLKAENLLLDANLNIKIADFGFSNLFTPGQLLKTWCGSPPYAAPELFEGKEYDGPKVDIWSLGVVLYVLVCGALPFDGSTLQNLRARVLSGKFRIPFFMSTECEHLIRHMLVLDPNKRLSMEQICKHKWMKLGDADPNFDRLIAECQQLKEERQVDPLNEDVLLAMEDMGLDKEQTLQSLRSDAYDHYSAIYSLLCDRHKRHKTLRLGALPSMPRALAFQAPVNIQAEQAGTAMNISVPQVQLINPENQIVEPDGTLNLDSDEGEEPSPEALVRYLSMRRHTVGVADAAEVMEDLQKLLPGFPGVNPQAPFLQVAPNVNFMHNLLPMQNLQPTGQLEYKEQSLLQPPTLQLLNGMGPLGRRASDGGANIQLHAQQLLKRPRGPSPLVTMTPAVPAVTPVDEESSDGEPDQEAVQSSTYKDSNTLHLPTERFSPVRRFSDGAASIQAFKAHLEKMGNNSSIKQLQQECEQLQKMYGGQIDERTLEKTQQQHMLYQQEQHHQILQQQIQDSICPPQPSPPLQAACENQPALLTHQLQRLRIQPSSPPPNHPNNHLFRQPSNSPPPMSSAMIQPHGAASSSQFQGLPSRSAIFQQQPENCSSPPNVALTCLGMQQPAQSQQVTIQVQEPVDMLSNMPGTAAGSSGRGISISPSAGQMQMQHRTNLMATLSYGHRPLSKQLSADSAEAHSLNVNRFSPANYDQAHLHPHLFSDQSRGSPSSYSPSTGVGFSPTQALKVPPLDQFPTFPPSAHQQPPHYTTSALQQALLSPTPPDYTRHQQVPHILQGLLSPRHSLTGHSDIRLPPTEFAQLIKRQQQQRQQQQQQQQQQEYQELFRHMNQGDAGSLAPSLGGQSMTERQALSYQNADSYHHHTSPQHLLQIRAQECVSQASSPTPPHGYAHQPALMHSESMEEDCSCEGAKDGFQDSKSSSTLTKGCHDSPLLLSTGGPGDPESLLGTVSHAQELGIHPYGHQPTAAFSKNKVPSREPVIGNCMDRSSPGQAVELPDHNGLGYPARPSVHEHHRPRALQRHHTIQNSDDAYVQLDNLPGMSLVAGKALSSARMSDAVLSQSSLMGSQQFQDGENEECGASLGGHEHPDLSDGSQHLNSSCYPSTCITDILLSYKHPEVSFSMEQAGV

SEQ ID NO: 5129 - protein, 1464 aa, Homo sapiens
MYQPEDDNNSDVTSDDDMTRNRRESSPPHSVHSFSGDRDWDRRGRSRDMEPRDRWSHTRNPRSRMPPRDLSLPVVAKTSFEMDREDDRDSRAYESRSQDAESYQNVVDLAEDRKPHNTIQDNMENYRKLLSLGVQLAEDDGHSHMTQGHSSRSKRSAYPSTSRGLKTMPEAKKSTHRRGICEDESSHGVIMEKFIKDVSRSSKSGRARESSDRSQRFPRMSDDNWKDISLNKRESVIQQRVYEGNAFRGGFRFNSTLVSRKRVLERKRRYHFDTDGKGSIHDQKGCPRKKPFECGSEMRKAMSVSSLSSLSSPSFTESQPIDFGAMPYVCDECGRSFSVISEFVEHQIMHTRENLYEYGESFIHSVAVSEVQKSQVGGKRFECKDCGETFNKSAALAEHRKIHARGYLVECKNQECEEAFMPSPTFSELQKIYGKDKFYECRVCKETFLHSSALIEHQKIHFGDDKDNEREHERERERERGETFRPSPALNEFQKMYGKEKMYECKVCGETFLHSSSLKEHQKIHTRGNPFENKGKVCEETFIPGQSLKRRQKTYNKEKLCDFTDGRDAFMQSSELSEHQKIHSRKNLFEGRGYEKSVIHSGPFTESQKSHTITRPLESDEDEKAFTISSNPYENQKIPTKENVYEAKSYERSVIHSLASVEAQKSHSVAGPSKPKVMAESTIQSFDAINHQRVRAGGNTSEGREYSRSVIHSLVASKPPRSHNGNELVESNEKGESSIYISDLNDKRQKIPARENPCEGGSKNRNYEDSVIQSVFRAKPQKSVPGEGSGEFKKDGEFSVPSSNVREYQKARAKKKYIEHRSNETSVIHSLPFGEQTFRPRGMLYECQECGECFAHSSDLTEHQKIHDREKPSGSRNYEWSVIRSLAPTDPQTSYAQEQYAKEQARNKCKDFRQFFATSEDLNTNQKIYDQEKSHGEESQGENTDGEETHSEETHGQETIEDPVIQGSDMEDPQKDDPDDKIYECEDCGLGFVDLTDLTDHQKVHSRKCLVDSREYTHSVIHTHSISEYQRDYTGEQLYECPKCGESFIHSSFLFEHQRIHEQDQLYSMKGCDDGFIALLPMKPRRNRAAERNPALAGSAIRCLLCGQGFIHSSALNEHMRLHREDDLLEQSQMAEEAIIPGLALTEFQRSQTEERLFECAVCGESFVNPAELADHVTVHKNEPYEYGSSYTHTSFLTEPLKGAIPFYECKDCGKSFIHSTVLTKHKELHLEEEEEDEAAAAAAAAAQEVEANVHVPQVVLRIQGLNVEAAEPEVEAAEPEVEAAEPEVEAAEPNGEAEGPDGEAAEPIGEAGQPNGEAEQPNGDADEPDGAGIEDPEERAEEPEGKAEEPEGDADEPDGVGIEDPEEGEDQEIQVEEPYYDCHECTETFTSSTAFSEHLKTHASMIIFEPANAFGECSGYIERASTSTGGANQADEKYFKCDVCGQLFNDRLSLARHQNTHTG

SEQ ID NO: 5130 - protein, 433 aa, Homo sapiens
MAEAQSGTGQLQEQKKGLLIAVSVSVDKIISHFGAARNLVQKAQLGDSRLSPDVGHLVLTTLCPALHALVADGLKPFRKDLITGQRRSSPWSVVEASVKPGSSTRSLGTLYSQVSRLAPLSSSRSRFHAFILGLLNTKQLELWFSSLQEDAGLLSLLYLPTGFFSLARGGCPSLSTELLLLLQPLSVLTFHLDLLFEHHHHLPLGPPQAPAPPGPPPALQQTMQAMLHFGGRLAQSLRGTSKEAASDPSDSPNLPTPGSWWEQLTQASRVYASGGTEGFPLSRWAPGRHGTAAEEGAQERPLPTDEMAPGRGLWLGRLFGVPGGPAENENGALKSRRPSSWLPPTVSVLALVKRGAPPEMPSPQELEASAPRMVQTHRAVRALCDHTAARPDQLSFRRGEVLRVITTVDEDWLRCGRDGMEGLVPVGYTSLVL

SEQ ID NO: 5131 - protein, 527 aa, Homo sapiens
MAQTLQMEIPNFGNSILECLNEQRLQGLYCDVSVVVKGHAFKAHRAVLAASSSYFRDLFNNSRSAVVELPAAVQPQSFQQILSFCYTGRLSMNVGDQFLLMYTAGFLQIQEIMEKGTEFFLKVSSPSCDSQGLHAEEAPSSEPQSPVAQTSGWPACSTPLPLVSRVKTEQQESDSVQCMPVAKRLWDSGQKEAGGGGNGSRKMAKFSTPDLAANRPHQPPPPQQAPVVAAAQPAVAAGAGQPAGGVAAAGGVVSGPSTSERTSPGTSSAYTSDSPGSYHNEEDEEEDGGEEGMDEQYRQICNMYTMYSMMNVGQTAEKVEALPEQVAPESRNRIRVRQDLASLPAELINQIGNRCHPKLYDEGDPSEKLELVTGTNVYITRAQLMNCHVSAGTRHKVLLRRLLASFFDRNTLANSCGTGIRSSTNDPRRKPLDSRVLHAVKYYCQNFAPNFKESEMNAIAADMCTNARRVVRKSWMPKVKVLKAEDDAYTTFISETGKIEPDMMGVEHGFETASHEGEAGPSAEALQ

SEQ ID NO: 5132 - protein, 223 aa, Homo sapiens
MEVQKEAQRIMTLSVWKMYHSRMQRGGLRLHRSLQLSLVMRSARELYLSAKVEALEPEVSLPAALPSDPRLHPPREAESTAETATPDGEHPFPEPMDTQEAPTAEETSACCAPRPAKVSRKRRSSSLSDGGDAGLVPSKKARLEEKEEEEGASSEVADRLQPPPAQAEGAFPNLARVLQRRFSGLLNCSPAAPPTAPPACEAKPACRPADSMLNVLVRAVVAF

SEQ ID NO: 5133 - protein, 497 aa, Homo sapiens
MRVLVPPAERSQDTRVGAPAWREAAQAMARTAHILTDRCGQEAVTMWQPKDSVLDPNVAHHLGRAAYIQPWRFRVEMIKGGGTLEKPPPGEGVTLWKGKMKPPAWYARLPLPLHRKARALQTTEVVHAHARGARLTAARLGRAQHQINGRVRQLLRQREVTDHRLSEVRKGLLINQQSVKLRGYRPKSEKVPDKADSMLTWEKEELKSMKRKMERDMEKSEVLLKTLASCRDTLNFCFKERLQAVDLMNQPLDKVLEQARRHSWVNLSRAPTAAQGQKTPPPDPVGTYNPACALALNEAKRLLVESKDTLVEMAKNEVDVREQQLQISDRVCASLAQKASETLELKERLNMTLGLMRGTILRCTKYNQELYTTHGLIKGPLSKVHLETAEKLDRPLVRMYQRHVGTQLPEAARLAQGTDKLQCHITYLEKNLDELLATHKNLSWGLNCKNIGHEVDGNVVRLRLRQRQPHVCYEQAQRLVKDWDAAPPPRSKSSADP

SEQ ID NO: 5134 - protein, 608 aa, Homo sapiens
MEMESAAASTRFHQPHMERKMSAMACEIFNELRLEGKLCDVVIKVNGFEFSAHKNILCSCSSYFRALFTSGWNNTEKKVYNIPGISPDMMKLIIEYAYTRTVPITPDNVEKLLAAADQFNIMGIVRGCCEFLKSELCLDNCIGICKFTDYYYCPELRQKAYMFILHNFEEMVKVSAEFLELSVTELKDIIEKDELNVKQEDAVFEAILKWISHDPQNRKQHISILLPKVRLALMHAEYFMNNVKMNDYVKDSEECKPVIINALKAMYDLNMNGPSNSDFTNPLTRPRLPYAILFAIGGWSGGSPTNAIEAYDARADRWVNVTCEEESPRAYHGAAYLKGYVYIIGGFDSVDYFNSVKRFDPVKKTWHQVAPMHSRRCYVSVTVLGNFIYAMGGFDGYVRLNTAERYEPETNQWTLIAPMHEQRSDASATTLYGKVYICGGFNGNECLFTAEVYNTESNQWTVIAPMRSRRSGIGVIAYGEHVYAVGGFDGANRLRSAEAYSPVANTWRTIPTMFNPRSNFGIEVVDDLLFVVGGFNGFTTTFNVECYDEKTDEWYDAHDMSIYRSALSCCVVPGLANVEEYAARRDNFPGLALRDEVKYSASTSTLPV

SEQ ID NO: 5135 - protein, 313 aa, Homo sapiens
MAALTDLSFMYRWFKNCNLVGNLSEKYVFITGCDSGFGNLLAKQLVDRGMQVLAACFTEEGSQKLQRDTSYRLQTTLLDVTKSESIKAAAQWVRDKVGEQGLWALVNNAGVGLPSGPNEWLTKDDFVKVINVNLVGLIEVTLHMLPMVKRARGRVVNMSSSGGRVAVIGGGYCVSKFGVEAFSDSIRRELYYFGVKVCIIEPGNYRTAILGKENLESRMRKLWERLPQETRDSYGEDYFRIYTDKLKNIMQVAEPRVRDVINSMEHAIVSRSPRIRYNPGLDAKLLYIPLAKLPTPVTDFILSRYLPRPADSV

SEQ ID NO: 5136 - protein, 486 aa, Homo sapiens
MTCGSYCGGRAFSCISACGPRPGRCCITAAPYRGISCYRGLTGGFGSHSVCGGFRAGSCGRSFGYRSGGVCGPSPPCITTVSVNESLLTPLNLEIDPNAQCVKQEEKEQIKSLNSRFAAFIDKVRFLEQQNKLLETKLQFYQNRECCQSNLEPLFEGYIETLRREAECVEADSGRLASELNHVQEVLEGYKKKYEEEVSLRATAENEFVALKKDVDCAYLRKSDLEANVEALIQEIDFLRRLYEEEIRVLQSHISDTSVVVKLDNSRDLNMDCIIAEIKAQYDDIVTRSRAEAESWYRSKCEEMKATVIRHGETLRRTKEEINELNRMIQRLTAEVENAKCQNSKLEAAVAQSEQQGEAALSDARCKLAELEGALQKAKQDMACLIREYQEVMNSKLGLDIEIATYRRLLEGEEQRLCEGVGSVNVCVSSSRGGVVCGDLCASTTAPVVSTRVSSVPSNSNVVVGTTNACAPSARVGVCGGSCKRC

SEQ ID NO: 5137 - protein, 312 aa, Homo sapiens
MAELTALESLIEMGFPRGRAEKALALTGNQGIEAAMDWLMEHEDDPDVDEPLETPLGHILGREPTSSEQGGLEGSGSAAGEGKPALSEEERQEQTKRMLELVAQKQREREEREEREALERERQRRRQGQELSAARQRLQEDEMRRAAEERRREKAEELAARQRVREKIERDKAERAKKYGGSVGSQPPPVAPEPGPVPSSPSQEPPTKREYDQCRIQVRLPDGTSLTQTFRAREQLAAVRLYVELHRGEELGGGQDPVQLLSGFPRRAFSEADMERPLQELGMAARLETRTRNWGSREACLGKGGMQREGAL

SEQ ID NO: 5138 - protein, 134 aa, Homo sapiens
MPADLSGTWTLLSSDNFEGYMLALGIDFATRKIAKLLKPQKVIEQNGDSFTIHTNSSLRNYFVKFKVGEEFDEDNRGLDNRKCKSLVIWDNDRLTCIQKGEKKNRGWTHWIEGDKLHLEMFCEGQVCKQTFQRA

SEQ ID NO: 5139 - protein, 460 aa, Homo sapiens
MAGYLSESDFVMVEEGFSTRDLLKELTLGASQATTDEVAAFFVADLGAIVRKHFCFLKCLPRVRPFYAVKCNSSPGVLKVLAQLGLGFSCANKAEMELVQHIGIPASKIICANPCKQIAQIKYAAKHGIQLLSFDNEMELAKVVKSHPSAKMVLCIATDDSHSLSCLSLKFGVSLKSCRHLLENAKKHHVEVVGVSFHIGSGCPDPQAYAQSIADARLVFEMGTELGHKMHVLDLGGGFPGTEGAKVRFEEIASVINSALDLYFPEGCGVDIFAELGRYYVTSAFTVAVSIIAKKEVLLDQPGREEENGSTSKTIVYHLDEGVYGIFNSVLFDNICPTPILQKKPSTEQPLYSSSLWGPAVDGCDCVAEGLWLPQLHVGDWLVFDNMGAYTVGMGSPFWGTQACHITYAMSRVAWEALRRQLMAAEQEDDVEGVCKPLSCGWEITDTLCVGPVFTPASIM

SEQ ID NO: 5140 - protein, 402 aa, Homo sapiens
GGPRGSGSAAETMPEIRVTPLGAGQDVGRSCILVSIAGKNVMLDCGMHMGFNDDRRFPDFSYITQNGRLTDFLDCVIISHFHLDHCGALPYFSEMVGYDGPIYMTHPTQAICPILLEDYRKIAVDKKGEANFFTSQMIKDCMNLLETFWERMNLKVPIYFSTGLTEKANHYYKLFIPWTNQKIRKTFVQRNMFEFKHIKAFDRAFADNPGPMVVFATPGMLHAGQSLQIFRKWAGNEKNMVIMPGYCVQGTVGHKILSGQRKLEMEGRQVLEVKMQVEYMSFSAHADAKGIMQLVSSEQALKELGLAEHQLRFTCRVHLHDTRKEQETALRVYSHLKSVLKDHCVQHLPDGSVTVESVLLQAAAPSEDPGTKVLLVSWTYQDEELGSFLTSLLKKGLPQAPS

SEQ ID NO: 5141 - protein, 620 aa, Homo sapiens
MEKAVNDGSHSEELFCHLKTISEKEDLPRCTSESHLSCLKQDILNEKTELEATLKEAELVTHSVELLLPLFKDTIEKINFENANLSALNLKISEQKEILIKELDTFKSVKLALEHLLRKRDYKQTGDNLSSMLLENLTDNESENTNLKKKVFEKEAHIQELSCLFQSEKANTLKANRFSQSVKVVHERLQIQIHKREAENDKLKEYVKSLETKIAKWNLQSRMNKNEAIVMKEASRQKTVALKKASKVYKQRLDHFTGAIEKLTSQIRDQEAKLSETISASNAWKSHYEKIVIEKTELEVQIETMKKQIINLLEDLKKMEDHGKNSCEEILRKVHSIEYENETLNLENTKLKTTLAALKDEVVSVENELSELQEVEKKQKTLIEMYKTQVQKLQEAAEIVKSRCENLLHKNNQITKTKNKNVEKMRGQMESHLKELERVCDSLTAAERRLHECQESLQCCKGKCADQEHTIRELQGQILKQWEEYSVLAWVDGNHNLLTKLSLEEENCLIQLKCENLQQKLEQMDAENKELEKKLANQEECLKHSNLKFKEKSAEYTALARQLEAALEEGRQKVAEEIEKMSSRESALQIKILDLETELRKKNEEQNQLVCKMNSDPETP

SEQ ID NO: 5142 - protein, 154 aa, Homo sapiens
MSKNTVSSARFRKVDVDEYDENKFVDEEDGGDGQAGPDEGEVDSCLRHSITGNMTAALQAALKNPPINTKSQAVKDRAGSIVLKVLISFKANDIEKAVQSLDKNGVDLLMKYIYKGFESPSDNSSAMLLQWHEKALAAGGVGSIVRVLTARKTV

SEQ ID NO: 5143 - protein, 981 aa, Homo sapiens
MSEQERIQECLRKEIRSLLISTKDGLSPQELEKEYLLMVGNHLPLRILGYRSTMELVLDMPDVVRVCPGAGGTVILKAIPDESTKGIASLVAKQRSSHKLRNSMHKGRPSIYSGPRSHRRVPYRGRVAPILPAVVKSELKDLLALSPVLLSDFEKAFAKRFGRSFQYMQYGFLSMFEVLNAASDVISVEQTRAGSLLMLKKSVTEEKPRGCPAGKIFTQPFRMKQGSYSTGFPVAKPCFSQPTSNMEPPKQIMSMEKTSKLNVVETSRLNHTEKLNQLENTFKSVIAQIGPGGTISSELKHKIKFVVSKFPEGLFISKLLGEYEVIFKEQLSPKKLGFLNVTELVGALSDILHVEFRKGHQDLLVFDADKKPLPPVQSDKKIEAKACVSSPPRNSLSTAAVKETVWNCPSKKQKEPQQKICKKPNLVVKPLQLQVETNKSELNLAMANHDIPPDAVPNKKLCRLPPLDTSSLIGVFVEYIISPSQFYIRIYSRDSSELLEDMMIEMRRCYSNQLVSDRYVMPECFIQPGHLCCVRISEDKWWYRVIIHRVLEKQEVEVFYPDFGNIGIVQKSSLRFLKCCYTKLPAQAIPCSLAWVRPVEEHWTSKAILQFQKLCGLKPLVGVVDEYVDGILNIFLCDTSSNEDVYFHHVLRTEGHAIVCRENISSKGFSELNPLALYTTSSGGPEDIVLTELGYPSQQHYFNEDRKISPQSKESELRILDEIPTGMPCLESVTIGDDIWDENWLPLQAKMGKGGDAASHLFTASLGGKNQYSSCKEMPQKDWCFSTPKDTWDDSWQPSGLVNGTKVEVHKPEVLGAQEKNTGTNRTQKQLDINGSSDSSTLPKLEEFCTSLTQSEQSADGSQSEPNNSQTQPKQIQLSTAAPCSTTAVDDSAEKPSGSVESSPEILKNEDFSSSRAITLYKDKRQESVDQLSLILSYECQISQKLYIPRSTATAALGAAARLATSRSLLHWYPSVKRMEA

SEQ ID NO: 5144 - protein, 302 aa, Homo sapiens
MEIQELEEIQACQGLWEVFVTLSERARDYLHKTGRFIVIGGIVSPVHDSYGKQGLVSSRHRLIMCQLAVQNSDWIRVDPWECYQDTWQTTCSVLEHHRDLMKRVTGCILSNVNTPSMTPVIGQPQNETPQPIYQNSNVATKPTAAKILGKVGESLSRICCVRPPVERFTFVDENANLGTVMRYEEIELRILLLCGSDLLESFCIPGLWNEADMEVIVGDFGIVVVPRDAADTDRIMNHSSILRKYKNNIMVVKDDINHPMSVVSSTKSRLALQHGDGHVVDYLSQPVIDYILKSQLYINASG

SEQ ID NO: 5145 - protein, 286 aa, Homo sapiens
MERRLGVRAWVKENRGSFQPPVCNKLMHQEQLKVMFIGGPNTRKDYHIEEGEEVFYQLEGDMVLRVLEQGKHRDVVIRQGEIFLLPARVPHSPQRFANTVGLVVERRRLETELDGLRYYVGDTMDVLFEKWFYCKDLGTQLAPIIQEFFSSEQYRTGKPIPDQLLKEPPFPLSTRSIMEPMSLDAWLDSHHRELQAGTPLSLFGDTYETQVIAYGQGSSEGLRQNVDVWLWQLEGSSVVTMGGRRLSLAPDDSLLVLAGTSYAWERTQGSVALSVTQDPACKKPLG

SEQ ID NO: 5146 - protein, 514 aa, Homo sapiens
MQESGCRLEHPSATKFRNHVMEGDWDKAENDLNELKPLVHSPHAIVVRGALEISQTLLGIIVRMKFLLLQQKYLEYLEDGKVLEALQVLRCELTPLKYNTERIHVLSGYLMCSHAEDLRAKAEWEGKGTASRSKLLDKLQTYLPPSVMLPPRRLQTLLRQAVELQRDRCLYHNTKLDNNLDSVSLLIDHVCSRRQFPCYTQQILTEHCNEVWFCKFSNDGTKLATGSKDTTVIIWQVDPDTHLLKLLKTLEGHAYGVSYIAWSPDDNYLVACGPDDCSELWLWNVQTGELRTKMSQSHEDSLTSVAWNPDGKRFVTGGQRGQFYQCDLDGNLLDSWEGVRVQCLWCLSDGKTVLASDTHQRIRGYNFEDLTDRNIVQEDHPIMSFTISKNGRLALLNVATQGVHLWDLQDRVLVRKYQGVTQGFYTIHSCFGGHNEDFIASGSEDHKVYIWHKRSELPIAELTGHTRTVNCVSWNPQIPSMMASASDDGTVRIWGPAPFIDHQNIEEECSSMDS

SEQ ID NO: 5147 - protein, 179 aa, Homo sapiens
MGILFTRIWRLFNHQEHKVIIVGLDNAGKTTILYQFSMNEVVHTSPTIGSNVEEIVINNTRFLMWDIGGQESLRSSWNTYYTNTEFVIVVVDSTDRERISVTREELYKMLAHEDLRKAGLLIFANKQDVKECMTVAEISQFLKLTSIKDHQWHIQACCALTGEGLCQGLEWMMSRLKIR

SEQ ID NO: 5148 - protein, 475 aa, Homo sapiens
MQKSTNSDTSVETLNSTRQGTGAVQMRIKNANSHHDRLSQSKSMILTDVGKVTEPISRHRRNHSQHILKDVIPPLEQLMVEKEGYLQKAKIADGGKKLRKNWSTSWIVLSSRRIEFYKESKQQALSNMKTGHKPESVDLCGAHIEWAKEKSSRKNVFQITTVSGNEFLLQSDIDFIILDWFHAIKNAIDRLPKDSSCPSRNLELFKIQRSSSTELLSHYDSDIKEQKPEHRKSLMFRLHHSASDTSDKNRVKSRLKKFITRRPSLKTLQEKGLIKDQIFGSHLHKVCERENSTVPWFVKQCIEAVEKRGLDVDGIYRVSGNLATIQKLRFIVNQEEKLNLDDSQWEDIHVVTGALKMFFRELPEPLFPYSFFEQFVEAIKKQDNNTRIEAVKSLVQKLPPPNRDTMKVLFGHLTKIVAKASKNLMSTQSLGIVFGPTLLRAENETGNMAIHMVYQNQIAELMLSEYSKIFGSEED

SEQ ID NO: 5149 - protein, 435 aa, Homo sapiens
MAQTVPPCELPCKEYDVARNTGAYTSSGLATASFRTSKYLLEEWFQNCYARYHQAFADRDQSERQRHESQQLATETQALAQRTQQDSTRTVGERLQDTHSWKSELQREMEALAAETNLLLAQKQRLERALDATEVPFSITTDNLQCRERREHPNLVRDHVETELLKEAELIRNIQELLKRTIMQAVSQIRLNREHKETCEMDWSDKMEAYNIDETCGRHHSQSTEVQAHPYSTTFQESASTPETRAKFTQDNLCRAQRERLASANLRVLVDCILRDTSEDLRLQCDAVNLAFGRRCEELEDARYKLHHHLHKTLREITDQEHNVAALKQAIKDKEAPLHVAQTRLYLRSHRPNMELCRDAAQFRLLSEVEELNMSLTALREKLLEAEQSLRNLEDIHMSLEKDIAAMTNSLFIDRQKCMAHRTRYPTILQLAGYQ

SEQ ID NO: 5150 - protein, 275 aa, Homo sapiens
MRKRLSAPELRLSLTKGPGNDGASPTQSAPSSPDGSSDLEIDELETPSDSEQLDSGHEFEWEDELPRAEGLGTSETAERLGRGCMWDVTGEDGHHWRVFRMGPREQRVDMTVIEPYKKVLSHGGYHGDGLNAVILFASCYLPRSSIPNYTYVMEHLFRYMVGTLELLVAENYLLVHLSGGTSRAQVPPLSWIRQCYRTLDRRLRKNLRALVVVHATWYVKAFLALLRPFISSKFTRKIRFLDSLGELAQLISLDQVHIPEAVRQLDRDLHGSGGT

SEQ ID NO: 5151 - protein, 796 aa, Homo sapiens
MEEEASRSAAATNPGSRLTRWPPPDKREGSAVDPGKRRSLAATPSSSLPCTLIALGLRHEKEANELMEDLFETFQDEMGFSNMEDDGPEEEERVAEPQANFNTPQALRFEELLANLLNEQHQIAKELFEQLKMKKPSAKQQKEVEKVKPQCKEVHQTLILDPAQRKRLQQQMQQHVQLLTQIHLLATCNPNLNPEASSTRICLKELGTFAQSSIALHHQYNPKFQTLFQPCNLMGAMQLIEDFSTHVSIDCSPHKTVKKTANEFPCLPKQVAWILATSKVFMYPELLPVCSLKAKNPQDKILFTKAEDNKYLLTCKTARQLTVRIKNLNMNRAPDNIIKFYKKTKQLPVLGKCCEEIQPHQWKPPIEREEHRLPFWLKASLPSIQEELRHMADGAREVGNMTGTTEINSDQGLEKDNSELGSETRYPLLLPKGVVLKLKPVADRFPKKAWRQKRSSVLKPLLIQPSPSLQPSFNPGKTPAQSTHSEAPPSKMVLRIPHPIQPATVLQTVPGVPPLGVSGGESFESPAALPAMPPEARTSFPLSESQTLLSSAPVPKVMMPSPASSMFRKPYVRRRPSKRRGARAFRCIKPAPVIHPASVIFTVPATTVKIVSLGGGCNMIQPVNAAVAQSPQTIPIATLLVNPTSFPCPLNQPLVASSVSPLIVSGNSVNLPIPSTPEDKAHMNVDIACAVADGENAFQGLEPKLEPQELSPLSATVFPKVEHSPGPPPVDKQCQEGLSENSAYRWTVVKTEEGRQALEPLPQGIQESLNNSSPGDLEEVVKMEPEDATEEISGFL

SEQ ID NO: 5152 - protein, 459 aa, Homo sapiens
MAASASAAAGEEDWVLPSEVEVLESIYLDELQVIKGNGRTSPWEIYITLHPATAEDQDSQYVCFTLVLQVPAEYPHEVPQISIRNPRGLSDEQIHTILQVLGHVAKAGLGTAMLYELIEKGKEILTDNNIPHGQCVICLYGFQEKEAFTKTPCYHYFHCHCLARYIQHMEQELKAQGQEQEQERQHATTKQKAVGVQCPVCREPLVYDLASLKAAPEPQQPMELYQPSAESLRQQEERKRLYQRQQERGGIIDLEAERNRYFISLQQPPAPAEPESAVDVSKGSQPPSTLAAELSTSPAVQSTLPPPLPVATQHICEKIPGTRSNQQRLGETQKAMLDPPKPSRGPWRQPERRHPKGGECHAPKGTRDTQELPPPEGPLKEPMDLKPEPHSQGVEGPPQEKGPGSWQGPPPRRTRDCVRWERSKGRTPGSSYPRLPRGQGAYRPGTRRESLGLESKDGS

SEQ ID NO: 5153 - protein, 691 aa, Homo sapiens
MGSAADVRFSLGTTTHAPPGVHRRYSALREESAKDWETSPLPGMLAPAAGPAFDSDPEISDVDEDEPGGLVGSADVVSPSGHSDAQTLAMMLQEQLDAINEEIRMIQEEKESTELRAEEIETRVTSGSMEALNLKQLRKRGSIPTSLTALSLASASPPLSGRSTPKLTSRSAAQDLDRMGVMTLPSDLRKHRRKLLSPVSREENREDKATIKCETSPPSSAALRLEKLGHPALSQEEGKSALEDQGSNPSSSNSSQDSLHKGAKRKGIKSSIGRLFGKKEKGRLIQLSRDGATGHVLLTDSEFSMQEPMVPAKLGTQAEKDRRLKKKHQLLEDARRKGMPFAQWDGPTVVSWLELWVGMPAWYVAACRANVKSGAIMSALSDTEIQREIGISNALHRLKLRLAIQEMVSLTSPSAPPTSRTSSGNVWVTHEEMETLETSTKTTLAYGDMNHEWIGNEWLPSLGLPQYRSYFMECLVDARMLDHLTKKDLRVHLKMVDSFHRTSLQYGIMCLKRLNYDRKELEKRREESQHEIKDVLVWTNDQVVHWVQSIGLRDYAGNLHESGVHGALLALDENFDHNTLALILQIPTQNTQARQVMEREFNNLLALGTDRKLDDGDDKVFRRAPSWRKRFRPREHHGRGGMLSASAETLPAGFRVSTLGTLQPPPAPPKKIMPEAHSHYLYGHMLSAFRD

SEQ ID NO: 5154 - protein, 122 aa, Homo sapiens
MAPQKDRKPKRSTWRFNLDLTHPVEDGIFDSGNFEQFLREKVKVNGKTGNLGNVVHIERFKNKITVVSEKQFSKRYLKYLTKKYLKKNNLRDWLRVVASDKETYELRYFQISQDEDESESED

SEQ ID NO: 5155 - protein, 311 aa, Homo sapiens
MQYISHIFGVINCNGFTLSDQRGLQAVGVGIFPNLGLVNHDCWPNCTVIFNNGKIELRALGKISEGEELTVSYIDFLNVSEERKRQLKKQYYFDCTCEHCQKKLKDDLFLGVKDNPKPSQEVVKEMIQFSKDTLEKIDKARSEGLYHEVVKLCRECLEKQEPVFADTNIYMLRMLSIVSEVLSYLQAFEEASFYARRMVDGYMKLYHPNNAQLGMAVMRAGLTNWHAGNIEVGHGMICKAYAILLVTHGPSHPITKDLEAMRVQTEMELRMFRQNEFMYYKMREAALNNQPMQVMAEPSNEPSPALFHKKQ

SEQ ID NO: 5156 - protein, 512 aa, Homo sapiens
MAELQMLLEEEIPGGRRALFDSYTNLERVADYCENNYIQSADKQRALEETKAYTTQSLASVAYLINTLANNVLQMLDIQASQLRRMESSINHISQTVDIHKEKVARREIGILTTNKNTSRTHKIIAPANLERPVRYIRKPIDYTILDDIGHGVKWLLRFKVSTQNMKMGGLAATPPTQKPPSPPMSGKGTLGRHSPYRTLEPVRPPVVPNDYVPSPTRNMAPSQQSPVRTASVNQRNRTYSSSGSSGGSHPSSRSSSRENSGSGSVGVPIAVPTPSPPSVFPAPAGSAGTPPLPATSASAPAPLVPATVPSSTAPDAAAGGAQTLADGFTSPTPPVVSSTPPTGHPVQFYSMNRPASRHTPPTIGGSLPYRRPPSITSQTSLQNQMNGGPFYSQNPVSDTPPPPPPVEEPVFDESPPPPPPPEDYEEEEAAVVEYSDPYAEEDPPWAPRSYLEKVVAIYDYTKDKEDELSFQEGAIIYVIKKNDDGWYEGVMNGVTGLFPGNYVESIMHYSE

SEQ ID NO: 5157 - protein, 389 aa, Homo sapiens
MPLENLEEEGLPKNPDLRIAQLRFLLSLPEHRGDAAVRDELMAAVRDNNMAPYYEALCKSLDWQIDVDLLNKMKKANEDELKRLDEELEDAEKNLGESEIRDAMMAKAEYLCRIGDKEGALTAFRKTYDKTVALGHRLDIVFYLLRIGLFYMDNDLITRNTEKAKSLIEEGGDWDRRNRLKVYQGLYCVAIRDFKQAAELFLDTVSTFTSYELMDYKTFVTYTVYVSMIALERPDLREKVIKGAEILEVLHSLPAVRQYLFSLYECRYSVFFQSLAVVEQEMKKDWLFAPHYRYYVREMRIHAYSQLLESYRSLTLGYMAEAFGVGVEFIDQELSRFIAAGRLHCKIDKVNEIVETNRPDSKNWQYQETIKKGDLLLNRVQKLSRVINM

SEQ ID NO: 5158 - protein, 139 aa, Homo sapiens
MANIAVQRIKREFKEVLKSEETSKNQIKVDLVDENFTELRGEIAGPPDTPYEGGRYQLEIKIPETYPFNPPKYKQNPEMFKQTARLWAHVYAGAPVSSPEYTKKIENLCAMGFDRNAVIVALSSKSWDVETATELLLSN

SEQ ID NO: 5159 - protein, 400 aa, Homo sapiens
MNFTVGFKPLLGDAHSMDNLEKQLICPICLEMFSKPVVILPCQHNLCRKCANDVFQASNPLWQSRGSTTVSSGGRFRCPSCRHEVVLDRHGVYGLQRNLLVENIIDIYKQESSRPLHSKAEQHLMCEEHEEEKINIYCLSCEVPTCSLCKVFGAHKDCEVAPLPTIYKRQKKQDLTLLPRLECSGTNTTYCSLDLPSSSDPPILASQNTKIIDSELSDGIAMLVAGNDRVQAVITQMEEVCQTIEDNSRRQKQLLNQRFESLCAVLEERKGELLQALAREQEEKLQRVRGLIRQYGDHLEASSKLVESAIQSMEEPQMALYLQQAKELINKVGAMSKVELAGRPEPGYESMEQFTVRVEHVAEMLRTIDFQPGASGEEEEVAPDGEEGSAGPEEERPDGP

SEQ ID NO: 5160 - protein, 65 aa, Homo sapiens [sequence omitted]

SEQ ID NO: 5161 - protein, 972 aa, Homo sapiens
MRPEGAGMELGGGEERLPEESRREHWQLLGNLKTTVEGLVSTNSPNVWSKYGGLERLCRDMQSILYHGLIRDQACRRQTDYWQFVKDIRWLSPHSALHVEKFISVHENDQSSADGASERAVAELWLQHSLQYHCLSAQLRPLLGDRQYIRKFYTDAAFLLSDAHVTAMLQCLEAVEQNNPRLLAQIDASMFARKHESPLLVTKSQSLTALPSSTYTPPNSYAQHSYFGSFSSLHQSVPNNGSERRSTSFPLSGPPRKPQESRGHVSPAEDQTIQAPPVSVSALARDSPLTPNEMSSSTLTSPIEASWVSSQNDSPGDASEGPEYLAIGNLDPRGRTASCQSHSSNAESSSSNLFSSSSSQKPDSAASSLGDQEGGGESQLSSVLRRSSFSEGQTLTVTSGAKKSHIRSHSDTSIASRGAPESCNDKAKLRGPLPYSGQSSEVSTPSSLYMEYEGGRYLCSGEGMFRRPSEGQSLISYLSEQDFGSCADLEKENAHFSISESLIAAIELMKCNMMSQCLEEEEVEEEDSDREIQELKQKIRLRRQQIRTKNLLPMYQEAEHGSFRVTSSSSQFSSRDSAQLSDSGSADEVDEFEIQDADIRRNTASSSKSFVSSQSFSHCFLHSTSAEAVAMGLLKQFEGMQLPAASELEWLVPEHDAPQKLLPIPDSLPISPDDGQHADIYKLRIRVRGNLEWAPPRPQIIFNVHPAPTRKIAVAKQNYRCAGCGIRTDPDYIKRLRYCEYLGKYFCQCCHENAQMAIPSRVLRKWDFSKYYVSNFSKDLLIKIWNDPLFNVQDINSALYRKVKLLNQVRLLRVQLCHMKNMFKTCRLAKELLDSFDTVPGHLTEDLHLYSLNDLTATRKGELGPRLAELTRAGATHVERCMLCQAKGFICEFCQNEDDIIFPFELHKCRTCEECKACYHKACFKSGSCPRCERLQARREALARQSLESYLSDYEEEPAEALALEAAVLEAT

SEQ ID NO: 5162 - protein, 386 aa, Homo sapiens [sequence omitted]

SEQ ID NO: 5163 - protein, 245 aa, Homo sapiens
MGRLDGKVIILTAAAQGIGQAAALAFAREGAKVIATDINESKLQELEKYPGIQTRVLDVTKKKQIDQFANEVERLDVLFNVAGFVHHGTVLDCEEKDWDFSMNLNVRSMYLMIKAFLPKMLAQKSGNIINMSSVASSVKGVVNRCVYSTTKAAVIGLTKSVAADFIQQGIRCNCVCPGTVDTPSLQERIQARGNPEEARNDFLKRQKTGRFATAEEIAMLCVYLASDESAYVTGNPVIIDGGWSL

SEQ ID NO: 5164 - protein, 839 aa, Homo sapiens
MSVVGIDLGFLNCYIAVARSGGIETIANEYSDRCTPACISLGSRTRAIGNAAKSQIVTNVRNTIHGFKKLHGRSFDDPIVQTERIRLPYELQKMPNGSAGVKVRYLEEERPFAIEQVTGMLLAKLKETSENALKKPVADCVISIPSFFTDAERRSVMAAAQVAGLNCLRLMNETTAVALAYGIYKQDLPPLDEKPRNVVFIDMGHSAYQVLVCAFNKGKLKVLATTFDPYLGGRNFDEALVDYFCDEFKTKYKINVKENSRALLRLYQECEKLKKLMSANASDLPLNIECFMNDLDVSSKMNRAQFEQLCASLLARVEPPLKAVMEQANLQREDISSIEIVGGATRIPAVKEQITKFFLKDISTTLNADEAVARGCALQCAILSPAFKVREFSITDLVPYSITLRWKTSFEDGSGECEVFCKNHPAPFSKVITFHKKEPFELEAFYTNLHEVPYPDARIGSFTIQNVFPQSDGDSSKVKVKVRVNIHGIFSVASASVIEKQNLEGDHSDAPMETETSFKNENKDNMDKMQVDQEEGHQKCHAEHTPEEEIDHTGAKTKSAVSDKQDRLNQTLKKGKVKSIDLPIQSSLCRQLGQDLLNSYIENEGKMIMQDKLEKERNDAKNAVEEYVYDFRDRLGTVYEKFITPEDLSKLSAVLEDTENWLYEDGEDQPKQVYVDKLQELKKYGQPIQMKYMEHEERPKALNDLGKKIQLVMKVIEAYRNKDERYDHLDPTEMEKVEKCISDAMSWLNSKMNAQNKLSLTQDPVVKVSEIVAKSKELDNFCNPIIYKPKPKAEVPEDKPKANSEHNGPMDGQSGTETKSDSTKDSSQHTKSSGEMEVD

SEQ ID NO: 5165 - protein, 407 aa, Homo sapiens
MAAPCAEDPSLERHFKGHRDAVTCVDFSINTKQLASGSMDSCLMVWHMKPQSRAYRFTGHKDAVTCVNFSPSGHLLASGSRDKTVRIWVPNVKGESTVFRAHTATVRSVHFCSDGQSFVTASDDKTVKVWATHRQKFLFSLSQHINWVRCAKFSPDGRLIVSASDDKTVKLWDKSSRECVHSYCEHGGFVTYVDFHPSGTCIAAAGMDNTVKVWDVRTHRLLQHYQLHSAAVNGLSFHPSGNYLITASSDSTLKILDLMEGRLLYTLHGHQGPATTVAFSRTGEYFASGGSDEQVMVWKSNFDIVDHGEVTKVPRPPATLASSMGNLPEVDFPVPPGRGRSVESVQSQPQEPVSVPQTLTSTLEHIVGQLDVLTQTVSILEQRLTLTEDKLKQCLENQQLIMQRATP

SEQ ID NO: 5166 - protein, 390 aa, Homo sapiens
MATGDLKRSLRNLEQVLRLLNYPEEVDCVGLIKGDPAASLPIISYSFTSYSPYVTELIMESNVELIAKNDLRFIDAVYKLLRDQFNYKPILTKKQFIQCGFAEWKIQIVCDILNCVMKKHKELSSLQKIPSQQRKKISSGKSEPPLGNEKISAEAVGVDISGRFMTSGKKKAVVIRHLYNEDNVDISEDTLSPITDVNEAVDVSDLNATEIKMPEVKVPEIKAEQQDVNVNPEITALQTMLAECQENLKKLTSIEKRLDCLEQKMKGKVMVDENTWTNLLSRVTLLETEMLLSKKNDEFIEFNEVSEDYASCSDMDLLNPHRKSEVERPASIPLSSGYSTASSDSTPRASTVNYCGLNEISEETTIQKMERMKKMFEETAELLKCPNHYL

SEQ ID NO: 5167 - protein, 866 aa, Homo sapiens
MPAVSLPPKENALFKRILRCYEHKQYRNGLKFCKQILSNPKFAEHGETLAMKGLTLNCLGKKEEAYELVRRGLRNDLKSHVCWHVYGLLQRSDKKYDEAIKCYRNALKWDKDNLQILRDLSLLQIQMRDLEGYRETRYQLLQLRPAQRASWIGYAIAYHLLEDYEMAAKILEEFRKTQQTSPDKVDYEYSELLLYQNQVLREAGLYREALEHLCTYEKQICDKLAVEETKGELLLQLCRLEDAADVYRGLQERNPENWAYYKGLEKALKPANMLERLKIYEEAWTKYPRGLVPRRLPLNFLSGEKFKECLDKFLRMNFSKGCPPVFNTLRSLYKDKEKVAIIEELVVGYETSLKSCRLFNPNDDGKEEPPTTLLWVQYYLAQHYDKIGQPSIALEYINTAIESTPTLIELFLVKAKIYKHAGNIKEAARWMDEAQALDTADRFINSKCAKYMLKANLIKEAEEMCSKFTREGTSAVENLNEMQCMWFQTECAQAYKAMNKFGEALKKCHEIERHFIEITDDQFDFHTYCMRKITLRSYVDLLKLEDVLRQHPFYFKAARIAIEIYLKLHDNPLTDENKEHEADTANMSDKELKKLRNKQRRAQKKAQIEEEKKNAEKEKQQRNQKKKKDDDDEEIGGPKEELIPEKLAKVETPLEEAIKFLTPLKNLVKNKIETHLFAFEIYFRKEKFLLMLQSVKRAFAIDSSHPWLHECMIRLFNTAVCESKDLSDTVRTVLKQEMNRLFGATNPKNFNETFLKRNSDSLPHRLSAAKMVYYLDPSSQKRAIELATTLDESLTNRNLQTCMEVLEALYDGSLGDCKEAAEIYRANCHKLFPYALAFMPPGYEEDMKITVNGDSSAEAEELANEI

SEQ ID NO: 5168 - protein, 430 aa, Homo sapiens
MASSAKSAEMPTISKTVNPTPDPHQEYLDPRITIALFEIGSHSPSSWGSLPFLKNSSHQVTEQQTAQKFNNLLKEIKDILKNMAGFEEKITEAKELFEETNITEDVSAHKENIRGLDKINEMLSTNLPVSLAPEKEDNEKKQEMILETNITEDVSAHKENIRGLDKINEMLSTNLPVSLAPEKEDNEKKQQMIMENQNSENTAQVFARDLVNRLEEKKVLNETQQSQEKAKNRLNVQEETMKIRNNMEQLLQEAEHWSKQHTELSKLIKSYQKSQKDISETLGNNGVGFQTQPNNEVSAKHELEEQVKKLSHDTYSLQLMAALLENECQILQQRVEILKELHHQKQGTLQEKPIQINYKQDKKNQKPSEAKKVEMYKQNKQAMKGTFWKKDRSCRSLDVCLNKKACNTQFNIHVARKALRGKMRSASSLR

SEQ ID NO: 5169 - protein, 1732 aa, Homo sapiens
MAAIGRGRSLKNLRVRGRNDSGEENVPLDLTREPSDNLREILQNVARLQGVSNMRKLGHLNNFTKLLCDIGHSEEKLGFHYEDIIICLRLALLNEAKEVRAAGLRALRYLIQDSSILQKVLKLKVDYLIARCIDIQQSNEVERTQALRLVRKMITVNASLFPSSVTNSLIAVGNDGLQERDRMVRACIAIICELALQNPEVVALRGGLNTILKNVIDCQLSRINEALITTILHLLNHPKTRQYVRADVELERILAPYTDFHYRHSPDTAEGQLKEDREARFLASKMGIIATFRSWAGIINLCKPGNSGIQSLIGVLCIPNMEIRRGLLEVLYDIFRLPLPVVTEEFIEALLSVDPGRFQDSWRLSDGFVAAEAKTILPHRARSRPDLMDNYLALILSAFIRNGLLEGLVEVITNSDDHISVRATILLGELLHMANTILPHSHSHHLHCLPTLMNMAASFDIPKEKRLRASAALNCLKRFHEMKKRGPKPYSLHLDHIIQKAIATHQKRDQYLRVQKDIFILKDTEEALLINLRDSQVLQHKENLEWNWNLIGTILKWPNVNLRNYKDEQLHRFVRRLLYFYKPSSKLYANLDLDFAKAKQLTVVGCQFTEFLLESEEDGQGYLEDLVKDIVQWLNASSGMKPERSLQNNGLLTTLSQHYFLFIGTLSCHPHGVKMLEKCSVFQCLLNLCSLKNQDHLLKLTVSSLDYSRDGLARVILSKILTAATDACRLYATKHLRVLLRANVEFFNNWGIELLVTQLHDKNKTISSEALDILDEACEDKANLHALIQMKPALSHLGDKGLLLLLRFLSIPKGFSYLNERGYVAKQLEKWHREYNSKYVDLIEEQLNEALTTYRKPVDGDNYVRRSNQRLQRPHVYLPIHLYGQLVHHKTGCHLLEVQNIITELCRNVRTPDLDKWEEIKKLKASLWALGNIGSSNWGLNLLQEENVIPDILKLAKQCEVLSIRGTCVYVLGLIAKTKQGCDILKCHNWDAVRHSRKHLWPVVPDDVEQLCNELSSIPSTLSLNSESTSSRHNSESESVPSSMFILEDDRFGSSSTSTFFLDINEDTEPTFYDRSGPIKDKNSFPFFASSKLVKNRILNSLTLPNKKHRSSSDPKGGKLSSESKTSNRRIRTLTEPSVDFNHSDDFTPISTVQKTLQLETSFMGNKHIEDTGSTPSIGENDLKFTKNFGTENHRENTSRERLVVESSTSSHMKIRSQSFNTDTTTSGISSMSSSPSRETVGVDATTMDTDCGSMSTVVSTKTIKTSHYLTPQSNHLSLSKSNSVSLVPPGSSHTLPRRAQSLKAPSIATIKSLADCNFSYTSSRDAFGYATLKRLQQQRMHPSLSHSEALASPAKDVLFTDTITMKANSFESRLTPSRIDFKKKHVGGIRSLRPTITNNLFRFMKALSYASLDKEDLLSPINQNTLQRSSSVRSMVSSATYGGSDDYIGLALPVDINDIFQVKDIPYFQTKNIPPHDDRGARAFAHDAGGLPSGTGGLVKNSFHLLRQQMSLTEIMNSIHSDASLFLESTEDTGLQEHTDDNCLYCVCIEILGFQPSNQLSAICSHSDFQDIPYSDWCEQTIHNPLEVVPSKFSGISGCSDGVSQEGSASSTKSTELLLGVKTIPDDTPMCRILLRKEVLRLVINLSSSVSTKCHETGLLTIKEKYPQTFDDICLYSEVSHLLSHCTFRLPCRRFIQELFQDVQFLQMHEEAEAVLATPPKQPIVDTSAES

SEQ ID NO: 5170 - protein, 586 aa, Homo sapiens
MSATVVDAVNAAPLSGSKEMSLEEPKKMTREDWRKKKELEEQRKLGNAPAEVDEEGKDINPHIPQYISSVPWYIDPSKRPTLKHQRPQPEKQKQFSSSGEWYKRGVKENSIITKYRKGACENCGAMTHKKKDCFERPRRVGAKFTGTNIAPDEHVQPQLMFDYDGKRDRWNGYNPEEHMKIVEEYAKVDLAKRTLKAQKLQEELASGKLVEQANSPKHQWGEEEPNSQMEKDHNSEDEDEDKYADDIDMPGQNFDSKRRITVRNLRIREDIAKYLRNLDPNSAYYDPKTRAMRENPYANAGKNPDEVSYAGDNFVRYTGDTISMAQTQLFAWEAYDKGSEVHLQADPTKLELLYKSFKVKKEDFKEQQKESILEKYGGQEHLDAPPAELLLAQTEDYVEYSRHGTVIKGQERAVACSKYEEDVKIHNHTHIWGSYWKEGRWGYKCCHSFFKYSYCTGEAGKEIVNSEECIINEITGEESVKKPQTLMELHQEKLKEEKKKKKKKKKKHRKSSSDSDDEEKKHEKLKKALNAEEARLLHVKETMQIDERKRPYNSMYETREPTEEEMEAYRMKRQRPDDPMASFLGQ

SEQ ID NO: 5171 - protein, 394 aa, Homo sapiens
MALEVGDMEDGQLSDSDSDMTVAPSDRPLQLPKVLGGDSAMRAFQNTATACAPVSHYRAVESVDSSEESFSDSDDDSCLWKRKRQKCFNPPPKPEPFQFGQSSQKPPVAGGKKINNIWGAVLQEQNQDAVATELGILGMEGTIDRSRQSETYNYLLAKKLRKESQEHTKDLDKELDEYMHGGKKMGSKEEENGQGHLKRKRPVKDRLGNRPEMNYKGRYEITAEDSQEKVADEISFRLQEPKKDLIARVVRIIGNKKAIELLMETAEVEQNGGLFIMNGSRRRTPGGVFLNLLKNTPSISEEQIKDIFYIENQKEYENKKAARKRRTQVLGKKMKQAIKSLNFQEDDDTSRETFASDTNEALASLDESQEGHAEAKLEAEEAIEVDHSHDLDIF

SEQ ID NO: 5172 - protein, 262 aa, Homo sapiens
MFLFSRKTRTPISTYSDSYRAPTSIKEVYKDPPLCAWEANKFLTPGLTHTMERHVDPEALQKMAKCAVQDYTYRGSISGHPYLPEKYWLSQEEADKCSPNYLGSDWYNTWRMEPYNSSCCNKYTTYLPRLPKEARMETAVRGMPLECPPRPERLNAYEREVMVNMLNSLSRNQQLPRITPRCGCVDPLPGRLPFHGYESACSGRHYCLRGMDYYASGAPCTDRRLRPWCREQPTMCTSLRAPARNAVCCYNSPAVILPISEP

SEQ ID NO: 5173 - protein, 1403 aa, Homo sapiens
MEEIPVKVAVRIRPLLCKEALHNHQVCVRVIPNSQQVIIGRDRVFTFDFVFGKNSTQDEVYNTCIKPLVLSLIEGYNATVFAYGQTGSGKTYTIGGGHIASVVEGQKGIIPRAIQEIFQSISEHPSIDFNVKVSYIEVYKEDLRDLLELETSMKDLHIREDEKGNTVIVGAKECHVESAGEVMSLLEMGNAARHTGTTQMNEHSSRSHAIFTISICQVHKNMEAAEDGSWYSPRHIVSKFHFVDLAGSERVTKTGNTGERFKESIQINSGLLALGNVISALGDPRRKSSHIPYRDAKITRLLKDSLGGSAKTVMITCVSPSSSNFDESLNSLKYANRARNIRNKPTVNFSPESDRIDEMEFEIKLLREALQSQQAGVSQTTQINREGSPDTNRIHSLEEQVAQLQGECLGYQCCVEEAFTFLVDLKDTVRLNEKQQHKLQEWFNMIQEVRKAVLTSFRGIGGTASLEEGPQHVTVLQLKRELKKCQCVLAADEVVFNQKELEVKELKNQVQMMVQENKGHAVSLKEAQKVNRLQNEKIIEQQLLVDQLSEELTKLNLSVTSSAKENCGDGPDARIPERRPYTVPFDTHLGHYIYIPSRQDSRKVHTSPPMYSLDRIFAGFRTRSQMLLGHIEEQDKVLHCQFSDNSDDEESEGQEKSGTRCRSRSWIQKPDSVCSLVELSDTQDETQKSDLENEDLKIDCLQESQELNLQKLKNSERILTEAKQKMRELTINIKMKEDLIKELIKTGNDAKSVSKQYSLKVTKLEHDAEQAKVELIETQKQLQELENKDLSDVAMKVKLQKEFRKKMDAAKLRVQVLQKKQQDSKKLASLSIQNEKRANELEQSVDHMKYQKIQLQRKLREENEKRKQLDAVIKRDQQKIKEIQLKTGQEEGLKPKAEDLDACNLKRRKGSFGSIDHLQKLDEQKKWLDEEVEKVLNQRQELEELEADLKKREAIVSKKEALLQEKSHLENKKLRSSQALNTDSLKISTRLNLLEQELSEKNVQLQTSTAEEKTKISEQVEVLQKEKDQLQKRRHNVDEKLKNGRVLSPEEEHVLFQLEEGIEALEAAIEYRNESIQNRQKSLRASFHNLSRGEANVLEKLACLSPVEIRTILFRYFNKVVNLREAERKQQLYNEEMKMKVLERDNMVRELESALDHLKLQCDRRLTLQQKEHEQKMQLLLHHFKEQDGEGIMETFKTYEDKIQQLEKDLYFYKKTSRDHKKKLKELVGEAIRRQLAPSEYQEAGDGVLKPEGGGMLSEELKWASRPESMKLSGREREMDSSASSLRTQPNPQKLWEDIPELPPIHSSLAPPSGHMLGNENKTETDDNQFTKSHSRLSSQIQVVGNVGRLHGVTPVKLCARGSELRQISALELSLRRSSLGVGIGSMAADSIEVSRKPRDLKT

SEQ ID NO: 5174 - protein, 255 aa, Homo sapiens
MVKGEKGPKGKKITLKVARNCIKITFDGKKRLDLSKMGITTFPKCILRLSDMDELDLSRNLIRKIPDSISKFQNLRWLDLHSNYIDKLPESIGQMTSLLYLNVSNNRLTSNGLPVELKQLKNIRAVNLGLNHLDSVPTTLGALKELHEVGLHDNLLNNIPVSISKLPKLKKLNIKRNPFPKPGESEIFIDSIRRLENLYVVEEKDLCAACLRKCQNARDNLNRIKNMATTTPRKTIFPNLISPNSMAKDSWEDWR

SEQ ID NO: 5175 - protein, 214 aa, Homo sapiens [sequence omitted]

SEQ ID NO: 5176 - protein, 1077 aa, Homo sapiens
MKSRFSTIDLRAVLAELNASLLGMRVNNVYDVDNKTYLIRLQKPDFKATLLLESGIRIHTTEFEWPKNMMPSSFAMKCRKHLKSRRLVSAKQLGVDRIVDFQFGSDEAAYHLIIELYDRGNIVLTDYEYVILNILRFRTDEADDVKFAVRERYPLDHARAAEPLLTLERLTEIVASAPKGELLKRVLNPLLPYGPALIEHCLLENGFSGNVKVDEKLETKDIEKVLVSLQKAEDYMKTTSNFSGKGYIIQKREIKPSLEADKPVEDILTYEEFHPFLFSQHSQCPYIEFESFDKAVDEFYSKIEGQKIDLKALQQEKQALKKLDNVRKDHENRLEALQQAQEIDKLKGELIEMNLQIVDRAIQVVRSALANQIDWTEIGLIVKEAQAQGDPVASAIKELKLQTNHVTMLLRNPYLLSEEEDDDVDGDVNVEKNETEPPKGKKKKQKNKQLQKPQKNKPLLVDVDLSLSAYANAKKYYDHKRYAAKKTQKTVEAAEKAFKSAEKKTKQTLKEVQTVTSIQKARKVYWFEKFLWFISSENYLIIGGRDQQQNEIIVKRYLTPGDIYVHADLHGATSCVIKNPTGEPIPAALTEAGTMALCYSAAWDARVITSAWWVYHHQVSKTAPTGEYLTTGSFMIRGKKNFLPPSYLMMGFSFLFKVDESCVWRHQGERKVRVQDEDMETLASCTSELISEEMEQLDGGDTSSDEDKEEHETPVEVELMTQVDQEDITLQSGRDELNEELIQEESSEDEGEYEEVRKDQDSVGEMKDEGEETLNYPDTTIDLSHLQPQRSIQKLASKEESSNSSDSKSQSRRHLSAKERREMKKKKLPSDSGDLEALEGKDKEKESTVHIETHQNTSKNVAAVQPMKRGQKSKMKKMKEKYKDQDEEDRELIMKLLGSAGSNKEEKGKKGKKGKTKDEPVKKQPQKPRGGQRVSDNIKKETPFLEVITHELQDFAVDDPHDDKEEQDLDQQGNEENLFDSLTGQPHPEDVLLFAIPICAPYTTMTNYKYKVKLTPGVQKKGKAAKTALNSFMHSKEATAREKDLFRSVKDTDLSRNIPGKVKVSAPNLLNVKARGS

SEQ ID NO: 5177 - protein, 320 aa, Homo sapiens
MGDIPAVGLSSWKASPGKVTEAVKEAIDAGYRHFDCAYFYHNEREVGAGIRCKIKEGAVRREDLFIATKLWCTCHKKSLVETACRKSLKALKLNYLDLYLIHWPMGFKPPHPEWIMSCSELSFCLSHPRVQDLPLDESNMVIPSDTDFLDTWEAMEDLVITGLVKNIGVSNFNHEQLERLLNKPGLRFKPLTNQIECHPYLTQKNLISFCQSRDVSVTAYRPLGGSCEGVDLIDNPVIKRIAKEHGKSPAQILIRFQIQRNVIVIPGSITPSHIKENIQVFDFELTQHDMDNILSLNRNLRLAMFPITKNHKDYPFHIEY

SEQ ID NO: 5178 - protein, 412 aa, Homo sapiens
MSGYQRRPGATPLSRARSLAIPDAPAFYERRSCLPQLNCERPHGRDLDSPFFGIRPAFMCYVPSPVLASVGDTDDRFEDLEEANPFSFREFLKTKNLGLSKEDPASRIYAKEASRHSLGLDHNSPPSQTGGYGLEYQQPFFEDPTGAGDLLDEEEDEDTGWSGAYLPSAIEQTHPERVPAGTSPCSTYLSFFSTPSELAGPESLPSWALSDTDSRVSPASPAGSPSADFAVHGESLGDRHLRTLQISYDALKDENSKLRRKLNEVQSFSEAQTEMVRTLERKLEAKMIKEESDYHDLESVVQQVEQNLELMTKRAVKAENHVVKLKQEISLLQAQVSNFQRENEALRCGQGASLTVVKQNADVALQNLRVVMNSAQASIKQLVSGAETLNLVAEILKSIDRISEVKDEEEDS

SEQ ID NO: 5179 - protein, 479 aa, Homo sapiens
MDATIAPHRIPPEMPQYGEENHIFELMQNMLEQLLIHQPEDPIPFMIQHLHRDNDNVPRIVILGPPASGKTTIAMWLCKHLNSSLLTLENLILNEFSYTATEARRLYLQRKTVPSALLVQLIQERLAEEDCIKQGWILDGIPETREQALRIQTLGITPRHVIVLSAPDTVLIERNLGKRIDPQTGEIYHTTFDWPPESEIQNRLMVPEDISELETAQKLLEYHRNIVRVIPSYPKILKVISADQPCVDVFYQALTYVQSNHRTNAPFTPRVLLLGPVGSGKSLQAALLAQKYRLVNVCCGQLLKEAVADRTTFGELIQPFFEKEMAVPDSLLMKVLSQRLDQQDCIQKGWVLHGVPRDLDQAHLLNRLGYNPNRVFFLNVPFDSIMERLTLRRIDPVTGERYHLMYKPPPTMEIQARLLQNPKDAEEQVKLKMDLFYRNSADLEQLYGSAITLNGDQDPYTVFEYIESGIINPLPKKIP

SEQ ID NO: 5180 - protein, 143 aa, Homo sapiens
MAHEMIGTQIVTERLVALLESGTEKVLLIDSRPFVEYNTSHILEAININCSKLMKRRLQQDKVLITELIQHSAKHKVDIDCSQKVVVYDQSSQDVASLSSDCFLTVLLGKLEKSFNSVHLLAGADAAEWDWLCVKCQQYLSKA

SEQ ID NO: 5181 - protein, 396 aa, Homo sapiens
MASLSRALRVAAAHPRQSPTRGMGPCNLSSAAGPTAEKSVPYQRTLKEGQGTSVVAQGPSRPLPSTANVVVIGGGSLGCQTLYHLAKLGMSGAVLLERERLTSGTTWHTAGLLWQLRPSDVEVELLAHTRRVVSRELEEETGLHTGWIQNGGLFIASNRQRLDEYKRLMSLGKAYGVESHVLSPAETKTLYPLMNVDDLYGTLYVPHDGTMDPAGTCTTLARAASARGAQVIENCPVTGIRVWTDDFGVRRVAGVETQHGSIQTPCVVNCAGVWASAVGRMAGVKVPLVAMHHAYVVTERIEGIQSFTLLPTLEYSGTVSAHCNLRLPGSSNSRASASHVAGIKCARHHTRLIFFCILVETEFHHVAKAGLELLSSGNPPISDFQSARITGVSHHA

SEQ ID NO: 5182 - protein, 1471 aa, Homo sapiens
MEPEPVEDCVQSTLAALYPPFEATAPTLLGQVFQVVERTYREDALRYTLDFLVPAKHLLAKVQQEACAQYSGFLFFHEGWPLCLHEQVVVQLAALPWQLLRPGDFYLQVVPSAAQAPRLALKCLAPGGGRVQEVPVPNEACAYLFTPEWLQGINKDRPTGRLSTCLLSAPSGIQRLPWAELICPRFVHKEGLMVGHQPSTLPPELPSGPPGLPSPPLPEEALGTRSPGDGHNAPVEGPEGEYVELLEVTLPVRGSPTDAEGSPGLSRVRTVPTRKGAGGKGRHRRHRAWMHQKGLGPRGQDGARPPGEGSSTGASPESPPGAEAVPEAAVLEVSEPPAEAVGEASGSCPLRPGELRGGGGGGQGAEGPPGTPRRTGKGNRRKKRAAGRGALSRGGDSAPLSPGDKEDASHQEALGNLPSPSEHKLPECHLVKEEYEGSGKPESEPKELKTAGEKEPQLSEACGPTEEGAGERELEGPGLLCMAGHTGPEGPLSDTPTPPLETVQEGKGDNIPEEALAVSVSDHPDVAWDLMASGFLILTGGVDQSGRALLTITPPCPPEEPPPSRDTLNTTLHYLHSLLRPDLQTLGLSVLLDLRQAPPLPPALIPALSQLQDSGDPPLVQRLLILIHDDLPTELCGFQGAEVLSENDLKRVAKPEELQWELGGHRDPSPSHWVEIHQEVVRLCRLCQGVLGSVRQAIEELEGAAEPEEEEAVGMPKPLQKVLADPRLTALQRDGGAILMRLRSTPSSKLEGQGPATLYQEVDEAIHQLVRLSNLHVQQQEQRQCLRRLQQVLQWLSGPGEEQLASFAMPGDTLSALQETELRFRAFSAEVQERLAQAREALALEENATSQKVLDIFEQRLEQVESGLHRALRLQRFFQQAHEWVDEGFARLAGAGPGREAVLAALALRRAPEPSAGTFQEMRALALDLGSPAALREWGRCQARCQELERRIQQHVGEEASPRGYRRRRADGASSGGAQWGPRSPSPSLSSLLLPSSPGPRPAPSHCSLAPCGEDYEEEGPELAPEAEGRPPRAVLIRGLEVTSTEVVDRTCSPREHVLLGRARGPDGPWGVGTPRMERKRSISAQQRLVSELIACEQDYVATLSEPVPPPGPELTPELRGTWAAALSARERLRSFHRTHFLRELQGCATHPLRIGACFLRHGDQFSLYAQYVKHRHKLENGLAALSPLSKGSMEAGPYLPRALQQPLEQLTRYGRLLEELLREAGPELSSECRALGAAVQLLREQEARGRDLLAVEAVRGCEIDLKEQGQLLHRDPFTVICGRKKCLRHVFLFEHLLLFSKLKGPEGGSEMFVYKQAFKTADMGLTENIGDSGLCFELWFRRRRAREAYTLQATSPEIKLKWTSSIAQLLWRQAAHNKELRVQQMVSMGIGNKPFLDIKALGERTLSALLTGRAPETLDSSGDVSPGPRNSPSLQPPHPGSSTPTLASRGILGLSRQSHARALSDPTTPL

SEQ ID NO: 5183 - protein, 1519 aa, Homo sapiens
MEPEPVEDCVQSTLAALYPPFEATAPTLLGQVFQVVERTYREDALRYTLDFLVPAKHLLAKVQQEACAQYSGFLFFHEGWPLCLHEQVVVQLAALPWQLLRPGDFYLQVVPSAAQAPRLALKCLAPGGGRVQEVPVPNEACAYLFTPEWLQGINKDRPTGRLSTCLLSAPSGIQRLPWAELICPRFVHKEGLMVGHQPSTLPPELPSGPPGLPSPPLPEEALGTRSPGDGHNAPVEGPEGEYVELLEVTLPVRGSPTDAEGSPGLSRVRTVPTRKGAGGKGRHRRHRAWMHQKGLGPRGQDGARPPGEGSSTGASPESPPGAEAVPEAAVLEVSEPPAEAVGEASGSCPLRPGELRGGGGGGQGAEGPPGTPRRTGKGNRRKKRAAGRGALSRGGDSAPLSPGDKEDASHQEALGNLPSPSEHKLPECHLVKEEYEGSGKPESEPKELKTAGEKEPQLSEACGPTEEGAGERELEGPGLLCMAGHTGPEGPLSDTPTPPLETVQEGKGDNIPEEALAVSVSDHPDVAWDLMASGFLILTGGVDQSGRALLTITPPCPPEEPPPSRDTLNTTLHYLHSLLRPDLQTLGLSVLLDLRQAPPLPPALIPALSQLQDSGDPPLVQRLLILIHDDLPTELCGFQGAEVLSENDLKRVAKPEELQWELGGHRDPSPSHWVEIHQEVVRLCRLCQGVLGSVRQAIEELEGAAEPEEEEAVGMPKPLQKVLADPRLTALQRDGGAILMRLRSTPSSKLEGQGPATLYQEVDEAIHQLVRLSNLHVQQQEQRQCLRRLQQVLQWLSGPGEEQLASFAMPGDTLSALQETELRFRAFSAEVQERLAQAREALALEENATSQKVLDIFEQRLEQVESGLHRALRLQRFFQQAHEWVDEGFARLAGAGPGREAVLAALALRRAPEPSAGTFQEMRALALDLGSPAALREWGRCQARCQELERRIQQHVGEEASPRGYRRRRADGASSGGAQWGPRSPSPSLSSLLLPSSPGPRPAPSHCSLAPCGEDYEEEGPELAPEAEGRPPRAVLIRGLEVTSTEVVDRTCSPREHVLLGRARGPDGPWGVGTPRMERKRSISAQQRLVSELIACEQDYVATLSEPVPPPGPELTPELRGTWAAALSARERLRSFHRTHFLRELQGCATHPLRIGACFLRHGDQFSLYAQYVKHRHKLENGLAALSPLSKGSMEAGPYLPRALQQPLEQLTRYGRLLEELLREAGPELSSECRALGAAVQLLREQEARGRDLLAVEAVRGCEIDLKEQGQLLHRDPFTVICGRKKCLRHVFLFEHLLLFSKLKGPEGGSEMFVYKQAFKTADMGLTENIGDSGLCFELWFRRRRAREAYTLQATSPEIKLKWTSSIAQLLWRQAAHNKELRVQQMVSMGIGNKPFLDIKALGERTLSALLTGRAARTRASVAVSSFEHAGPSLPGLSPGACSLPARVEEEAWDLDVKQISLAPETLDSSGDVSPGPRNSPSLQPPHPGSSTPTLASRGILGLSRQSHARALSDPTTPL

SEQ ID NO: 5184 - protein, 902 aa, Homo sapiens
MFPALETHLKQTIPDPYEDFMYRHLQYYGYFKAQRGSLPNSATHQHVRKNNPQCLLNGSLGEKDDLIPDTLQKEKLLWPISLSSAVHRQIEAINRDFHSCLGWMQWRGLSSLQPPPPRFKDSPASAFRVAGITDSHMLSLPHLRSRQLLYDELDEVNPRLREPQELFSILSTKRPLQAPRWPIECEVIKENIHHIEWAPPQPEYFYQPKGNEKVPEIVGEKKGTVVYQLDSVPIEGSYFTSSRVGGKRGIVKELAVTLQGPEDNTLLFESRFESGNLQKAVRVDTYEYELTLRTDLYTNKHTQWFYFRVQNTRKDATYRFTIVNLLKPKSLYTVGMKPLLYSQLDANTRNIGWRREGNEIKYYKNNTDDGQQPFYCLTWTIQFPYDQDTCFFAHFYPYTYTDLQCYLLSVANNPIQSQFCKLQTLCRSLAGNTVYLLTITNPSQTPQEAAAKKAVVLSARVHPGESNGSWVMKGFLDFILSNSPDAQLLRDIFVFKVLPMLNPDGVIVGNYRCSLAGRDLNRHYKTILKESFPCIWYTRNMIKRLLEEREVLLYCDFHGHSRKNNIFLYGCNNNNRKYWLHERVFPLMLCKNAPDKFSFHSCNFKVQKCKEGTGRVVMWRMGILNSYTMESTFGGSTLGNKRDTHFTIEDLKSLGYHVCDTLLDFCDPDQMKFTQCLAELKELLRQEIHKKFHELGQDVDLEGSWSDISLSDIESSTSGSDSSLSDGLPVHLANIADELTQKKKMFKKKKKKSLQTRKQRNEQYQKKNLMQKLKLTEDTSEKAGFASTLQKQPTFFKNSENSSFLPMKNENPRLNETNLNRRDKDTPLDPSMATLILPKNKGRMQNKKPGFTVSCSPKRTINSSQEPAPGMKPNWPRSRYPATKRGCAAMAAYPSLHIYTYP

SEQ ID NO: 5185 - protein, 1077 aa, Homo sapiens
MEVQVSQASLGFELTSVEKSLREWSRLSREVIAWLCPSSPNFILNFPPPPSASSVSMVQLFSSPFGYQSPSGHSEEEREGNMKSAKPQVNHSQHGESQRALSPLQSTLSSAASPSQAYETYIENGLICLKHKIRNIEKKKLKLEDYKDRLKSGEHLNPDQLEAVEKYEEVLHNLEFAKELQKTFSGLSLDLLKAQKKAQRREHMLKLEAEKKKLRTILQVQYVLQNLTQEHVQKDFKGGLNGAVYLPSKELDYLIKFSKLTCPERNESLSVEDQMEQSSLYFWDLLEGSEKAVVGTTYKHLKDLLSKLLNSGYFESIPVPKNAKEKEVPLEEEMLIQSEKKTQLSKTESVKESESLMEFAQPEIQPQEFLNRRYMTEVDYSNKQGEEQPWEADYARKPNLPKRWDMLTEPDGQEKKQESFKSWEASGKHQEVSKPAVSLEQRKQDTSKLRSTLPEEQKKQEISKSKPSPSQWKQDTPKSKAGYVQEEQKKQETPKLWPVQLQKEQDPKKQTPKSWTPSMQSEQNTTKSWTTPMCEEQDSKQPETPKSWENNVESQKHSLTSQSQISPKSWGVATASLIPNDQLLPRKLNTEPKDVPKPVHQPVGSSSTLPKDPVLRKEKLQDLMTQIQGTCNFMQESVLDFDKPSSAIPTSQPPSATPGSPVASKEQNLSSQSDFLQEPLQATSSPVTCSSNACLVTTDQASSGSETEFMTSETPEVFNVNAPLPPRKEQEIKESPYSPGYNQSFTTASTQTPPQCQLPSIHVEQTVHSQETANYHPDGTIQVSNGSLAFYPAQTNVFPRPTQPFVNSRGSVRGCTRGGRLITNSYRSPGGYKGFDTYRGLPSISNGNYSQLQFQAREYSGAPYSQRDNFQQCYKRGGTSGGPRANSRAGWSDSSQVSSPERDNETFNSGDSGQGDSRSMTPVDVPVTNPAATILPVHVYPLPQQMRVAFSAARTSNLAPGTLDQPIVFDLLLNNLGETFDLQLGRFNCPVNGTYVFIFHMLKLAVNVPLYVNLMKNEEVLVSAYANDGAPDHETASNHAILQLFQGDQIWLRLHRGAIYGSSWKYSTFSGYLLYQD

SEQ ID NO: 5186 - protein, 351 aa, Homo sapiens
MTLRLLEDWCRGMDMNPRKALLIAGISQSCSVAEIEEALQAGLAPLGEYRLLGRMFRRDENRKVALVGLTAETSHALVPKEIPGKGGIWRVIFKPPDPDNTFLSRLNEFLAGEGMTVGELSRALGHENGSLDPEQGMIPEMWAPMLAQALEALQPALQCLKYKKLRVFSGRESPEPGEEEFGRWMFHTTQMIKAWQVPDVEKRRRLLESLRGPALDVIRVLKINNPLITVDECLQALEEVFGVTDNPRELQVKYLTTYQKDEEKLSAYVLRLEPLLQKLVQRGAIERDAVNQARLDQVIAGAVHKTIRRELNLPEDGPAPGFLQLLVLIKDYEAAEEEEALLQAILEGNFT

SEQ ID NO: 5187 - protein, 852 aa, Homo sapiens
MSGRARVKARGIARSPSATEVGRIQASPLPRSVDLSNNEASSSNGFLGTSRISTNDKYGISSGDAGSTFMERGVKNKQDFMDLSICTREKLAHVRNCKTGSSGIPVKLVTNLFNLDFPQDWQLYQYHVTYIPDLASRRLRIALLYSHSELSNKAKAFDGAILFLSQKLEEKVTELSSETQRGETIKMTITLKRELPSSSPVCIQVFNIIFRKILKKLSMYQIGRNFYNPSEPMEIPQHKLSLWPGFAISVSYFERKLLFSADVSYKVLRNETVLEFMTALCQRTGLSCFTQTCEKQLIGLIVLTRYNNRTYSIDDIDWSVKPTHTFQKRDGTEITYVDYYKQQYDITVSDLNQPMLVSLLKKKRNDNSEAQLAHLIPELCFLTGLTDQATSDFQLMKAVAEKTRLSPSGRQQRLARLVDNIQRNTNARFELETWGLHFGSQISLTGRIVPSEKILMQDHICQPVSAADWSKDIRTCKILNAQSLNTWLILCSDRTEYVAESFLNCLRRVAGSMGFNVDYPKIIKVQENPAAFVRAIQQYVDPDVQLVMCILPSNQKTYYDSIKKYLSSDCPVPSQCVLARTLNKQGMMMSIATKIAMQMTCKLGGELWAVEIPLKSLMVVGIDVCKDALSKDVMVVGCVASVNPRITRWFSRCILQRTMTDVADCLKVFMTGALNKWYKYNHDLPARIIVYRAGVGDGQLKTLIEYEVPQLLSSVAESSSNTSSRLSVIVVRKKCMPRFFTEMNRTVQNPPLGTVVDSEATRNEWYDFYLISQVACRGTVSPTYYNVIYDDNGLKPDHMQRLTFKLCHLYYNWPGIVSVPAPCQYAHKLTFLVAQSIHKEPSLELANHLFYL

SEQ ID NO: 5188 - protein, 720 aa, Homo sapiens
MYGSARSVGKVEPSSQSPGRSPRLPRSPRLGHRRTNSTGGSSGSSVGGGSGKTLSMENIQSLNAAYATSGPMYLSDHENVGSETPKSTMTLGRSGGRLPYGVRMTAMGSSPNIASSGVASDTIAFGEHHLPPVSMASTVPHSLRQARDNTIMDLQTQLKEVLRENDLLRKDVEVKESKLSSSMNSIKTFWSPELKKERALRKDEASKITIWKEQYRVVQEENQVDALRLRLEEKETMLNKKTKQIQDMAEEKGTQAGEIHDLKDMLDVKERKVNVLQKKIENLQEQLRDKEKQMSSLKERVKSLQADTTNTDTALTTLEEALAEKERTIERLKEQRDRDEREKQEEIDNYKKDLKDLKEKVSLLQGDLSEKEASLLDLKEHASSLASSGLKKDSRLKTLEIALEQKKEECLKMESQLKKAHEAALEARASPEMSDRIQHLEREITRYKDESSKAQAEVDRLLEILKEVENEKNDKDKKIAELESLFSRQVKDQNKKVANLKHKEQVEKKKSAQMLEEARRREDNLNDSSQQLQDSLRKKDDRIEELEEALRESVQITAEREMVLAQEESARTNAEKQVEELLMAMEKVKQELESMKAKLSSTQQSLAEKETHLTNLRAERRKHLEEVLEMKQEALLAAISEKDANIALLELSSSKKKTQEEVAALKREKDRLVQQLKQQTQNRMKLMADNYEDDHFKSSHSNQTNHKPSPDQDEEEGIWA

SEQ ID NO: 5189 - protein, 447 aa, Homo sapiens
MDMGNQHPSISRLQEIQKEVKSVEQQVIGFSGLSDDKNYKKLERILTKQLFEIDSVDTEGKGDIQQARKRAAQETERLLKELEQNANHPHRIEIQNIFEEAQSLVREKIVPFYNGGNCVTDEFEEGIQDIILRLTHVKTGGKISLRKARYHTLTKICAVQEIIEDCMKKQPSLPLSEDAHPSVAKINFVMCEVNKARGVLIALLMGVNNNETCRHLSCVLSGLIADLDALDVCGRTEIRNYRREVVEDINKLLKYLDLEEEADTTKAFDLRQNHSILKIEKVLKRMREIKNELLQAQNPSELYLSSKTELQGLIGQLDEVSLEKNPCIREARRRAVIEVQTLITYIDLKEALEKRKLFACEEHPSHKAVWNVLGNLSEIQGEVLSFDGNRTDKNYIRLEELLTKQLLALDAVDPQGEEKCKAARKQAVRLAQNILSYLDLKSDEWEY

SEQ ID NO: 5190 - protein, 491 aa, Homo sapiens
MAQSGGEARPGPKTAVQIRVAIQEAEDVDELEDEEEGAETRGAGDPARYLSPGWGSASEEEPSRGHSGTTASGGENEREDLEQEWKPPDEELIKKLVDQIEFYFSDENLEKDAFLLKHVRRNKLGYVSVKLLTSFKKVKHLTRDWRTTAHALKYSVVLELNEDHRKVRRTTPVPLFPNENLPSKMLLVYDLYLSPKLWALATPQKNGRVQEKVMEHLLKLFGTFGVISSVRILKPGRELPPDIRRISSRYSQVGTQECAIVEFEEVEAAIKAHEFMITESQGKENMKAVLIGMKPPKKKPAKDKNHDEEPTASIHLNKSLNKRVEELQYMGDESSANSSSDPESNPTSPMAGRRHAATNKLSPSGHQNLFLSPNASPCTSPWSSPLAQRKGVSRKSPLAEEGRLNCSTSPEIFRKCMDYSSDSSVTPSGSPWVRRRRQAEMGTQEKSPGTSPLLSRKMQTADGLPVGVLRLPRGPDNTRGFHGHERSRACV

SEQ ID NO: 5191 - protein, 104 aa, Homo sapiens
MAGKAHRLSAEERDQLLPNLRAVGWNELEGRDAIFKQFHFKDFNRAFGFMTRVALQAEKLDHHPEWFNVYNKVHITLSTHECAGLSERDINLASFIEQVAVSMT

SEQ ID NO: 5192 - protein, 245 aa, Homo sapiens
MIGVSFEEAKSIITGAKLSTRLESAWEIAFIRQKSDNIQPENLSCTSLIEASGEYGPQASTLSLFSSPPEILIPKTSSTPKTNNDILSSCEIKTGYNKTVQIPITSENSTVGLSNTDVASAWTENYGLQEKISLNPSVRFKAEKLEMALNYLGIQPTKEQHQALRQQVQADSKGTVSFGDFVQVARNLFCLQLDEVNVGAHEISNILDSQLLPCDSSEADEMERLKCERDDALKEVNTLKWPGQN

SEQ ID NO: 5193 - protein, 282 aa, Homo sapiens
MGGAVSAGEDNDELIDNLKEAQYIRTELVEQAFRAIDRADYYLEEFKENAYKDLAWKHGNIHLSAPCIYSEVMEALDLQPGLSFLNLGSGTGYLSSMVGLILGPFGVNHGVELHSDVIEYAKQKLDFFIRTSDSFDKFDFCEPSFVTGNCLEISPDCSQYDRVYCGAGVQKEHEEYMKNLLKVGGILVMPLEEKLTKITRTGPSAWETKKILAVSFAPLIQPCHSESGKSRLVQLRSPSFVQGWSVVVLSQLTAASTFQAEAILPSQSPTWLTLQVLATMPN

SEQ ID NO: 5194 - protein, 203 aa, Homo sapiens
MARPRPREYKAGDLVFAKMKGYPHWPARIDELPEGAVKPPANKYPIFFFGTHETAFLGPKDLFPYKEYKDKFGKSNKRKGFNEGLWEIENNPGVKFTGYQAIQQQSSSETEGEGGNTADASSEEEGDRVEEDGKGKRKNEKAGSKRKKSYTSKKSSKQSRKSPGDEDDKDCKEEENKSSSEGGDAGNDTRNTTSDLQKTSEGT

SEQ ID NO: 5195 - protein, 179 aa, Homo sapiens
MKTPVELAVSGMQTLGLQHRCRGGYRVKARTSYVDETLFGSPAGTRPTPPDFDPPWVEKANRTRGVGKEASKALGAKGSCETTPSRGSTPTLTPRKKNKYRPISHTPSYCDESLFGSRSEGASFGAPRMAKGDAAKLRALLWTPPPTPRGSHSPRPREAPPPVPPTQMGLRISGLPRQG

SEQ ID NO: 5196 - protein, 367 aa, Homo sapiens
MDGEDIPDFSSLKEETAYWKELSLKYKQSFQEARDELVEFQEGSRELEAELEAQLVQAEQRNRDLQADNQRLKYEVEALKEKLEHQYAQSYKQVSVLEDDLSQTRAIKEQLHKYVRELEQANDDLERAKRATIVSLEDFEQRLNQAIERNAFLESELDEKESLLVSVQRLKDEARDLRQELAVRERQQEVTRKSAPSSPTLDCEKMDSAVQASLSLPATPVGKGTENTFPSPKAIPNGFGTSPLTPSARISALNIVGDLLRKVGALESKLAACRNFAKDQASRKSYISGNVNCGVLNGNGTKFSRSGHTSFFDKGSSSSCAIRASRRRFSSSSADLAGRGGGDGSIPAQHSTGASGKAPPPTLLLET

SEQ ID NO: 5197 - protein, 196 aa, Homo sapiens
MGSRSSHAAVIPDGDSIRRETGFSQASLLRLHHRFRALDRNKKGYLSRMDLQQIGALAVNPLGDRIIESFFPDGSQRVDFPGFVRVLAHFRPVEDEDTETQDPKKPEPLNSRRNKLHYAFQLYDLDRDGKISRHEMLQVLRLMVGVQVTEEQLENIADRTVQEADEDGDGAVSFVEFTKSLEKMDVEQKMSIRILK

SEQ ID NO: 5198 - protein, 770 aa, Homo sapiens
MFRYESLEDCPLDEDEDAFQGLGEEDEEIDQFNDDTFGSGAVDDDWQEAHERLAELEEKLPVAVNEQTGNGERDEMDLLGDHEENLAERLSKMVIENELEDPAIMRAVQTRPVLQPQPGSLNSSIWDGSEVLRRIRGPLLAQEMPTVSVLEYALPQRPPQGPEDDRDLSERALPRRSTSPIIGSPPVRAVPIGTPPKQMAVPSFTQQILCPKPVHVRPPMPPRYPAPYGERMSPNQLCSVPNSSLLGHPFPPSVPPVLSPLQRAQLLGGAQLQPGRMSPSQFARVPGFVGSPLAAMNPKLLQGRVGQMLPPAPGFRAFFSAPPSATPPPQQHPPGPGPHLQNLRSQAPMFRPDTTHLHPQHRRLLHQRQQQNRSQHRNLNGAGDRGSHRSSHQDHLRKDPYANLMLQREKDWVSKIQMMQLQSTDPYLDDFYYQNYFEKLEKLSAAEEIQGDGPKKERTKLITPQVAKLEHAYKPVQFEGSLGKLTVSSVNNPRKMIDAVVTSRSEDDETKEKQVRDKRRKTLVIIEKTYSLLLDVEDYERRYLLSLEEERPALMDDRKHKICSMYDNLRGKLPGQERPSDDHFVQIMCIRKGKRMVARILPFLSTEQAADILMTTARNLPFLIKKDAQDEVLPCLLSPFSLLLYHLPSVSITSLLRQLMNLPQSAATPALSNPHLTAVLQNKFGLSLLLILLSRGEDLQSSDPATESTQNNQWTEVMFMATRELLRIPQAALAKPISIPTNLVSLFSRYVDRQKLNLLETKLQLVQGIR

SEQ ID NO: 5199 - protein, 504 aa, Homo sapiens
MRLRRLALFPGVALLLAAARLAAASDVLELTDDNFESRISDTGSAGLMLVEFFAPWCGHCKRLAPEYEAAATRLKGIVPLAKVDCTANTNTCNKYGVSGYPTLKIFRDGEEAGAYDGAAADGIVSHLKKQAGPASVPLRTEEEFKKFISDKDASIVGFFDDSFSEAHSEFLKAASNLRDNYRFAHTNVESLVNEYDDNGEGIILFRPSHLTNKFEDKTVAYTEQKMTSGKIKKFIQENIFGICPHMTEDNKDLIQGKDLLIAYYDVDYEKNAKGSNYWRNRVMMVAKKFLDAGHKLNFAVASRKTFSHELSDFGLESTAGEIPVVAIRTAKGEKFVMQEEFSRDGKALERFLQDYFDGNLKRYLKSEPIPESNDGPVKVVVAENFDEIVNNENKDVLIEFYAPWCGHCKNLEPKYKELGEKLSKDPNIVIAKMDATANDVPSPYEVRGFPTIYFSPANKKLNPKKYEGGRELSDFISYLQREATNPPVIQEEKPKKKKKAQEDL

SEQ ID NO: 5200 - protein, 227 aa, Homo sapiens
MSVVPPNRSQTGWPRGVTQFGNKYIQQTKPLTLERTINLYPLTNYTFGTKEPLYEKDSSVAARFQRMREEFDKIGMRRTVEGVLIVHEHRLPHVLLLQLGTTFFKLPGGELNPGEDEVEGLKRLMTEILGRQDGVLQDWVIDDCIGNWWRPNFEPPQYPYIPAHITKPKEHKKLFLVQLQEKALFAVPKNYKLVAAPLFELYDNAPGYGPIISSLPQLLSRFNFIYN

SEQ ID NO: 5201 - protein, 747 aa, Homo sapiens
MSQVKSSYSYDAPSDFINFSSLDDEGDTQNIDSWFEEKANLENKLLGKNGTGGLFQGKTPLRKANLQQAIVTPLKPVDNTYYKEAEKENLVEQSIPSNACSSLEVEAAISRKTPAQPQRRSLRLSAQKDLEQKEKHHVKMKAKRCATPVIIDEILPSKKMKVSNNKKKPEEEGSAHQDTAEKNASSPEKAKGRHTVPCMPPAKQKFLKSTEEQELEKSMKMQQEVVEMRKKNEEFKKLALAGIGQPVKKSVSQVTKSVDFHFRTDERIKQHPKNQEEYKEVNFTSELRKHPSSPARVTKGCTIVKPFNLSQGKKRTFDETVSTYVPLAQQVEDFHKRTPNRYHLRSKKDDINLLPSKSSVTKICRDPQTPVLQTKHRARAVTCKSTAELEAEELEKLQQYKFKARELDPRILEGGPILPKKPPVKPPTEPIGFDLEIEKRIQERESKKKTEDEHFEFHSRPCPTKILEDVVGVPEKKVLPITVPKSPAFALKNRIRMPTKEDEEEDEPVVIKAQPVPHYGVPFKPQIPEARTVEICPFSFDSRDKERQLQKEKKIKELQKGEVPKFKALPLPHFDTINLPEKKVKNVTQIEPFCLETDRRGALKAQTWKHQLEEELRQQKEAACFKARPNTVISQEPFVPKKEKKSVAEGLSGSLVQEPFQLATEKRAKERQELEKRMAEVEAQKAQQLEEARLQEEEQKKEELARLRRELVHKANPIRKYQGLEIKSSDQPLTVPVSPKFSTRFHC

SEQ ID NO: 5202 - protein, 119 aa, Homo sapiens
MKLVRFLMKLSHETVTIELKNGTQVHGTITGVDVSMNTHLKAVKMTLKNREPVQLETLSIRGNNIRYFILPDSLPLDTLLVDVEPKVKSKKREAVAGRGRGRGRGRGRGRGRGRGGPRR

SEQ ID NO: 5203 - protein, 184 aa, Homo sapiens
MMGASTLQEPALSPGRCPRQPLRSKFGHQGSTVQRKCSKTNALNVSQKMIEMFVRTKHKIDKSHEFALVVVNDDTAWLSGLTSDPRELCSCLYDLETASCSTFNISGASPARQQKTELPVTENVQTIPPPYVVRTILVYSRPPCQPQFSLTEPMKKMFQCPYFFFDVVYIHNGTEEKEEEMSWK

SEQ ID NO: 5204 - protein, 400 aa, Homo sapiens
MASEKPLAAVTCTAPVNIAVIKYWGKRDEELVLPINSSLSVTLHQDQLKTTTTAVISKDFTEDRIWLNGREEDVGQPRLQACLREIRCLARKRRNSRDGDPLPSSLSCKVHVASVNNFPTAAGLASSAAGYACLAYTLARVYGVESDLSEVARRGSGSACRSLYGGFVEWQMGEQADGKDSIARQVAPESHWPELRVLILVVSAEKKLTGSTVGMRASVETSPLLRFRAESVVPARMAEMARCIRERDFPSFAQLTMKDSNQFHATCLDTFPPISYLNAISWRIIHLVHRFNAHHGDTKVAYTFDAGPNAVIFTLDDTVAEFVAAVWHGFPPGSNGDTFLKGLQVRPAPLSAELQAALAMEPTPGGVKYIIVTQVGPGPQILDDPCAHLLGPDGLPKPAA

SEQ ID NO: 5205 - protein, 449 aa, Homo sapiens
MRECISIHVGQAGVQIGNACWELYCLEHGIQPDGQMPSDKTIGGGDDSFNTFFSETGAGKHVPRAVFVDLEPTVIDEVRTGTYRQLFHPEQLITGKEDAANNYARGHYTIGKEIIDLVLDRIRKLADQCTGLQGFLVFHSFGGGTGSGFTSLLMERLSVDYGKKSKLEFSIYPAPQVSTAVVEPYNSILTTHTTLEHSDCAFMVDNEAIYDICRRNLDIERPTYTNLNRLISQIVSSITASLRFDGALNVDLTEFQTNLVPYPRIHFPLATYAPVISAEKAYHEQLTVAEITNACFEPANQMVKCDPRHGKYMACCLLYRGDVVPKDVNAAIATIKTKRTIQFVDWCPTGFKVGINYQPPTVVPGGDLAKVQRAVCMLSNTTAVAEAWARLDHKFDLMYAKRAFVHWYVGEGMEEGEFSEAREDMAALEKDYEEVGADSADGEDEGEEY

SEQ ID NO: 5206 - protein, 454 aa, Homo sapiens
MSTFRQEDVEDHYEMGEELGSGQFAIVRKCRQKGTGKEYAAKFIKKRRLSSSRRGVSREEIEREVNILREIRHPNIITLHDIFENKTDVVLILELVSGGELFDFLAEKESLTEDEATQFLKQILDGVHYLHSKRIAHFDLKPENIMLLDKNVPNPRIKLIDFGIAHKIEAGNEFKNIFGTPEFVAPEIVNYEPLGLEADMWSIGVITYILLSGASPFLGETKQETLTNISAVNYDFDEEYFSNTSELAKDFIRRLLVKDPKRRMTIAQSLEHSWIKAIRRRNVRGEDSGRKPERRRLKTTRLKEYTIKSHSSLPPNNSYADFERFSKVLEEAAAAEEGLRELQRSRRLCHEDVEALAAIYEEKEAWYREESDSLGQDLRRLRQELLKTEALKRQAQEEAKGALLGTSGLKRRFSRLENRYEALAKQVASEMRFVQDLVRALEQEKLQGVECGLR

SEQ ID NO: 5207 - protein, 441 aa, Homo sapiens
MKKFFQEFKADIKFKSAGPGQKLKESVGEKAHKEKPNQPAPRPPRQGPTNEAQMAAAAALARLEQKQSRAWGPTSQDTIRNQVRKELQAEATVSGSPEAPGTNVVSEPREEGSAHLAVPGVYFTCPLTGATLRKDQRDACIKEAILLHFSTDPVAASIMKIYTFNKDQDRVKLGVDTIAKYLDNIHLHPEEEKYRKIKLQNKVFQERINCLEGTHEFFEAIGFQKVLLPAQDQEDPEEFYVLSETTLAQPQSLERHKEQLLAAEPVRAKLDRQRRVFQPSPLASQFELPGDFFNLTAEEIKREQRLRSEAVERLSVLRTKAMREKEEQRGLRKYNYTLLRVRLPDGCLLQGTFYARERLGAVYGFVREALQSDWLPFELLASGGQKLSEDENLALNECGLVPSALLTFSWDMAVLEDIKAAGAEPDSILKPELLSAIEKLL

SEQ ID NO: 5208 - protein, 299 aa, Homo sapiens
MRDLLLHWGPGPPIRAPQEEAEALLELQGRLQEAQDTTEALRAQLGVQEVQLQGLQGALQQLQQETEQNCRRELQQMHGQLAGLRARMASLRQGCGDLRGLVSTFTQSCQGSLSEARGQVSWALGALSSGGPGTQLPEGQQGPPAGCPGRLPELKGNIRVLCRLRPGTSSSLVSVEPGPGGTVTTCYRGRHRRFRLDWVFPPDASQEEVFRELEPAVLSCLRGYSVCIFTYGQTGTGKTYSMEGPPEDPGIVPRALQSLFREMGAGRQHRRYHGRCLSPAESPEHPRPGLPPCRARSPL

SEQ ID NO: 5209 - protein, 838 aa, Homo sapiens
MYAFYSLLIYIFYSLFRRDGGAAAAAEPGDPAQRARKPRGRRRPDLPAPELWTELTGLAASSEPEDGSEGAAEGRAAAVSLEEALLRLAEFLSVQLGAEESCGGPADLGQSGEVPSLLTVTSQLLALLAWLRSPRGRQALLQGTQPAPRVRPPSPDGSTSQEESPSHFTAVPGEPLGDETQGQQPLQLEEDQRAWQRLEQLILGQLEELKQQLEQQEEELGRLRLGVGATDSEKRVQHLTLENEALKQSLSLMRDLLLHWGPGPPIRAPQEEAEALLELQGRLQEAQDTTEALRAQLGVQEVQLQGLQGALQQLQQETEQNCRRELQQMHGQLAGLRARMASLRQGCGDLRGLVSTFTQSCQGSLSEARGQVSWALGALSSGGPGTQLPEGQQGPPAGCPGRLPELKGNIRVLCRLRPGTSSSLVSVEPGPGGTVTTCYRGRHRRFRLDWVFPPDASQEEVFRELEPAVLSCLRGYSVCIFTYGQTGTGKTYSMEGPPEDPGIVPRALQSLFREMGAGRQHRVTLSMVEIYNEAVRDLLAPGPPERLAVRQGPEGQGGIQVAGLTHWDVPNLETLHQMLKLGRSNRATAATAMNQRSSRSHALVTLTLRAASPPRAPGTAGTLHLVDLAGSERARKAGAAGPPRGDPDGARRLREAQTINRSLLALGGVMAALRAHRPHVPFRDSQLTRLLQPALGPGTTAVLLLQVGAGAGQVCACRSPPTRARPPAPLARRSPRGRRISGRQSAPSSSPTEWVKWSWGQPGAAGSRAPPGRLLPSAPTLRSPGPPAPLRRPLAVLHAPVPTTARARLSRPQRACPSSPGSRPCPWGLRPGLCWQRR

SEQ ID NO: 5210 - protein, 198 aa, Homo sapiens
MASGNARIGKPAPDFKATAVVDGAFKEVKLSDYKGKYVVLFFYPLDFTFVCPTEIIAFSNRAEDFRKLGCEVLGVSVDSQFTHLAWINTPRKEGGLGPLNIPLLADVTRRLSEDYGVLKTDEGIAYRGLFIIDGKGVLRQITVNDLPVGRSVDEALRLVQAFQYTDEHGEVCPAGWKPGSDTIKPNVDDSKEYFSKHN

SEQ ID NO: 5211 - protein, 459 aa, Homo sapiens
MSVRFSSTSRRLGSCGGTGSVRLSSGGAGFGAGNTCGVPGIGSGFSCAFGGSSSAGGYGGGLGGGSASCAAFTGNEHGLLSGNEKVTMQNLNDRLASYLENVRALEEANADLEQKIKGWYEKFGPGSCRGLDHDYSRYFPIIDELKNQIISATTSNAHVVLQNDNARLTADDFRLKFENELALHQSVEADINGLRRVLDELTLCRTDLEIQLETLSEELAYLKKNHEEEMKALQCAAGGNVNVEMNAAPGVDLTVLLNNMRAEYEALAEQNRRDAEAWFNEKSASLQQQISDDAGATTSARNELIEMKRTLQTLEIELQSLLATKHSLECSLTETESNYCAQLAQIQAQIGALEEQLHQVRTETEGQKLEYEQLLDIKVHLEKEIETYCLLIDGEDGSCSKSKGYGGPGNQTKDSSKTTIVKTVVEEIDPRGKVLSSRVHTVEEKSTKVNNKNEQRVSS

SEQ ID NO: 5212 - protein, 277 aa, Homo sapiens
MPSVSKAAAAALSGSPPQTEKPTHYRYLKEFRTEQCPLFSQHKCAQHRPFTCFHWHFLNQRRRRPLRRRDGTFNYSPDVYCSKYNEATGVCPDGDECPYLHRTTGDTERKYHLRYYKTGTCIHETDARGHCVKNGLHCAFAHGPLDLRPPVCDVRELQAQEALQNGQLGGGEGVPDLQPGVLASQAMIEKILSEDPRWQDANFVLGSYKTEQCPKPPRLCRQGYACPHYHNSRDRRRNPRRFQYSWQLGRRVLRLSPRANNPRVALPRVHTGPSSTA

SEQ ID NO: 5213 - protein, 305 aa, Homo sapiens
MDLSGVKKKSLLGVKENNKKSSTRAPSPTKRKDRSDEKSKDRSKDKGATKESSEKDRGRDKTRKRRSASSGSSSTRSRSSSTSSSGSSTSTGSSSGSSSSSASSRSGSSSTSRSSSSSSSSGSPSPSRRRHDNRRRSRSKSKPPKRDEKERKRRSPSPKPTKVHIGRLTRNVTKDHIMEIFSTYGKIKMIDMPVERMHPHLSKGYAYVEFENPDEAEKALKHMDGGQIDGQEITATAVLAPWPRPPPRRFSPPRRMLPPPPMWRRSPPRMRRRSRSPRRRSPVRRRSRSPGRRRHRSRSSSNSSR

SEQ ID NO: 5214 - protein, 1064 aa, Homo sapiens
MRKQEVRTGREAGQGHGTGSPAEQVKALMDLLAGKGSQGSQAPQALDRTPDAPLGPCSNDSRIQRHRKALLSKVGGGPELGGPWHRLASLLLVEGLTDLQLREHDFTQVEATRGGGHPARTVALDRLFLPLSRVSVPPRVSITIGVAGMGKTTLVRHFVRLWAHGQVGKDFSLVLPLTFRDLNTHEKLCADRLICSVFPHVGEPSLAVAVPARALLILDGLDECRTPLDFSNTVACTDPKKEIPVDHLITNIIRGNLFPEVSIWITSRPSASGQIPGGLVDRMTEIRGFNEEEIKVCLEQMFPEDQALLGWMLSQVQADRALYLMCTVPAFCRLTGMALGHLWRSRTGPQDAELWPAALCELYSWYFRMALSGEGQEKGKASPRIEQVAHGGRKMVGTLGRLAFHGLLKKKYVFYEQDMKAFGVDLALLQGAPCSCFLQREETLASSVAYCFTHLSLQEFVAAAYYYGASRRAIFDLFTESGVSWPRLGFLTHFRSAAQRAMQAEDGRLDVFLRFLSGLLSPRVNALLAGSLLAQGEHQAYRTQVAELLQGCLRPDAAVCARAINVLHCLHELQHTELARSVEEAMESGALARLTGPAHRAALAYLLQVSDACAQEANLSLSLSQGVLQSLLPQLLYCRKLRLDTNQFQDPVMELLGSVLSGKDCRIQKISLAENQISNKGAKALARSLLVNRSLTSLDLRGNSIGPQGAKALADALKINRTLTSLSLQGNTVRDDGARSMAEALASNRTLSMLHLQKNSIGPMGAQRMADALKQNRSLKELMFSSNSIGDGGAKALAEALKVNQGLESLDLQSNSISDAGVAALMGALCTNQTLLSLSLRENSISPEGAQAIAHALCANSTLKNLDLTANLLHDQGARAIAVAVRENRTLTSLHLQWNFIQAGAAQALGQALQLNRSLTSLDLQENAIGDDGACAVARALKVNTALTALYLQVASIGASGAQVLGEALAVNRTLEILDLRGNAIGVAGAKALANALKVNSSLRRLNLQENSLGMDGAICIATALSGNHRLQHINLQGNHIGDSGARMISEAIKTNAPTCTVEM

SEQ ID NO: 5215 - protein, 308 aa, Homo sapiens
MNPIVVVHGGGAGPISKDRKERVHQGMVRAATVGYGILREGGSAVDAVEGAVVALEDDPEFNAGCGSVLNTNGEVEMDASIMDGKDLSAGAVSAVQCIANPIKLARLVMEKTPHCFLTDQGAAQFAAAMGVPEIPGEKLVTERNKKRLEKEKHEKGAQKTDCQKNLGTVGAVALDCKGNVAYATSTGGIVNKMVGRVGDSPCLGAGGYADNDIGAVSTTGHGESILKVNLARLTLFHIEQGKTVEEAADLSLGYMKSRVKGLGGLIVVSKTGDWVAKWTSTSMPWAAAKDGKLHFGIDPDDTTITDLP

SEQ ID NO: 5216 - protein, 403 aa, Homo sapiens
MAGRRAQTGSAPPRPAAPHPPASRAFPQHCRPRDAERPPSPRSPLMPGCELPVGTCPDMCPAAERAQREREHRLHRLEVVPGCRQDPPRADPQRAVKEYSRPAAGKPRPPPSQLRPPSVLLATVRYLAGEVAESADIARAEVASFVADRLRAVLLDLALQGAGDAEAAVVLEAALATLLTVVARLGPDAARGPADPVLLQAQVQEGFGSLRRCYARGAGPHPRQPAFQGLFLLYNLGSVEALHEVLQLPAALRACPPLRKALAVDAAFREGNAARLFRLLQTLPYLPSCAVQCHVGHARREALARFARAFSTPKGQTLPLGFMVNLLALDGLREARDLCQAHGLPLDGEERVVFLRGRYVEEGLPPASTCKVLVESKLRGRTLEEVVMAEEEDEGTDRPGSPA

SEQ ID NO: 5217 - protein, 297 aa, Homo sapiens
MAELTALESLIEMGFPRGRAEKALALTGNQGIEAAMDWLMEHEDDPDVDEPLETPLGHILGREPTSSEQGGLEGSGSAAGEGKPALSEEERQEQTKRMLELVAQKQREREEREEREALERERQRRRQGQELSAARQRLQEDEMRRAAEERRREKAEELAARQRVREKIERDKAERAKKYGGSVGSQPPPVAPEPGPVPSSPSQEPPTKREYDQCRIQVRLPDGTSLTQTFRAREQLAAVRLYVELHRGEELGGGQDPVQLLSGFPRRAFSEADMERPLQELGLVPSAVLIVAKKCPS

SEQ ID NO: 5218 - protein, 189 aa, Homo sapiens
MRLSLPLLLLLLGAWAIPGGLGDRAPLTATAPQLDDEEMYSAHMPAHLRCDACRAVAYQMWQNLAKAETKLHTSNSGGRRELSELVYTDVLDRSCSRNWQDYGVREVDQVKRLTGPGLSEGPEPSISVMVTGGPWPTRLSRTCLHYLGEFGEDQIYEAHQQGRGALEALLCGGPQGACSEKVSATREEL

SEQ ID NO: 5219 - protein, 1042 aa, Homo sapiens
MANDSPAKSLVDIDLSSLRDPAGIFELVEVVGNGTYGQVYKGRHVKTGQLAAIKVMDVTEDEEEEIKLEINMLKKYSHHRNIATYYGAFIKKSPPGHDDQLWLVMEFCGAGSITDLVKNTKGNTLKEDWIAYISREILRGLAHLHIHHVIHRDIKGQNVLLTENAEVKLDETEYEYSGSEEEEEEVPEQEGEPSSIVNVPGESTLRRDFLRLQQENKERSEALRRQQLLQEQQLREQEEYKRQLLAERQKRIEQQKEQRRRLEEQQRREREARRQQEREQRRREQEEKRRLEELERRRKEEEERRRAEEEKRRVEREQEYIRRQLEEEQRHLEVLQQQLLQEQAMLLECRWREMEEHRQAERLQRQLQQEQAYLLSLQHDHRRPHPQHSQQPPPPQQERSKPSFHAPEPKAHYEPADRAREVPVRTTSRSPVLSRRDSPLQGSGQQNSQAGQRNSTSSIEPRLLWERVEKLVPRPGSGSSSGSSNSGSQPGSHPGSQSGSGERFRVRSSSKSEGSPSQRLENAVKKPEDKKEVFRPLKPAVRIDLTALAKELRAVEDVRPPHKVTDYSSSSEESGTTDEEDDDVEQEGADESTSGPEDTRAASSLNLSNGETESVKTMIVHDDVESEPAMTPSKEGTLIVRQTQSASSTLQKHKSSSSFTPFIDPRLLQISPSSGTTVTSVVGFSCDGMRPEAIRQDPTRKGSVVNVNPTNTRPQSDTPEIRKYKKRFNSEILCAALWGVNLLVGTESGLMLLDRSGQGKVYPLINRRRFQQMDVLEGLNVLVTISGKKDKLRVYYLSWLRNKILHNDPEVEKKQGWTTVGDLEGCVHYKVVKYERIKFLVIALKSSVEVYAWAPKPYHKFMAFKSFGELVHKPLLVDLTVEEGQRLKVIYGSCAGFHAVDVDSGSVYDIYLPTHIQCSIKPHAIIILPNTDGMELLVCYEDEGVYVNTYGRITKDVVLQWGEMPTSVAYIRSNQTMGWGEKAIEIRSVETGHLDGVFMHKRAQRLKFLCERNDKVFFASVRSGGSSQVYFMTLGRTSLLSW

SEQ ID NO: 5220 - protein, 370 aa, Homo sapiens [sequence omitted]

SEQ ID NO: 5221 - protein, 478 aa, Homo sapiens
MATDSWALAVDEQEAAVKSMTNLQIKEEKVKADTNGIIKTSTTAEKTDEEEKEDRAAQSLLNKLIRSNLVDNTNQVEVLQRDPNSPLYSVKSFEELRLKPQLLQGVYAMGFNRPSKIQENALPMMLAEPPQNLIAQSQSGTGKTAAFVLAMLSRVEPSDRYPQCLCLSPTYELALQTGKVIEQMGKFYPELKLAYAVRGNKLERGQKISEQIVIGTPGTVLDWCSKLKFIDPKKIKVFVLDEADVMIATQGHQDQSIRIQRMLPRNCQMLLFSATFEDSVWKFAQKVVPDPNVIKLKREEETLDTIKQYYVLCSSRDEKFQALCNLYGAITIAQAMIFCHTRKTASWLAAELSKEGHQVALLSGEMMVEQRAAVIERFREGKEKVLVTTNVCARGIDVEQVSVVINFDLPVDKDGNPDNETYLHRIGRTGRFGKRGLAVNMVDSKHSMNILNRIQEHFNKKIERLDTDDLDEIEKIAN

SEQ ID NO: 5222 - protein, 744 aa, Homo sapiens
MVGPGPTAAAAVEERQRKLQEYLAAKGKLKSQNTKPYLKSKNNCQNQPPSKSTIRPKNDVTNHVVLPVKPKRSISIKLQPRPPNTAGSQKPKLEPPKLLGKRLTSECVSSNPYSKPSSKSFQQCEAGSSTTGELSRKPVGSLNIEQLKTTKQQLTDQGNGKCIDFMNNIHVENESLDNFLKETNKENLLDILTEPERKPDPKLYTRSKPKTDSYNQTKNSLVPKQALGKSSVNSAVLKDRVNKQFVGETQSRTFPVKSQQLSRGADLARPGVKPSRTVPSHFIRTLSKVQSSKKPVVKNIKDIKVNRSQYERPNETKIRSYPVTEQRVKHTKAAYPSLLQGEYNNRHPNIKQDQKSSQVCIPQTSCVLQKSKAISQRPNLTVGRFNSAIPSTPSIRPNGTSGNKHNNNGFQQKAQTLDSKLKKAVPQNHFLNKTAPKTQADVTTVNGTQTNPNIKKKATAEDRRKQLEEWQKSKGKTYKRPPMELKTKRKVIKEMNISFWKSIEKEEEEKKAQLELSSKINNTLTECLNLIEGGVPSNEILNILSSIPEAEKFAKFWICKAKLLASKGTFDVIGLYEEAIKNGATPIQELRKVVLNILQDSNRTTEGITSDSLVAETSITSVEELAKKMESVKSCLSPKEREQVTATPRIAKAEQHNYPGIKLQIGPIPRINGMPEVQDMKFITPVRRSSRIERAVSRYPEMLQEHDLVVASLDELLEVEETKCFIFRRNEALPVTLGFQTPES

SEQ ID NO: 5223 - protein, 125 aa, Homo sapiens
MSSTLGKLSNQVEETLPLLKKVPANYFHICSAILMGFSLSKSATQVSAIHMDSKVDDHLIRGTEKSRLEPATQLFQNTKKIRLEDTNQENFTRIEGTGTGSLSGKALGSVVYVKESDGLEMTDVE

SEQ ID NO: 5224 - protein, 1429 aa, Homo sapiens
MSMLKPSGLKAPTKILKPGSTALKTPTAVVAPVEKTISSEKASSTPSSETQEEFVDDFRVGERVWVNGNKPGFIQFLGETQFAPGQWAGIVLDEPIGKNDGSVAGVRYFQCEPLKGIFTRPSKLTRKVQAEDEANGLQTTPASRATSPLCTSTASMVSSSPSTPSNIPQKPSQPAAKEPSATPPISNLTKTASESISNLSEAGSIKKGERELKIGDRVLVGGTKAGVVRFLGETDFAKGEWCGVELDEPLGKNDGAVAGTRYFQCQPKYGLFAPVHKVTKIGFPSTTPAKAKANAVRRVMATTSASLKRSPSASSLSSMSSVASSVSSRPSRTGLLTETSSRYARKISGTTALQEALKEKQQHIEQLLAERDLERAEVAKATSHVGEIEQELALARDGHDQHVLELEAKMDQLRTMVEAADREKVELLNQLEEEKRKVEDLQFRVEEESITKGDLETQTKLEHARIKELEQSLLFEKTKADKLQRELEDTRVATVSEKSRIMELEKDLALRVQEVAELRRRLESNKPAGDVDMSLSLLQEISSLQEKLEVTRTDHQREITSLKEHFGAREETHQKEIKALYTATEKLSKENESLKSKLEHANKENSDVIALWKSKLETAIASHQQAMEELKVSFSKGLGTETAEFAELKTQIEKMRLDYQHEIENLQNQQDSERAAHAKEMEALRAKLMKVIKEKENSLEAIRSKLDKAEDQHLVEMEDTLNKLQEAEIKVKELEVLQAKCNEQTKVIDNFTSQLKATEEKLLDLDALRKASSEGKSEMKKLRQQLEAAEKQIKHLEIEKNAESSKASSITRELQGRELKLTNLQENLSEVSQVKETLEKELQILKEKFAEASEEAVSVQRSMQETVNKLHQKEEQFNMLSSDLEKLRENLADMEAKFREKDEREEQLIKAKEKLENDIAEIMKMSGDNSSQLTKMNDELRLKERDVEELQLKLTKANENASFLQKSIEDMTVKAEQSQQEAAKKHEEEKKELERKLSDLEKKMETSHNQCQELKARYERATSETKTKHEEILQNLQKTLLDTEDKLKGAREENSGLLQELEELARGSQADKAKAAQTAEDAMQIMEQMTKEKTETLASLEDTKQTNAKLQNELDTLKENNLKNVEELNKSKELLTVENQKMEEFRKEIETLKQAAAQKSQQLSALQEENVKLAEELGRSRDEVTSHQKLEEERSVLNNQLLEMKKRESKFIKDADEEKASLQKSISITSALLTEKDAELEKLRNEVTVLRGENASAKSLHSVVQTLESDKVKLELKVKNLELQLKENKRQLSSSSGNTDTQADEDERAQESQIDFLNSVIVDLQRKNQDLKMKVEMMSEAALNGNGDDLNNYDSDDQEKQSKKKPRLFCDICDCFDLHDTEDCPTQAQMSEDPPHSTHHGSRGEERPYCEICEMFGHWATNCNDDETF

SEQ ID NO: 5225 - protein, 324 aa, Homo sapiens
MASSNTVLMRLVASAYSIAQKAGMIVRRVIAEGDLGIVEKTCATDLQTKADRLAQMSICSSLARKFPKLTIIGEEDLPSEEVDQELIEDSQWEEILKQPCPSQYSAIKEEDLVVWVDPLDGTKEYTEGLLDNVTVLIGIAYEGKAIAGVINQPYYNYEAGPDAVLGRTIWGVLGLGAFGFQLKEVPAGKHIITTTRSHSNKLVTDCVAAMNPDAVLRVGGAGNKIIQLIEGKASAYVFASPGCKKWDTCAPEVILHAVGGKLTDIHGNVLQYHKGVSHRTWPKPDFFRAQFFLESHSCFSNFKNVSTPIKNIYDVIIYAYETDL

SEQ ID NO: 5226 - protein, 89 aa, Homo sapiens
MGTKREAILKVLENLTPEELKKFKMKLGTVPLREGFERIPRGALGQLDIVDLTDKLVASYYEDYAAELVVAVLRDMRMLEEAARLQRAA

SEQ ID NO: 5227 - protein, 288 aa, Homo sapiens
MTVGKSSKMLQHIDYRMRCILQDGRIFIGTFKAFDKHMNLILCDCDEFRKIKPKNSKQAEREEKRVLGLVLLRGENLVSMTVEGPPPKDTGIARVPLAGAAGGPGIGRAAGRGIPAGVPMPQAPAGLAGPVRGVGGPSQQVMTPQGRGTVAAAAAAATASIAGAPTQYPPGRGGPPPPMGRGAPPPGMMGPPPGMRPPMGPPMGIPPGRGTPMGMPPPGMRPPPPGCEAFFDPWPQSMEVAPQRRGLDSSGPRYHRPVCFLCCCSWSLMGLSGFLTGPPPPGMRPPRP

SEQ ID NO: 5228 - protein, 1099 aa, Homo sapiens
MHIKSIILEGFKSYAQRTEVNGFDPLFNAITGLNGSGKSNILDSICFLLGISNLSQVRASNLQDLVYKNGQAGITKASVSITFDNSDKKQSPLGFEVHDEITVTRQVVIGGRNKYLINGVNANNTRVQDLFCSVGLNVNNPHFLIMQGRITKVLNMKPPEILSMIEEAAGTRMYEYKKIAAQKTIEKKEAKLKEIKTILEEEITPTIQKLKEERSSYLEYQKVMREIEHLSRLYIAYQFLLAEDTKVRSAEELKEMQDKVIKLQEELSENDKKIKALNHEIEELEKRKDKETGGILRSLEDALAEAQRVNTKSQSAFDLKKKNLACEESKRKELEKNMVEDSKTLAAKEKEVKKITDGLHALQEASNKDAEALAAAQQHFNAVSAGLSSNEDGAEATLAGQMMACKNDISKAQTEAKQAQMKLKHAQQELKNKQAEVKKMDSGYRKDQEALEAVKRLKEKLEAEMKKLNYEENKEESLLEKRRQLSRDIGRLKETYEALLARFPNLRFAYKDPEKNWNRNCVKGLVASLISVKDTSATTALELVAGERLYNVVVDTEVTGKKLLERGELKRRYTIIPLNKISARCIAPETLRVAQNLVGPDNVHVALSLVEYKPELQKAMEFVFGTTFVCDNMDNAKKVAFDKRIMTRTVTLGGDVFDPHGTLSGGARSQAASILTKFQELKDVQDELRIKENELRALEEELAGLKNTAEKYRQLKQQWEMKTEEADLLQTKLQQSSYHKQQEELDALKKTIEESEETLKNTKEIQRKAEEKYEVLENKMKNAEAERERELKDAQKKLDCAKTKADASSKKMKEKQQEVEAITLELEELKREHTSYKQQLEAVNEAIKSYESQIEVMAAEVAKNKESVNKAQEEVTKQKEVITAQDTVIKAKYAEVAKHKEQNNDSQLKIKELDHNISKHKREAEDGAAKVSKMLKDYDWINAERHLFGQPNSAYDFKTNNPKEAGQRLQKLQEMKEKLGRNVNMRAMNVLTEAEERYNDLMKKKRIVENDKSKILTTIEDLDQKKNQALNIAWQKVNKDFGSIFSTLLPGANAMLAPPEGQTVLDGLEFKVALGNTWKENLTELSGGQRQKQQNHTTG

SEQ ID NO: 5229 - protein, 126 aa, Homo sapiens
MFQKDEYCILILGLDNAGKTTFLEQSKTRFNKNYKGMSLSKITTTVGLNIGTVDVGKARLMFWDLGGQEELQSLWDKDKTKCGDLGTLHSSKVSASFRLRDLAADHHRTQKWQRPDVGTAGWLPLP

SEQ ID NO: 5230 - protein, 372 aa, Homo sapiens
MTFQFNFTIEDHLENELTPIRDGALTLDSSKELSVSESQKGEERDRKCSAEQFDLPQDHLWEHKSMENAAPSQDTDSPLSAASSSRNLEPHGKQPSLRAAKEHAMPKDLKKMLENKVIETLPGFQHVKLSVVKTILLKENFPGENIVSKSFSSHSDLITGVYEGGLKIWECTFDLLAYFTKAKVKFAGKKVLDLGCGSGLLGITAFKGGSKEIHFQDYNSMVIDEVTLPNVVANSTLEDEENDVNEPDVKRCRKPKVTQLYKCRFFSGEWSEFCKLVLSSEKLFVKYDLILTSETIYNPDYYSNLHQTFLRLLSKNGRVLLASKAHYFGVGGGVHLFQKFVEERDVFKTRILKIIDEGLKRFIIEITFKFPG

SEQ ID NO: 5231 - protein, 544 aa, Homo sapiens
MKCHYEALGVRRDASEEELKKAYRKLALKWHPDKNLDNAAEAAEQFKLIQAAYDVLSDPQERAWYDNHREALLKGGFDGEYQDDSLDLLRYFTVTCYSGYGDDEKGFYTVYRNVFEMIAKEELESVLEEEVDDFPTFGDSQSDYDTVVHPFYAYWQSFCTQKNFAWKEEYDTRQASNRWEKRAMEKENKKIRDKARKEKNELVRQLVAFIRKRDKRVQAHRKLVEEQNAEKARKAEEMRRQQKLKQAKLVEQYREQSWMTMANLEKELQEMEARYEKEFGDGSDENEMEEHELKDEEDGKDSDEAEDAELYDDLYCPACDKSFKTEKAMKNHEKSKKHREMVALLKQQLEEEEENFSRPQIDENPLDDNSEEEMEDAPKQKVKYLTFRFIFALRLSKKQKKKKQKPAQNYDDNFNVNGPGEGVKVDPEDTNLNQDSAKELEDSPQENVSVTEIIKPCDDPKSEAKSVPKPKGKKTKDMKKPVRVPAEPQTMSVLISCTTCHSEFPSRNKLFDHLKATGHARAPSSSSLNSATSSQSKKEKRKNR

SEQ ID NO: 5232 - protein, 314 aa, Homo sapiens
MPGFTCCVPGCYNNSHRDKALHFYTFPKDAELRRLWLKNVSRAGVSGCFSTFQPTTGHRLCSVHFQGGRKTYTVRVPTIFPLRGVNERKVARRPAGAAAARRRQQQQQQQQQQQQQQQQQQQQQQQQQQQQQSSPSASTAQTAQLQPNLVSASAAVLLTLQATVDSSQAPGSVQPAPITPTGEDVKPIDLTVQVEFAAAEGAAAAAAASELQAATAGLEAAECPMGPQLVVVGEEGFPDTGSDHSYSLSSGTTEEELLRKLNEQRDILALMEVKMKEMKGSIRHLRLTEAKLREELREKDRLLAMAVIRKKHGM

SEQ ID NO: 5233 - protein, 214 aa, Homo sapiens
MAGENFATPFHGHVGRGAFSDVYEPAEDTFLLLNALEAAAAELAGVEICLEVGSGSGVVSAFLASMIGPQALYMCTDINPEAAACTLETARCNKVHIQPVITDLVKGLLPRLTEKVDLLVFNPPYVVTPPQEVGSHGIEAAWAGGKNGREVMDRFFPLVPDLLSPKGLFYLVTIKENNPEEILKIMKTKGLQGTTALSRQAGQETLSVLKFTKS

SEQ ID NO: 5234 - protein, 511 aa, Homo sapiens
MSGGFELQPRDGGPRVALAPGETVIGRGPLLGITDKRVSRRHAILEVAGGQLRIKPIHTNPCFYQSSEKSQLLPLKPNLWCYLNPGDSFSLLVDKYIFRILSIPSEVEMQCTLRNSQVLDEDNILNETPKSPVINLPHETTGASQLEGSTEIAKTQMTPTNSVSFLGENRDCNKQQPILAERKRILPTWMLAEHLSDQNLSVPAISGGNVIQGSGKEEICKDKSQLNTTQQGRRQLISSGSSENTSAEQDTGEECKNTDQEESTISSKEMPQSFSAITLSNTEMNNIKTNAQRNKLPIEELGKVSKHKIATKRTPHKEDEAMSCSENCSSAQGDSLQDESQGSHSESSSNPSNPETLHAKATDSVLQGSEGNKVKRTSCMYGANCYRKNPVHFQHFSHPGDSDYGGVQIVGQDETDDRPECPYGPSCYRKNPQHKIEYRHNTLPVRNVLDEDNDNVGQPNEYDLNDSFLDDEEEDYEPTDEDSDWEPGKEDEEKEDVEELLKEAKRFMKRK

SEQ ID NO: 5235 - protein, 327 aa, Homo sapiens
MAAAAAAAAATNGTGGSSGMEVDAAVVPSVMACGVTGSVSVALHPLVILNISDHWIRMRSQEGRPVQVIGALIGKQEGRNIEVMNSFELLSHTVEEKIIIDKEYYYTKEEQFKQVFKELEFLGWYTTGGPPDPSDIHVHKQVCEIIESPLFLKLNPMTKHTDLPVSVFESVIDIINGEATMLFAELTYTLATEEAERIGVDHVARMTATGSGENSTVAEHLIAQHSAIKMLHSRVKLILEYVKASEAGEVPFNHEILREAYALCHCLPVLSTDKFKTDFYDQCNDVGLMAYLGTITKTCNTMNQFVNKFNVLYDRQGIGRRMRGLFF

SEQ ID NO: 5236 - protein, 857 aa, Homo sapiens
MNYQQQLANSAAIRAEIQRFESVHPNIYSIYELLERVEEPVLQNQIREHVIAIEDAFVNSQEWTLSRSVPELKVGIVGNLASGKSALVHRYLTGTYVQEESPEGGRFKKEIVVDGQSYLLLIRDEGGPPEAQFAMWVDAVIFVFSLEDEISFQTVYHYYSRMANYRNTSEIPLVLVGTQDAISSANPRVIDDARARKLSNDLKRCTYYETCATYGLNVERVFQDVAQKIVATRKKQQLSIGPCKSLPNSPSHSSVCSAQVSAVHISQTSNGGGSLSDYSSSVPSTPSTSQKELRIDVPPTANTPTPVRKQSKRRSNLFTSRKGSDPDKEKKGLESRADSIGSGRAIPIKQGMLLKRSGKSLNKEWKKKYVTLCDNGVLTYHPSLHDYMQNVHGKEIDLLRTTVKVPGKRPPRATSACAPISSPKTNGLSKDMSSLHISPNSGNVTSASGSQMASGISLVSFNSRPDGMHQRSYSVSSADQWSEATVIANSAISSDTGLGDSVCSSPSISSTTSPKLDPPPSPHANRKKHRRKKSTSNFKADGLSGTAEEQEENFEFIIVSLTGQTWHFEATTYEERDAWVQAIESQILASLQSCESSKNKSRLTSQSEAMALQSIRNMRGNSHCVDCETQNPNWASLNLGALMCIECSGIHRNLGTHLSRVRSLDLDDWPVELIKVMSSIGNELANSVWEESSQGRTKPSVDSTREEKERWIRAKYEQKLFLAPLPCTELSLGQHLLRATADEDLRTAILLLAHGSRDEVNETCGEGDGRTALHLACRKGNVVLAQLLIWYGVDVTARDAHGNTALAYARQASSQECIDVLLQYGCPDERFVLMATPNLSRRNNNRNNSSGRVPTII

SEQ ID NO: 5237 - protein, 550 aa, Homo sapiens
MSQTSLKQKKNEPGMRSSKESLEAEKRKESDKTGVRLSNQGSQESSLRKTDSRGYLVRSQWSRISRSPSTKAPSIDEPRSRNTSAKLPSSSTSSRTPSTSPSLHDSSPPPLSGQPSLQPPASPQLPRSLDSRPPTPPEPDPGSRRSTKMQENPEAWAQGIVREIRQTRDSQPLEYSRTSPTEWKSSSQRRGIYPASTQLDRNSLSEQQQQQREDEDDYEAAYWASMRSFYEKNPSCSRPWPPKPKNAITIALSSCALFNMVDGRKIYEQEGLEKYMEYQLTNENVILTPGPAFRFVKALQYVNARLRDLYPDEQDLFDIVLMTNNHAQVGVRLINSVNHYGLLIDRFCLTGGKDPIGYLKAYLTNLYIAADSEKVQEAIQEGIASATMFDGAKDMAYCDTQLRVAFDGDAVLFSDESEHFTKEHGLDKFFQYDTLCESKPLAQGPLKGFLEDLGRLQKKFYAKNERLLCPIRTYLVTARSAASSGARVLKTLRRWGLEIDEALFLAGAPKSPILVKIRPHIFFDDHMFHIEGAQRLGSIAAYGFNKKFSS

SEQ ID NO: 5238 - protein, 295 aa, Homo sapiens; identical to SEQ ID NO: 4796

SEQ ID NO: 5239 - protein, 182 aa, Homo sapiens
MSGRSVPHAHPATAEYEFANPSRLGEQRFGEGLLPEEILTPTLYHGYYVRPRAAPAGEGSRAGASELRLSEGKFQAFLDVSHFTPDEVTVRTVDNLLEVSARHPQRLDRHGFVSREFCRTYVLPADVDPWRVRAALSHDGILNLEAPRGGRHLDTEVNEVYISLLPAPPDPEEEEEAAIVEP

SEQ ID NO: 5240 - protein, 211 aa, Homo sapiens
MSTAAVPELKQISRVEAMRLGPGWSHSCHAMLYAANPGQLFGRIPMRFSVLMQMRFDGLLGFPGGFVDRRFWSLEDGLNRVLGLGLGCLRLTEADYLSSHLTEGPHRVVAHLYARQLTLEQLHAVEISAVHSRDHGLEVLGLVRVPLYTQKDRVGGFPNFLSNAFVSTAKCQLLFALKVLNMMPEEKLVEALAAATEKQKKALEKLLPASS

SEQ ID NO: 5241 - protein, 873 aa, Homo sapiens
MHPPPPAAAMDFSQNSLFGYMEDLQELTIIERPVRRSLKTPEEIERLTVDEDLSDIERAVYLLSAGQDVQGTSVIANLPFLMRQNPTETLRRVLPKVREALHVAGVEMQLTAAMSFLTILQDESVSIHAYTHSFLQVILLHLEHRDTGVSNAWLETLLSVIEVLPKETLRHEILNPLVSKAQLSQTVQSRLVSCKILGKLTNKFDAHTIKREILPLVKSLCQDVEYEVRSCMCRQLENIAQGIGTELTKSVVLPELIELSRDEGSSVRLAAFETLVNLLDIFDTDDRSQTILPLVKSFCEKSFKADESILISLSFHLGKLCHGLYGIFTPDQHLRFLEFYKKLCTLGLQQENGHNENQIPPQILEQEKKYISVRKNCAYNFPAMIVFVDPKNFHMELYSTFFCLCHDPEVPVRYTIAICFYEVSKLLNSGVYLIHKELITLLQDESLEVLDALIDHLPEILELMSTGGESSVQENKLSSLPDLIPALTAAEQRAAASLKWRTHEKLLQKYACLPHVISSDQIYYRFLQRMFTIMMTNNVLPVQKAASRTLCIFLRYNRKQEQRHEVIQKLIEQLGQGKSYWNRLRFLDTCEFIIEIFSKSFFCKYFFLPAIELTHDPVANVRMKLCYLLPKVKSTLKIPADKHLLQQLEMCVRKLLCQEKDKDVLAIVKRTVLELDRMEMSMDAFQKKFYEKDLLDQEKEREELLLLEMEQLEKEKQQNDGRPMSDKMFEKKRRDTKTPTQSLPKNIPISVPGPSSVTPSTSKEIKKSKLIRSQSFNNQAFHAKYGNLEKCASKSSTTGYTTSVSGLGKTSVLSLADDSFRTRNASSVPSSFSPNTPLPSTSRGTGNSVDPKSSGSKDTQPRKATLKSRKSNP

SEQ ID NO: 5242 - protein, 316 aa, Homo sapiens
MRQPLSWGRWRAMLARTYGPGPSAGYRWASGAQGYVRNPPVGACDLQGELDRFGGISVRLARLDALDRLDAAAFQKGLQAAVQQWRSEGRTAVWLHIPILQSRFIAPAASLGFCFHHAESDSSTLTLWLREGPSRLPGYASHQVGVAGAVFDESTRKILVVQDRNKLKNMWKFPGGLSEPEEDIGDTAVREVFEETGIKSEFRSVLSIRQQHTNPGAFGKSDMYIICRLKPYSFTINFCQEECLRCEWMDLNDLAKTENTTPITSRVARLLLYGYREGFDKIDLTVEELPAVYTGLFYKLYHKELPENYKTMKGID

SEQ ID NO: 5243 - protein, 178 aa, Homo sapiens
MGETWKNICSTVRHGWWLRDHRMAGLPIPPEIVKEAEVPQAALGVPAQGTGDNGHTPVEEEVGGIPVPAPGLLQVTERRQPLSSVSSLEVHFDLLDLTELTDMSDQELAEVFADSDDENLNTESPAGLHPLPRAGYLRSPSWTRTRAEQSHEKQPLGDPERQATVLDTFLTVERPQED

SEQ ID NO: 5244 - protein, 246 aa, Homo sapiens
MAEQEQRKIPLVPENLLKKRKAYQALKATQAKQALLAKKEQKKGKGLRFKRLESFLHDSWRQKRDKVRLRRLEVKPHALELPDKHSLAFVVRIERIDGVSLLVQRTIARLRLKKIFSGVFVKVTPQNLKMLRIVEPYVTWGFPNLKSVRELILKRGQAKVKNKTIPLTDNTVIEEHLGKFGVICLEDLIHEIAFPGKHFQEISWFLCPFHLSVARHATKNRVGFLKEMGTPGYRGERINQLIRQLN

SEQ ID NO: 5245 - protein, 813 aa, Homo sapiens
MAWPCITRACCIARFWNQLDKADIAVPLVFTKYSEATEHPGAPPQPPPPQQQAQPALAPPSARAVAIETQPAQGELDAVARATGPAPGPTGEREPAAGPGRSGPGPGLGSGSTSGPADSVMRQDYRAWKVQRPEPSCRPRSEYQPSDAPFERETQYQKDFRAWPLPRRGDHPWIPKPVQISAASQASAPILGAPKRRPQSQERWPVQAAAEAREQEAAPGGAGGLAAGKASGADERDTRRKAGPAWIVRRAEGLGHEQTPLPAAQAQVQATGPEAGRGRAAADALNRQIREEVASAVSSSYRNEFRAWTDIKPVKPIKAKPQYKPPDDKMVHETSYSAQFKGEASKPTTADNKVIDRRRIRSLYSEPFKEPPKVEKPSVQSSKPKKTSASHKPTRKAKDKQAVSGQAAKKKSAEGPSTTKPDDKEQSKEMNNKLAEAKESLAQPVSDSSKTQGPVATEPDKDQGSVVPGLLKGQGPMVQEPLKKQGSVVPGPPKDLGPMIPLPVKDQDHTVPEPLKNESPVISAPVKDQGPSVPVPPKNQSPMVPAKVKDQGSVVPESLKDQGPRIPEPVKNQAPMVPAPVKDEGPMVSASVKDQGPMVSAPVKDQGPIVPAPVKGEGPIVPAPVKDEGPMVSAPIKDQDPMVPEHPKDESAMATAPIKNQGSMVSEPVKNQGLVVSGPVKDQDVVVPEHAKVHDSAVVAPVKNQGPVVPESVKNQDPILPVLVKDQGPTVLQPPKNQGRIVPEPLKNQVPIVPVPLKDQDPLVPVPAKDQGPAVPEPLKTQGPRDPQLPTVSPLPRVMIPTAPHTEYIESSP

SEQ ID NO: 5246 - protein, 86 aa, Homo sapiens
MPQYQTWEEFSRAAEKLYLADPMKARVVLKYRHSDGNLCVKVTDDLVCLVYKTDQAQDVKKIEKFHSQLMRLMVAKEARNVTMETE

SEQ ID NO: 5247 - protein, 401 aa, Homo sapiens
MAHVSSETQDVSPKDELTASEASTRSPLCEHTFPGDSDLRSMIEEHAFQVLSQGSLLESPSYTVCVSEPDKDDDFLSLNFPRKLWKIVESDQFKSISWDENGTCIVINEELFKKEILETKAPYRIFQTDAIKSFVRQLNLYGFSKIQQNFQRSAFLATFLSEEKESSVLSKLKFYYNPNFKRGYPQLLVRVKRRIGVKNASPISTLFNEDFNKKHFRAGANMENHNSALAAEASEESLFSASKNLNMPLTRESSVRQIIANSSVPIRSGFPPPSPSTSVGPSEQIATDQHAILNQLTTIHMHSHSTYMQARGHIVNFITTTTSQYHIISPLQNGYFGLTVEPSAVPTRYPLVSVNEAPYRNMLPAGNPWLQMPTIADRSAAPHSRLALQPSPLDKYHPNYN

SEQ ID NO: 5248 - protein, 1432 aa, Homo sapiens
MWSLTASEGESTTAHFFLGAGDEGLGTRGIGMRPEESDSELLEDEEDEVPPEPQIIVGICAMTKKSKSKPMTQILERLCRFDYLTVVILGEDVILNEPVENWPSCHCLISFHSKGFPLDKAVAYSKLRNPFLINDLAMQYYIQDRREVYRILQEEGIDLPRYAVLNRDPARPEECNLIEGEDQVEVNGAVFPKPFVEKPVSAEDHNVYIYYPSSAGGGSQRLFRKIGSRSSVYSPESSVRKTGSYIYEEFMPTDGTDVKVYTVGPDYAHAEARKSPALDGKVERDSEGKEIRYPVMLTAMEKLVARKVCVAFKQTVCGFDLLRANGHSFVCDVNGFSFVKNSMKYYDDCAKILGNTIMRELAPQFQIPWSIPTEAEDIPIVPTTSGTMMELRCVIAIIRHGDRTPKQKMKMEVKHPRFFALFEKHGGYKTGKLKLKRPEQLQEVLDITRLLLAELEKEPGGEIEEKTGKLEQLKSVLEMYGHFSGINRKVQLTYYPHGVKASNEGQDPQRETLAPSLLLVLKWGGELTPAGRVQAEELGRAFRCMYPGGQGDYAGFPGCGLLRLHSTFRHDLKIYASDEGRVQMTAAAFAKGLLALEGELTPILVQMVKSANMNGLLDSDGDSLSSCQHRVKARLHHILQQDAPFGPEDYDQLAPTRSTSLLNSMTIIQNPVKVCDQVFALIENLTHQIRERMQDPRSVDLQLYHSETLELMLQRWSKLERDFRQKSGRYDISKIPDIYDCVKYDVQHNGSLGLQGTAELLRLSKALADVVIPQEYGISREEKLEIAVGFCLPLLRKILLDLQRTHEDESVNKLHPLCYLRYSRGVLSPGRHVRTRLYFTSESHVHSLLSVFRYGGLLDETQDAQWQRALDYLSAISELNYMTQIVIMLYEDNTQDPLSEERFHVELHFSPGVKGVEEEGSAPAGCGFRPASSENEEMKTNQGSMENLCPGKASDEPDRALQTSPQPPEGPGLPRRSPLIRNRKAGSMEVLSETSSSRPGGYRLFSSSRPPTEMKQSGLGSQCTGLFSTTVLGGSSSAPNLQDYARSHGKKLPPASLKHRDELLFVPAVKRFSVSFAKHPTNGFEGCSMVPTIYPLETLHNALSLRQVSEFLSRVCQRHTDAQAQASAALFDSMHSSQASDNPFSPAALHSPPLQLQQRSEKPPWYSSGPSSTVSSAGPSSPTTVDGNSQFGFSDQPSLNSHVAEEHQGLGLLQETPGSGAQELSIEGEQELFEPNQSPQVPPMETSQPYEEVSQPCQEVPDISQPCQDISEALSQPCQKVPDISQQCQENHDNGNHTCQEVPHISQPCQKSSQLCQKVSEEVCQLCLENSEEVSQPCQGVSVEVGKLVHKFHVGVGSLVQETLVEVGSPAEEIPEEVIQPYQEFSVEVGRLAQETSAINLLSQGIPEIDKPSQEFPEEIDLQAQEVPEEIN

SEQ ID NO: 5249 - protein, 378 aa, Homo sapiens
MDSVRSGAFGHLFRPDNFIFGQSGAGNNWAKGHYTEGAELVDSVLDVVRKECENCDCLQGFQLTHSLGGGTGSGMGTLLISKVREEYPDRIMNTFSVVPSPKVSDTVVEPYNATLSIHQLVENTDETYCIDNEALYDICFRTLKLATPTYGDLNHLVSATMSGVTTSLRFPGQLNADLRKLAVNMVPFPRLHFFMPGFAPLTARGSQQYRALTVPELTQQMFDAKNMMAACDPRHGRYLTVATVFRGRMSMKEVDEQMLAIQSKNSSYFVEWIPNNVKVAVCDIPPRGLKMSSTFIGNSTAIQELFKRISEQFTAMFRRKAFLHWYTGEGMDEMEFTEAESNMNDLVSEYQQYQDATAEEEGEMYEDDEEESEAQGPK

SEQ ID NO: 5250 - protein, 386 aa, Homo sapiens
MCERAARLCRAGAHRLLREPPQQGRALGGLLRWVGARMGEPRESLAPAAPADPGPASPRGGTAVILDIFRRADKNDDGKLSLEEFQLFFADGVLNEKELEDLFHTIDSDNTNHVDTKELCDYFVDHMGDYEDVLASLETLNHSVLKAMGYTKKVYEGGSNVDQFVTRFLLKETANQIQSLLSSVESAVEAIEEQTSQLRQNHIKPSHSAAQTWCGSPTPASAPNHKLMAMEQGKTLPSATEDAKEEGLEAQISRLAELIGRLESKALWFDLQQRLSDEDGTNMHLQLVRQEMAVCPEQLSEFLDSLRQYLRGTTGVRNCFHITAVRLSDGFTFVIYEFWETEEAWKRHLQSPLCKAFRHVKVDTLSQPEALSRILVPAAWCTVGRD

SEQ ID NO: 5251 - protein, 493 aa, Homo sapiens
MERSPDVSPGPSRSFKEELLCAVCYDPFRDAVTLRCGHNFCRGCVSRCWEVQVSPTCPVCKDRASPADLRTNHTLNNLVEKLLREEAEGARWTSYRFSRVCRLHRGQLSLFCLEDKELLCCSCQADPRHQGHRVQPVKDTAHDFRAKCRNMEHALREKAKAFWAMRRSYEAIAKHNQVEAAWLEGRIRQEFDKLREFLRVEEQAILDAMAEETRQKQLLADEKMKQLTEETEVLAHEIERLQMEMKEDDVSFLMKHKSRKRRLFCTMEPEPVQPGMLIDVCKYLGSLQYRVWKKMLASVESVPFSFDPNTAAGWLSVSDDLTSVTNHGYRVQVENPERFSSAPCLLGSRVFSQGSHAWEVALGGLQSWRVGVVRVRQDSGAEGHSHSCYHDTRSGFWYVCRTQGVEGDHCVTSDPATSPLVLAIPRRLRVELECEEGELSFYDAERHCHLYTFHARFGEVRPYFYLGGARGAGPPEPLRICPLHISVKEELDG

SEQ ID NO: 5252 - protein, 752 aa, Homo sapiens
MAPDSDPFPEGPLLKLLPLDARDRGTQRCRLGPAALHALGARLGSAVKISLPDGGSCLCTAWPRRDGADGFVQLDPLCASPGAAVGASRSRRSLSLNRLLLVPCPPLRRVAVWPVLRERAGAPGARNTAAVLEAAQELLRNRPISLGHVVVAPPGAPGLVAALHIVGGTPSPDPAGLVTAARVSLGGEPPSEAQPQPEVPLGGLSEAADSLRELLRLPLRYPRALTALGLAVPRGVLLAGPPGVGKTQLVRAVAREAGAELLAVSAPALQGSRPGETEENVRRVFQRARELASRGPSLLFLDEMDALCPQRGSRAPESRVVAQVLTLLDGASGDREVVVVGATNRPDALDPALRRPGRFDREVVIGTPTLKQRKEILQVITSKMPISSHVDLGLLAEMTVGYVGADLTALCREAAMHALLHSEKNQDNPVIDEIDFLEAFKNIQPSSFRSVIGLMDIKPVDWEEIGGLEDVKLKLKQSIEWPLKFPWEFVRMGLTQPKGVLLYGPPGCAKTTLVRALATSCHCSFVSVSGADLFSPFVGDSEKVLSQIFRQARASTPAILFLDEIDSILGARSASKTGCDVQERVLSVLLNELDGVGLKTIERRGSKSSQQEFQEVFNRSVMIIAATNRPDVLDTALLRPGRLDKIIYIPPPDHKGRLSILKVCTKTMPIGPDVSLENLAAETCFFSGADLRNLCTEAALLALQENGLDATTVKQEHFLKSLKTVKPSLSCKDLALYENLFKKEGFSNVEGI

SEQ ID NO: 5253 - protein, 341 aa, Homo sapiens
MPKRKVTFQGVGDEEDEDEIIVPKKKLVDPVAGSGGPGSRFKGKHSLDSDEEEDDDDGGSSKYDILASEDVEGQEAATLPSEGGVRITPFNLQEEMEEGHFDADGNYFLNRDAQIRDSWLDNIDWVKIRERPPGQRQASDSEEEDSLGQTSMSAQALLEGLLELLLPRETVAGALRRLGARGGGKGRKGPGQPSSPQRLDRLSGLADQMVARGNLGVYQETRERLAMRLKGLGCQTLGPHNPTPPPSLDMFAEELAEEELETPTPTQRGEAESRGDGLVDVMWEYKWENTGDAELYGPFTSAQMQTWVSEGYFPDGVYCRKLDPPGGQFYNSKRIDFDLYT

SEQ ID NO: 5254 - protein, 229 aa, Homo sapiens
MAEEMESSLEASFSSSGAVSGASGFLPPARSRIFKIIVIGDSNVGKTCLTYRFCAGRFPDRTEATIGVDFRERAVEIDGERIKIQLWDTAGQERFRKSMVQHYYRNVHAVVFVYDMTNMASFHSLPSWIEECKQHLLANDIPRILVGNKCDLRSAIQVPTDLAQKFADTHSMPLFETSAKNPNDNDHVEAIFMTLAHKLKSHKPLMLSQPPDNGIILKPEPKPAMTCWC

SEQ ID NO: 5255 - protein, 782 aa, Homo sapiens
MLLGFRRGRRSHFKHIIHGLLPAASVAPKAAVAAPPPRSPNPSPERPRSALAAAILATTLTGRTVAIPQPRQRSRSESDVSSVEQDSFIEPYATTSQLRPRPNWQSEMGRRSSLPSFETLDYGDEEDIETQLSSSGKELGDVSAREDRGGHSDDLYAVPHRNQVPLLHEVNSEDDENISHQDGFPGSPPAPQRTQQKDGKHPVLNLKDEKPPLCEKPPPSPDITGRARQRYTEITREKFEALKEENMDLNNMNQSLTLELNTMKQAMKELQLKLKGMEKEKRKLKEAEKASSQEVAAPELLYLRKQAQELVDENDGLKMTVHRLNVELSRYQTKFRHLSKEESLNIEGLPSKGPIPPWLLDIKYLSPLLLAYEDMMKEKDELNATLKEEMRMFRMRVQEVVKENEELHQELNKSSAVTSEEWRQLQTQAKLVLEENKLLLEQLEIQQRKAKDSHQERLQEVSKLTKQLMLLEAKTHGQEKELAENREQLEILRAKCQELKTHSDGKIAVEVHKSIVNELKSQLQKEEEKERAEMEELMEKLTVLQAQKKSLLLEKNSLTEQNKALEAELERAQKINRKSQKKIEVLKKQVEKAMGNEMSAHQYLANLVGLAENITQERDSLMCLAKCLESEKDGVLNKVIKSNIRLGKLEEKVKGYKKQAALKLGDISHRLLEQQEDFAGKTAQYRQEMRHLHQVLKDKQEVLDQALQQNREMEGELEVIWESTFRENRRIRELLQDTLTRTGVQDNPRALVAPSLNGVSQADLLDGCDVCSYDLKSHAPTC

SEQ ID NO: 5256 - protein, 212 aa, Homo sapiens
MAARRGALIVLEGVDRAGKSTQSRKLVEALCAAGHRAELLRFPERSTEIGKLLSSYLQKKSDVEDHSVHLLFSANRWEQVPLIKEKLSQGVTLVVDRYAFSGVAFTGAKENFSLDWCKQPDVGLPKPDLVLFLQLQLADAAKRGAFGHERYENGAFQERALRCFHQLMKDTTLNWKMVDASKSIEAVHEDIRVLSEDAIRTATEKPLGELWK

SEQ ID NO: 5257 - protein, 167 aa, Homo sapiens
MEETYTDSLDPEKLLQCPYDKNHQIRACRFPYHLIKCRKNHPDVASKLATCPFNARHQVPRAEISHHISSCDDRSCIEQDVVNQTRSLRQETLAESTWQCPPCDEDWDKDLWEQTSTPFVWGTTHYSDNNSPASNIVTEHKNNLASGMRVPKSLPYVLPWKNNGNAQ

SEQ ID NO: 5258 - protein, 126 aa, Homo sapiens
MAAGPEPPEWEPRWRKALRGKENKGSVEIMRKDLNDARDLHGQAESAAAVWKGHVMDRRKKALTDYKKLRAFFVEEEEHFLQEAEKEEGLPEDELADPTERFRSLLQAVSELEKKHRNLGLSMLLQ

SEQ ID NO: 5259 - protein, 555 aa, Homo sapiens
MQSCESSGDSADDPLSRGLRRRGQPRVVVIGAGLAGLAAAKALLEQGFTDVTVLEASSHIGGRVQSVKLGHATFELGATWIHGSHGNPIYHLAEANGLLEETTDGERSVGRISLYSKNGVACYLTNHGRRIPKDVVEEFSDLYNEVYNLTQEFFRHDKPVNAESQNSVGVFTREEVRNRIRNDPDDPEATKRLKLAMIQQYLKVESCESSSHSMDEVSLSAFGEWTEIPGAHHIIPSGFMRVVELLAEGIPAHVIQLGKPVRCIHWDQASARPRGPEIEPRGEGDHNHDTGEGGQGGEEPRGGRWDEDEQWSVVVECEDCELIPADHVIVTVSLGVLKRQYTSFFRPGLPTEKVAAIHRLGIGTTDKIFLEFEEPFWGPECNSLQFVWEDEAESHTLTYPPELWYRKICGFDVLYPPERYGHVLSGWICGEEALVMEKCDDEAVAEICTEMLRQFTGNPNIPKPRRILRSAWGSNPYFRGSYSYTQVGSSGADVEKLAKPLPYTESSKTAPMQVLFSGEATHRKYYSTTHGALLSGQREAARLIEMYRDLFQQGT

SEQ ID NO: 5260 - protein, 1050 aa, Homo sapiens
MALYDEDLLKNPFYLALQKCRPDLCSKVAQIHGIVLVPCKGSLSSSIQSTCQFESYILIPVEEHFQTLNGKDVFIQGNRIKLGAGFACLLSVPILFEETFYNEKEESFSILCIAHPLEKRESSEEPLAPSDPFSLKTIEDVREFLGRHSERFDRNIASFHRTFRECERKSLRHHIDSANALYTKCLQQLLRDSHLKMLAKQEAQMNLMKQAVEIYVHHEIYNLIFKYVGTMEASEDAAFNKITRSLQDLQQKDIGVKPEFSFNIPRAKRELAQLNKCTSPQQKLVCLRKVVQLITQSPSQRVNLETMCADDLLSVLLYLLVKTEIPNWMANLSYIKNFRFSSLAKDELGYCLTSFEAAIEYIRQGSLSAKPPESEGFGDRLFLKQRMSLLSQMTSSPTDCLFKHIASGNQKEVERLLSQEDHDKDTVQKMCHPLCFCDDCEKLVSGRLNDPSVVTPFSRDDRGHTPLHVAAVCGQASLIDLLVSKGAMVNATDYHGATPLHLACQKGYQSVTLLLLHYKASAEVQDNNGNTPLHLACTYGHEDCVKALVYYDVESCRLDIGNEKGDTPLHIAARWGYQGVIETLLQNGASTEIQNRLKETPLKCALNSKILSVMEAYHLSFERRQKSSEAPVQSPQRSVDSISQESSTSSFSSMSASSRQEETKKDYREVEKLLRAVADGDLEMVRYLLEWTEEDLEDAEDTVSAADPEFCHPLCQCPKCAPAQKRLAKVPASGLGVNVTSQDGSSPLHVAALHGRADLIPLLLKHGANAGARNADQAVPLHLACQQGHFQVVKCLLDSNAKPNKKDLSGNTPLIYACSGGHHELVALLLQHGASINASNNKGNTALHEAVIEKHVFVVELLLLHGASVQVLNKRQRTAVDCAEQNSKIMELLQVVPSCVASLDDVAETDRKEYVTVKIRKKWNSKLYDLPDEPFTRQFYFVHSAGQFKGKTSREIMARDRSVPNLTEGSLHEPGRQSVTLRQNNLPAQSGSHAAEKGNSDWPERPGLTQTGPGHRRMLRRHTVEDAVVSQGPEAAGPLSTPQEVSASRS

SEQ ID NO: 5261 - protein, 553 aa, Homo sapiens
MDVDKELGMESVKAGASGKPEMRLGTQEETSEGDANESSLLVLSSNVPLLALEFLEIAQAKEKAFLPMVSHTFHMRTEESDASQEGDDLPKSSANTSHPKQDDSPKSSEETIQPKEGDIPKAPEETIQSKKEDLPKSSEKAIQPKESNIPKSSAKPIQPKLGNIPKASVKPSQPKEGDIPKAPEETIQSKKEDLPKSSEEAIQPKEGDIPKSSAKPIQPKLGNIAKTSVKPSQPKESDIPKSPEETIQPKEGDIPKSSAKPIQPKLGNIPKASVKPSQPKEGDISKSPEEAIQPKEGDLPKSLEEAIQPKEGDIPKSPEEAIQPKEGDIPKSLEEAIQPKEGDIPKSPEETIQPKKGDIPKSPEEAIQPKEGDIPKSPKQAIQPKEGDIPKSLEEAIPPKEIDIPKSPEETIQPKEDDSPKSLEEATPSKEGDILKPEEETMEFPEGDKVKVILSKEDFEASLKEAGERLVAVDFSATWCGPCRTIRPFFHALSVKHEDVVFLEVDADNCEEVVRECAIMCVPTFQFYKKEEKVDELCGALKEKLEAVIAELK

SEQ ID NO: 5262 - protein, 755 aa, Homo sapiens
MVSHGSSPSLLEALSSDFLACKICLEQLRAPKTLPCLHTYCQDCLAQLADGGRVRCPECRETVPVPPEGVASFKTNFFVNGLLDLVKARACGDLRAGKPACALCPLVGGTSTGGPATARCLDCADDLCQACADGHRCTRQTHTHRVVDLVGYRAGWYDEEARERQAAQCPQHPGEALRFLCQPCSQLLCRECRLDPHLDHPCLPLAEAVRARRPGLEGLLAGVDNNLVELEAARRVEKEALARLREQAARVGTQVEEAAEGVLRALLAQKQEVLGQLRAHVEAAEEAARERLAELEGREQVARAAAAFARRVLSLGREAEILSLEGAIAQRLRQLQGCPWAPGPAPCLLPQLELHPGLLDKNCHLLRLSFEEQQPQKDGGKDGAGTQGGEESQSRREDEPKTERQGGVQPQAGDGAQTPKEEKAQTTREEGAQTLEEDRAQTPHEDGGPQPHRGGRPNKKKKFKGRLKSISREPSPALGPNLDGSGLLPRPIFYCSFPTRMPGDKRSPRITGLCPFGPREILVADEQNRALKRFSLNGDYKGTVPVPEGCSPCSVAALQSAVAFSASARLYLINPNGEVQWRRALSLSQASHAVAALPSGDRVAVSVAGHVEVYNMEGSLATRFIPGGKASRGLRALVFLTTSPQGHFVGSDWQQNSVVICDGLGQVVGEYKGPGLHGCQPGSVSVDKKGYIFLTLREVNKVVILDPKGSLLGDFLTAYHGLEKPRVTTMVDGRYLVVSLSNGTIHIFRVRSPDS

SEQ ID NO: 5263 - protein, 488 aa, Homo sapiens
MAAGSEATTPVIVAAGAGGEEGEHVKPFKPEKAKEIIMSLQQPAIFCNMVFDWPARHWNAKYLSQVLHGKQIRFRMGMKSMSTVPQFETTCNYVEATLEEFLTWNCDQSSISGPFRDYDHSKFWAYADYKYFVSLFEDKTDLFQDVKWSDFGFPGRNGQESTLWIGSLGAHTPCHLDSYGCNLVFQVQGRKRWHLFPPEDTPFLYPTRIPYEESSVFSKINVVNPDLKRFPQFRKAQRHAVTLSPGQVLFVPRHWWHYVESIDPVTVSINSWIELEEDHLARVEEAITRMLVCALKTAENPQNTRAWLNPTEVEETSHAVNCCYLNAAVSAFFDRCRTSEVVEIQALRTDGEHMKKEELNVCNHMEVGQTGSQNLTTGTDKPEAASPFGPDLVPVAQRSEEPPSERGGIFGSDGKDFVDKDGEHFGKLHCAKRQQIMSNSENAIEEQIASNTTTTPQTFISTDDLLDCLVNPQVTRIVAQLLIQGRSL

SEQ ID NO: 5264 - protein, 192 aa, Homo sapiens
MAPKPGAEWSTALSHLVLGVVSLHAAVSTAEASRGAAAGFLLQVLAATTTLAPGLSTHEDCLAGAWVATVIGLPLLAFDFHWVNGDRSSANLLLGGGMVLAVAGGHLGPEGRSVAGQAMLLVVAVTILIVAVFTANTYGMWGGAMLGVAGLLSRLEEDRLLLLPKEDVCRWALAVGSWAYCRALHTQRLQWE

SEQ ID NO: 5265 - protein, 153 aa, Homo sapiens
MTSESTSPPVVPPLHSPKSPVWPTFPFHREGSRVWERGGVPPRDLPSPLPTKRTRTYSATARASAGPVFKGVCKQFSRSQGHGFITPENGSEDIFVHVSDIEGEYVPVEGDEVTYKMCPIPPKNQKFQAVEVVLTQLAPHTPHETWSGQVVGS

SEQ ID NO: 5266 - protein, 178 aa, Homo sapiens
MSSFSRAPQQWATFARIWYLLDGKMQPPGKLAAMASIRLQGLHKPVYHALSDCGDHVVIMNTRHIAFSGNKWEQKVYSSHTGYPGGFRQVTAAQLHLRDPVAIVKLAIYGMLPKNLHRRTMMERLHLFPDEYIPEDILKNLVEELPQPRKIPKRLDEYTQEEIDAFPRLWTPPEDYRL

SEQ ID NO: 5267 - protein, 2919 aa, Homo sapiens
MRGRRGRPPKQPAAPAAERCAPAPPPPPPPPTSGPIGGLRSRHRGSSRGRWAAAQAEVAPKTRLSSPRGGSSSRRKPPPPPPAPPSTSAPGRGGRGGGGGRTGGGGGGGHLARTTAARRAVNKVVYDDHESEEEEEEEDMVSEEEEEEDGDAEETQDSEDDEEDEMEEDDDDSDYPEEMEDDDDDASYCTESSFRSHSTYSSTPGRRKPRVHRPRSPILEEKDIPPLEFPKSSEDLMVPNEHIMNVIAIYEVLRNFGTVLRLSPFRFEDFCAALVSQEQCTLMAEMHVVLLKAVLREEDTSNTTFGPADLKDSVNSTLYFIDGMTWPEVLRVYCESDKEYHHVLPYQEAEDYPYGPVENKIKVLQFLVDQFLTTNIAREELMSEGVIQYDDHCRVCHKLGDLLCCETCSAVYHLECVKPPLEEVPEDEWQCEVCVAHKVPGVTDCVAEIQKNKPYIRHEPIGYDRSRRKYWFLNRRLIIEEDTENENEKKIWYYSTKVQLAELIDCLDKDYWEAELCKILEEMREEIHRHMDITEDLTNKARGSNKSFLAAANEEILESIRAKKGDIDNVKSPEETEKDKNETENDSKDAEKNREEFEDQSLEKDSDDKTPDDDPEQGKSEVGDFKSEKSNGELSESPGAGKGASGSTRIITRLRNPDSKLSQLKSQQVAAAAHEANKLFKEGKEVLVVNSQGEISRLSTKKEVIMKGNINNYFKLGQEGKYRVYHNQYSTNSFALNKHQHREDHDKRRHLAHKFCLTPAGEFKWNGSVHGSKVLTISTLRLTITQLENNIPSSFLHPNWASHRANWIKAVQMCSKPREFALALAILECAVKPVVMLPIWRESLGHTRLHRMTSIEREEKEKVKKKEKKQEEEETMQQATWVKYTFPVKHQVWKQKGEEYRVTGYGGWSWISKTHVYRFVPKLPGNTNVNYRKSLEGTKNNMDENMDESDKRKCSRSPKKIKIEPDSEKDEVKGSDAAKGADQNEMDISKITEKKDQDVKELLDSDSDKPCKEEPMEVDDDMKTESHVNCQESSQVDVVNVSEGFHLRTSYKKKTKSSKLDGLLERRIKQFTLEEKQRLEKIKLEGGIKGIGKTSTNSSKNLSESPVITKAKEGCQSDSMRQEQSPNANNDQPEDLIQGCSESDSSVLRMSDPSHTTNKLYPKDRVLDDVSIRSPETKCPKQNSIENDIEEKVSDLASRGQEPSKSKTKGNDFFIDDSKLASADDIGTLICKNKKPLIQEESDTIVSSSKSALHSSVPKSTNDRDATPLSRAMDFEGKLGCDSESNSTLENSSDTVSIQDSSEEDMIVQNSNESISEQFRTREQDVEVLEPLKCELVSGESTGNCEDRLPVKGTEANGKKPSQQKKLEERPVNKCSDQIKLKNTTDKKNNENRESEKKGQRTSTFQINGKDNKPKIYLKGECLKEISESRVVSGNVEPKVNNINKIIPENDIKSLTVKESAIRPFINGDVIMEDFNERNSSETKSHLLSSSDAEGNYRDSLETLPSTKESDSTQTTTPSASCPESNSVNQVEDMEIETSEVKKVTSSPITSEEESNLSNDFIDENGLPINKNENVNGESKRKTVITEVTTMTSTVATESKTVIKVEKGDKQTVVSSTENCAKSTVTTTTTTVTKLSTPSTGGSVDIISVKEQSKTVVTTTVTDSLTTTGGTLVTSMTVSKEYSTRDKVKLMKFSRPKKTRSGTALPSYRKFVTKSSKKSIFVLPNDDLKKLARKGGIREVPYFNYNAKPALDIWPYPSPRPTFGITWRYRLQTVKSLAGVSLMLRLLWASLRWDDMAAKAPPGGGTTRTETSETEITTTEIIKRRDVGPYGIRSEYCIRKIICPIGVPETPKETPTPQRKGLRSSALRPKRPETPKQTGPVIIETWVAEEELELWEIRAFAERVEKEKAQAVEQQAKKRLEQQKPTVIATSTTSPTSSTTSTISPAQKVMVAPISGSVTTGTKMVLTTKVGSPATVTFQQNKNFHQTFATWVKQGQSNSGVVQVQQKVLGIIPSSTGTSQQTFTSFQAAATVTIRPNTSGSGGTTSNSQVITGPQIRPGMTVIRTPLQQSTLGKAIIRTPVMVQPGAPQQVMTQIIRGQPVSTAVSAPNTVSSTPGQKSLTSATSTSNIQSSASQPPRPQQGQVKLTMAQLTQLTQGHGGNQGLTVVIQGQGQTTGQLQLIPQGVTVLPGPGQQLMQAAMPNGTVQRFLFTPLATTATTASTTTTTVSTTAAGTGEQRQSKLSPQMQVHQDKTLPPAQSSSVGPAEAQPQTAQPSAQPQPQTQPQSPAQPEVQTQPEVQTQTTVSSHVPSEAQPTHAQSSKPQVAAQSQPQSNVQGQSPVRVQSPSQTRIRPSTPSQLSPGQQSQVQTTTSQPIPIQPHTSLQIPSQGQPQSQPQVQSSTQTLSSGQTLNQVTVSSPSRPQLQIQQPQPQVIAVPQLQQQVQVLSQIQSQVVAQIQAQQSGVPQQIKLQLPIQIQQSSAVQTHQIQNVVTVQAASVQEQLQRVQQLRDQQQKKKQQQIEIKREHTLQASNQSEIIQKQVVMKHNAVIEHLKQKKSMTPAEREENQRMIVCNQVMKYILDKIDKEEKQAAKKRKREESVEQKRSKQNATKLSALLFKHKEQLRAEILKKRALLDKDLQIEVQEELKRDLKIKKEKDLMQLAQATAVAAPCPPVTPAPPAPPAPPPSPPPPPAVQHTGLLSTPTLPAASQKRKREEEKDSSSKSKKKKMISTTSKETKKDTKLYCICKTPYDESKFYIGCDRCQNWYHGRCVGILQSEAELIDEYVCPQCQSTEDAMTVLTPLTEKDYEGLKRVLRSLQAHKMAWPFLEPVDPNDAPDYYGVIKEPMDLATMEERVQRRYYEKLTEFVADMTKIFDNCRYYNPSDSPFYQCAEVLESFFVQKLKGFKASRSHNNKLQSTAS

SEQ ID NO: 5268 - protein, 129 aa, Homo sapiens
MADPRVRQIKIKTGVVKRLVKEKVMYEKEAKQQEEKIEKMRAEDGENYDIKKQAEILQESRMMIPDCQRRLEAAYLDLQRILVSKDFCVMFKFFFSIQYMESQKFKYLTLRTSWQYFLFTCPLYRYILK

SEQ ID NO: 5269 - protein, 193 aa, Homo sapiens
MSDDDSRASTSSSSSSSSNQQTEKETNTPKKKESKVSMSKNSKLLSTSAKRIQKELADITLDPPPNCSAGPKGDNIYEWRSTILGPPGSVYEGGVFFLDITFTPEYPFKPPKVTFRTRIYHCNINSQGVICLDILKDNWSPALTISKVLLSICSLLTDCNPADPLVGSIATQYMTNRAEHDRMARQWTKRYAT

SEQ ID NO: 5270 - protein, 464 aa, Homo sapiens
MSLQFSNGSRHVCLRSGAGSVRPLNGGAGFAGSSACGGSVAGSEFSCALGGGLGSVPGGSHAGGALGNAACIGFAGSEGGLLSGNEKVTMQNLNDRLASYLDNVRALEEANAELERKIKGWYEKYGPGSCRGLDHDYSRYHLTIEDLKNKIISSTTTNANVILQIDNARLAADDFRLKYENELTLHQNVEADINGLRRVLDELTLCRTDQELQYESLSEEMTYLKKNHEEEMKALQCAAGGNVNVEMNAAPGVDLAVLLNNMRAEYEALAEQNRKDAEAWFNEKSASLQQQISHDSGAATFARSQLTEMRRTLQTLEIQLQSLMATKHSLECSLTETESNYCTQLAQIQAQIGALEEQLHQVRTETEGQKLEYEHLLDVKVHLEKEIETYCRLIDGDGNSCSKSKGFGSGSPGNSSKDLSKTTLVKTVVEELDQRGKVLSSRIHSIEEKTSKMTNGKTEQRVPF

SEQ ID NO: 5271 - protein, 670 aa, Homo sapiens
MEEFRRSYSRLCRESGAEPQEAVLQQLHQLPRGRLDLATQSLTVETCRALGKLLPRETLCTELVLSDCMLSEEGATLLLRGLCANTVLRFLDLKGNNLRAAGAEALGKLLQQNKSIQSLTLEWNSLGTWDDAFATFCGGLAANGALQRLDLRNNQISHKGAEELALALKGNTTLQQLDLRWNNVGLLGGRALMNCLPSNRTLWRLDLAGNNIPGDVLRAVEQAMGHSQDRLTTFQENQARTHVLSKEVQHLREEKSKQFLDLMETIDKQREEMAKSSRASAARVGQLQEALNERHSIINALKAKLQMTEAALALSEQKAQDLGELLATAEQEQLSLSQRQAKELKLEQQEAAERESKLLRDLSAANEKNLLLQNQVDELERKFRCQQEQLFQTRQEMTSMSAELKMRAIQAEERLDMEKRRCRQSLEDSESLRIKEVEHMTRHLEESEKAMQERVQRLEAARLSLEEELSRVKAAALSERGQAEEELIKAKSQARLEEQQRLAHLEDKLRLLAQARDEAQGACLQQKQVVAEAQTRVSQLGLQVEGLRRRLEELQQELSLKDQERVAEVSRVRVELQEQNGRLQAELAAQEALREKAAALERQLKVMASDHREALLDRESENASLREKLRLREAEIARIRDEEAQRASFLQNAVLAYVQASPVRTLSPPK

SEQ ID NO: 5272 - protein, 593 aa, Homo sapiens
MEPATAPRPDMAPELTPEEEQATKQFLEEINKWTVQYNVSPLSWNVAVKFLMARKFDVLRAIELFHSYRETRRKEGIVKLKPHEEPLRSEILSGKFTILNVRDPTGASIALFTARLHHPHKSVQHVVLQALFYLLDRAVDSFETQRNGLVFIYDMCGSNYANFELDLGKKVLNLLKGAFPARLKKVLIVGAPIWFRVPYSIISLLLKDKVRERIQILKTSEVTQHLPRECLPENLGGYVKIDLATWNFQFLPQVNGHPDPFDEIILFSLPPALDWDSVHVPGPHAMTIQELVDYVNARQKQGIYEEYEDIRRENPVGTFHCSMSPGNLEKNRYGDVPCLDQTRVKLTKRSGHTQTDYINASFMDGYKQKNAYIGTQGPLENTYRDFWLMVWEQKVLVIVMTTRFEEGGRRKCGQYWPLEKDSRIRFGFLTVTNLGVENMNHYKKTTLEIHNTEERQKRQVTHFQFLSWPDYGVPSSAASLIDFLRVVRNQQSLAVSNMGARSKGQCPEPPIVVHCSAGIGRTGTFCSLDICLAQLEELGTLNVFQTVSRMRTQRAFSIQTPEQYYFCYKAILEFAEKEGMVSSGQNLLAVESQ

SEQ ID NO: 5273 - protein, 625 aa, Homo sapiens
MEGLAGYVYKAASEGKVLTLAALLLNRSESDIRYLLGYVSQQGGQRSTPLIIAARNGHAKVVRLLLEHYRVQTQQTGTVRFDGYVIDGATALWCAAGAGHFEVVKLLVSHGANVNHTTVTNSTPLRAACFDGRLDIVKYLVENNANISIANKYDNTCLMIAAYKGHTDVVRYLLEQRADPNAKAHCGATALHFAAEAGHIDIVKELIKWRAAIVVNGHGMTPLKVAAESCKADVVELLLSHADCDRRSRIEALELLGASFANDRENYDIIKTYHYLYLAMLERFQDGDNILEKEVLPPIHAYGNRTECRNPQELESIRQDRDALHMEGLIVRERILGADNIDVSHPIIYRGAVYADNMEFEQCIKLWLHALHLRQKGNRNTHKDLLRFAQVFSQMIHLNETVKAPDIECVLRCSVLEIEQSMNRVKNISDADVHNAMDNYECNLYTFLYLVCISTKTQCSEEDQCKINKQIYNLIHLDAAREGFTLLHLAVNSNTPVDDFHTNDVCSFPNALVTKLLLDCGAEVNAVDNEGNSALHIIVQYNRPISDFLTLHSIIISLVEAGAHTDMTNKQNKTPLDKSTTGVSEILLKTQMKMSLKCLAARAVRANDINYQDQIAALEEFVGFH

SEQ ID NO: 5274 - protein, 125 aa, Homo sapiens
MPSEKTFKQRRTFEQRVEDVRLIREQHPTKIPVIIERYKGEKQLPVLDKTKFLVPDHVNMSELIKIIRRRLQLNANQAFFLLVNGHSMVSVSTPISEVYESEKDEDGFLYMVCASQETFGMKLSV

SEQ ID NO: 5275 - protein, 1261 aa, Homo sapiens
MGTGDFICISMTGGAPWGFRLQGGKEQKQPLQVAKIRNQSKASGSGLCEGDEVVSINGNPCADLTYPEVIKLMESITDSLQMLIKRPSSGISEALISENENKNLEHLTHGGYVESTTLQIRPATKTQCTEFFLAPVKTEVPLAENQRSGPDCAGSLKEETGPSYQRAPQMPDSQRGRVAEELILREKVEAVQPGPVVELQLSLSQERHKGASGPLVALPGAEKSKSPDPDPNLSHDRIVHINSIPTNEKADPFLRSSKIIQISSGRELRVIQESEAGDAGLPRVEVILDCSDRQKTEGCRLQAGKECVDSPVEGGQSEAPPSLVSFAVSSEGTEQGEDPRSEKDHSRPHKHRARHARLRRSESLSEKQVKEAKSKCKSIALLLTDAPNPNSKGVLMFKKRRRRARKYTLVSYGTGELEREADEEEEGDKEDTCEVAFLGASESEVDEELLSDVDDNTQVVNFDWDSGLVDIEKKLNRGDKMEMLPDTTGKGALMFAKRRERMDQITAQKEEDKVGGTPSREQDAAQTDGLRTTTSYQRKEEESVRTQSSVSKSYIEVSHGLGHVPQQNGFSGTSETANIQRMVPMNRTAKPFPGSVNQPATPFSPTRNMTSPIADFPAPPPYSAVTPPPDAFSRGVSSPIAGPAQPPPWPQPAPWSQPAFYDSSERIASRDERISVPAKRTGILQEAKRRSTTKPMFTFKEPKVSPNPELLSLLQNSEGKRGTGAGGDSGPEEDYLSLGAEACNFMQSSSAKQKTPPPVAPKPAVKSSSSQPVTPVSPVWSPGVAPTQPPAFPTSNPSKGTVVSSIKIAQPSYPPARPASTLNVAGPFKGPQAAVASQNYTPKPTVSTPTVNAVQPGAVGPSNELPGMSGRGAQLFAKRQSRMEKYVVDSDTVQAHAARAQSPTPSLPASWKYSSNVRAPPPVAYNPIHSPSYPLAALKSQPSAAQPSKMGKKKGKKPLNALDVMKHQPYQLNASLFTFQPPDAKDGLPQKSSVKVNSALAMKQALPPRPVNAASPTNVQASSVYSVPAYTSPPSFFAEASSPVSASPVPVGIPTSPKQESASSSYFVAPRPKFSAKKSGVTIQESGRSLSLPGRSVPPPISTSPWVYQPTYSYSSKPTDGLEKANKRPTPWEAAAKSPLGLVDDAFQPRNIQESIVANVVSAARRKVLPGPPEDWNERLSYIPQTQKAYMGSCGRQEYNVTANNNMSTTSQYGSQLPYAYYRQASRNDSAIMSMETRSDYCLPVADYNYNPHPRGWRRQT

SEQ ID NO: 5276 - protein, 381 aa, Homo sapiens
MSWTVPVVRASQRVSSVGANFLCLGMALCPRQATRIPLNGTWLFTPVSKMATVKSELIERFTSEKPVHHSKVSIIGTGSVGMACAISILLKGLSDELALVDLDEDKLKGETMDLQHGSPFTKMPNIVCSKDYFVTANSNLVIITAGARQEKGETRLNLVQRNVAIFKLMISSIVQYSPHCKLIIVSNPVDILTYVAWKLSAFPKNRIIGSGCNLDTARFRFLIGQKLGIHSESCHGWILGEHGDSSVPVWSGVNIAGVPLKDLNSDIGTDKDPEQWKNVHKEVTATAYEIIKMKGYTSWAIGLSVADLTESILKNLRRIHPVSTIIKGLYGIDEEVFLSIPCILGENGITNLIKIKLTPEEEAHLKKSAKTLWEIQNKLKL

SEQ ID NO: 5277 - protein, 285 aa, Homo sapiens
MMATPNQTACNAESPVALEEAKTSGAPGSPQTPPERHDSGGSLPLTPRMESHSEDEDLAGAVGGLGWNSRSAAQSPGGCSAEAVLARKKHRRRPSKRKRHWRPYLELSWAEKQQRDERQSQRASRVREEMFAKGQPVAPYNTTQFLMNDRDPEEPNLDVPHGISHPGSSGESEAGDSDGRGRAHGEFQRKDFSETYERFHTESLQGRSKQELVRDYLELEKRLSQAEEETRRLQQLQACTGQQSCRQVEELAAEVQRLRTENQRLRQENQMWNREGCRCDEEPGT

SEQ ID NO: 5278 - protein, 401 aa, Homo sapiens; identical to SEQ ID NO: 5247

SEQ ID NO: 5279 - protein, 575 aa, Homo sapiens
MAMAPSPSLVQVYTSPAAVAVWEWQDGLGTWHPYSATVCSFIEQQFVQQKGQRFGLGSLAHSIPLGQADPSLAPYIIDLPSWTQFRQDTGTMRAVRRHLFPQHSAPGRGVVWEWLSDDGSWTAYEASVCDYLEQQVARGNQLVDLAPLGYNYTVNYTTHTQTNKTSSFCRSVRRQAGPPYPVTTIIAPPGHTGVACSCHQCLSGSRTGPVSGRYRHSMTNLPAYPVPQHPPHRTASVFGTHQAFAPYNKPSLSGARSAPRLNTTNAWGAAPPSLGSQPLYRSSLSHLGPQHLPPGSSTSGAVSASLPSGPSSSPGSVPATVPMQMPKPSRVQQALAGATPKPEPEPEQVIKNYTEELKVPPDEDCIICMEKLSTASGYSDVTDSKAIGSLAVGHLTKCSHAFHLLCLLAMYCNGNKDGSLQCPSCKTIYGEKTGTQPQGKMEVLRFQMSLPGHEDCGTILIVYSIPHGIQGPEHPNPGKPFTARGFPRQCYLPDNAQGRKVLELLKVAWKRRLIFTVGTSSTTGETDTVVWNEIHHKTEMDRNITGHGYPDPNYLQNVLAELAAQGVTEDCLEQQ

SEQ ID NO: 5280 - protein, 364 aa, Homo sapiens
MEHNGSASNADKIHQNRLSSVTEDEDQDAALTIVTVLDKVASIVDSVQASQKRIEERHREMENAIKSVQIDLLKLSQSHSNTGHIINKLFEKTRKVSAHIKDVKARVEKQQIHVKKVEVKQEEIMKKNKFRVVIFQEKFRCPTSLSVVKDRNLTENQEEDDDDIFDPPVDLSSDEEYYVEESRSARLRKSGKEHIDNIKKAFSKENMQKTRQNLDKKVNRIRTRIVTPERRERLRQSGERLRQSGERLRQSGERFKKSISNAAPSKEAFKMRSLRKGKDRTVAEGEECAREMGVDIIARSESLGPISELYSDELSEPEHEAARPVYPPHEGREIPTPEPLKVTFKSQVKVEDDESLLLDLKHSS

SEQ ID NO: 5281 - protein, 421 aa, Homo sapiens
MPTLSVFMDVPLAHKLEGSLLKTYKQDDYPNKIFLAYRVCMTNEGHPWVSLVVQKTRLQISQDPSLNYEYLPTMGLKSFIQASLALLFGKHSQAIVENRVGGVHTVGDSGAFQLGVQFLRAWHKDARIVYIISSQKELHGLVFQDMGFTVYEYSVWDPKKLCMDPDILLNVVEQIPHGCVLVMGNIIDCKLTPSGWAKLMSMIKSKQIFPFFDIPCQGLYTSDLEEDTRILQYFVSQGFEFFCSQSLSKNFGIYDEGVGMLVVVAVNNQQLLCVLSQLEGLAQALWLNPPNTGARVITSILCNPALLGEWKQSLKEVVENIMLTKEKVKEKLQLLGTPGSWGHITEQSGTHGYLGLNSQQVEYLVRKKHIYIPKNGQINFSCINANNINYITEGINEAVLLTESSEMCLPKEKKTLIGIKL

SEQ ID NO: 5282 - protein, 191 aa, Homo sapiens
MGKSCKVVVCGQASVGKTSILEQLLYGNHVVGSEMIETQEDIYVGSIETDRGVREQVRFYDTRGLRDGAELPRHCFSCTDGYVLVYSTDSRESFQRVELLKKEIDKSKDKKEVTIVVLGNKCDLQEQRRVDPDVAQHWAKSEKVKLWEVSVADRRSLLEPFVYLASKMTQPQSKSAFPLSRKNKGSGSLDG

SEQ ID NO: 5283 - protein, 1068 aa, Homo sapiens
MVSSDRPVSLEDEVSHSMKEMIGGCCVCSDERGWAENPLVYCDGHGCSVAVHQACYGIVQVPTGPWFCRKCESQERAARVRCELCPHKDGALKRTDNGGWAHVVCALYIPEVQFANVSTMEPIVLQSVPHDRYNKTCYICDEQGRESKAATGACMTCNKHGCRQAFHVTCAQFAGLLCEEEGNGADNVQYCGYCKYHFSKLKKSKRGSNRSYDQSLSDSSSHSQDKHHEKEKKKYKEKDKHKQKHKKQPEPSPALVPSLTVTTEKTYTSTSNNSISGSLKRLEDTTARFTNANFQEVSAHTSSGKDVSETRGSEGKGKKSSAHSSGQRGRKPGGGRNPGTTVSAASPFPQGSFSGTPGSVKSSSGSSVQSPQDFLSFTDSDLRNDSYSHSQQSSATKDVHKGESGSQEGGVNSFSTLIGLPSTSAVTSQPKSFENSPGDLGNSSLPTAGYKRAQTSGIEEETVKEKKRKGNKQSKHGPGRPKGNKNQENVSHLSVSSASPTSSVASAAGSITSSSLQKSPTLLRNGSLQSLSVGSSPVGSEISMQYRHDGACPTTTFSELLNAIHNGIYNSNDVAVSFPNVVSGSGSSTPVSSSHLPQQSSGHLQQVGALSPSAVSSAAPAVATTQANTLSGSSLSQAPSHMYGNRSNSSMAALIAQSENNQTDQDLGDNSRNLVGRGSSPRGSLSPRSPVSSLQIRYDQPGNSSLENLPPVAASIEQLLERQWSEGQQFLLEQGTPSDILGMLKSLHQLQVENRRLEEQIKNLTAKKERLQLLNAQLSVPFPTITANPSPSHQIHTFSAQTAPTTDSLNSSKSPHIGNSFLPDNSLPVLNQDLTSSGQSTSSSSALSTPPPAGQSPAQQGSGVSGVQQVNGVTVGALASGMQPVTSTIPAVSAVGGIIGALPGNQLAINGIVGALNGVMQTPVTMSQNPTPLTHTTVPPNATHPMPATLTNSASGLGLLSDQQRQILIHQQQFQQLLNSQQLTPEQHQAFLYQLMQHHHQQHHQPELQQLQIPGPTQIPINNLLAGTQAPPLHTATTNPFLTIHGDNASQKVARLSDKTGPVAQEKS

SEQ ID NO: 5284 - protein, 450 aa, Homo sapiens
MSCLMVERCGEILFENPDQNAKCVCMLGDIRLRGQTGVRAERRGSYPFIDFRLLNSTTYSGEIGTKKKVKRLLSFQRYFHASRLLRGIIPQAPLHLLDEDYLGQARHMLSKVGMWDFDIFLFDRLTNGNSLVTLLCHLFNTHGLIHHFKLDMVTLHRFLVMVQEDYHSQNPYHNAVHAADVTQAMHCYLKEPKLASFLTPLDIMLGLLAAAAHDVDHPGVNQPFLIKTNHHLANLYQNMSVLENHHWRSTIGMLRESRLLAHLPKEMTQDIEQQLGSLILATDINRQNEFLTRLKAHLHNKDLRLEDAQDRHFMLQIALKCADICNPCRIWEMSKQWSERVCEEFYRQGELEQKFELEISPLCNQQKDSIPSIQIGFMSYIVEPLFREWAHFTGNSTLSENMLGHLAHNKAQWKSLLPRQHRSRGSSGSGPDHDHAGQGTESEEQEGDSP

SEQ ID NO: 5285 - protein, 755 aa, Homo sapiens
MAGCIPEEKTYRRFLELFLGEFRGPCGGGEPEPEPEPEPEPEPESEPEPEPELVEAEAAEASVEEPGEEAATVAATEEGDQEQDPEPEEEAAVEGEEEEEGAATAAAAPGHSAVPPPPPQLPPLPPLPRPLSERITREEVEGESLDLCLQQLYKYNCPSFLAAALARATSDEVLQSDLSAHYIPKETDGTEGTVEIETVKLARSVFSKLHEICCSWVKDFPLRRRPQLYYETSIHAIKNMRRKMEDKHVCIPDFNMLFNLEDQEEQAYFAVFDGHGGVDAAIYASIHLHVNLVRQEMFPHDPAEALCRAFRVTDERFVQKAARESLRCGTTGVVTFIRGNMLHVAWVGDSQVMLVRKGQAVELMKPHKPDREDEKQRIEALGGCVVWFGAWRVNGSLSVSRAIGDAEHKPYICGDADSASTVLDGTEDYLILACDGFYDTVNPDEAVKVVSDHLKENNGDSSMVAHKLVASARDAGSSDNITVIVVFLRDMNKAVNVSEESDWTENSFQGGQEDGGDDKENHGECKRPWPQHQCSAPADLGYDGRVDSFTDRTSLSPGSQINVLEDPGYLDLTQIEASKPHSAQFLLPVEMFGPGAPKKANLINELMMEKKSVQSSLPEWSGAGEFPTAFNLGSTGEQIYRMQSLSPVCSGLENEQFKSPGNRVSRLSHLRHHYSKKWHRFRFNPKFYSFLSAQEPSHKIGTSLSSLTGSGKRNRIRSSLPWRQNSWKGYSENMRKLRKTHDIPCPDLPWSYKIE

SEQ ID NO: 5286 - protein, 256 aa, Homo sapiens
MASRYDRAITVFSPDGHLFQVEYAQEAVKKGSTAVGIRGTNIVVLGVEKKSVAKLQDERTVRKICALDDHVCMAFAVLTIFIGLTADARVVINRARVECQSHKLTVEDPVTVEYITRFIATLKQKYTQSNGRRPFGISALIVGFDDDGISRLYQTDPSGTYHAWKANAIGRSAKTVREFLEKNYTEDAIASDSEAIKLAIKALLEVVQSGGKNIELAIIRRNQPLKMFSAKEVELYVTEIEKEKEEAEKKKSKKSV

SEQ ID NO: 5287 - protein, 1035 aa, Homo sapiens
MAPRLQLEKAAWRWAETVRPEEVSQEHIETAYRIWLEPCIRGVCRRNCKGNPNCLVGIGEHIWLGEIDENSFHNIDDPNCERRKKNSFVGLTNLGATCYVNTFLQVWFLNLELRQALYLCPSTCSDYMLGDGIQEEKDYEPQTICEHLQYLFALLQNSNRRYIDPSGFVKALGLDTGQQQDAQEFSKLFMSLLEDTLSKQKNPDVRNIVQQQFCGEYAYVTVCNQCGRESKLLSKFYELELNIQGHKQLTDCISEFLKEEKLEGDNRYFCENCQSKQNATRKIRLLSLPCTLNLQLMRFVFDRQTGHKKKLNTYIGFSEILDMEPYVEHKGGSYVYELSAVLIHRGVSAYSGHYIAHVKDPQSGEWYKFNDEDIEKMEGKKLQLGIEEDLAEPSKSQTRKPKCGKGTHCSRNAYMLVYRLQTQEKPNTTVQVPAFLQELVDRDNSKFEEWCIEMAEMRKQSVDKGKAKHEEVKELYQRLPAGAEPYEFVSLEWLQKWLDESTPTKPIDNHACLCSHDKLHPDKISIMKRISEYAADIFYSRYGGGPRLTVKALCKECVVERCRILRLKNQLNEDYKTVNNLLKAAVKGSDGFWVGKSSLRSWRQLALEQLDEQDGDAEQSNGKMNGSTLNKDESKEERKEEEELNFNEDILCPHGELCISENERRLVSKEAWSKLQQYFPKAPEFPSYKECCSQCKILEREGEENEALHKMIANEQKTSLPNLFQDKNRPCLSNWPEDTDVLYIVSQFFVEEWRKFVRKPTRCSPVSSVGNSALLCPHGGLMFTFASMTKEDSKLIALIWPSEWQMIQKLFVVDHVIKITRIEVGDVNPSETQYISEPKLCPECREGLLCQQQRDLREYTQATIYVHKVVDNKKVMKDSAPELNVSSSETEEDKEEAKPDGEKDPDFNQSNGGTKRQKISHQNYIAYQKQVIRRSMRHRKVRGEKALLVSANQTLKELKIQIMHAFSVAPFDQNLSIDGKILSDDCATLGTLGVIPESVILLKADEPIADYAAMDDVMQVCMPEEGFKGTGLLGH

SEQ ID NO: 5288 - protein, 793 aa, Homo sapiens
MLIQSEKKTQLSKTESVKESESLMEFAQPEIQPQEFLNRRYMTEVDYSNKQGEEQPWEADYARKPNLPKRWDMLTEPDGQEKKQESFKSWEASGKHQEVSKPAVSLEQRKQDTSKLRSTLPEEQKKQEISKSKPSPSQWKQDTPKSKAGYVQEEQKKQETPKLWPVQLQKEQDPKKQTPKSWTPSMQSEQNTTKSWTTPMCEEQDSKQPETPKSWENNVESQKHSLTSQSQISPKSWGVATASLIPNDQLLPRKLNTEPKDVPKPVHQPVGSSSTLPKDPVLRKEKLQDLMTQIQGTCNFMQESVLDFDKPSSAIPTSQPPSATPGSPVASKEQNLSSQSDFLQEPLQATSSPVTCSSNACLVTTDQASSGSETEFMTSETPEAAIPPGKQPSSLASPNPPMAKGSEQGFQSPPASSSSVTINTAPFQAMQTVFNVNAPLPPRKEQEIKESPYSPGYNQSFTTASTQTPPQCQLPSIHVEQTVHSQETANYHPDGTIQVSNGSLAFYPAQTNVFPRPTQPFVNSRGSVRGCTRGGRLITNSYRSPGGYKGFDTYRGLPSISNGNYSQLQFQAREYSGAPYSQRDNFQQCYKRGGTSGGPRANSRAGWSDSSQVSSPERDNETFNSGDSGQGDSRSMTPVDVPVTNPAATILPVHVYPLPQQMRVAFSAARTSNLAPGTLDQPIVFDLLLNNLGETFDLQLGRFNCPVNGTYVFIFHMLKLAVNVPLYVNLMKNEEVLVSAYANDGAPDHETASNHAILQLFQGDQIWLRLHRGAIYGSSWKYSTFSGYLLYQD

SEQ ID NO: 5289 - protein, 360 aa, Homo sapiens
MEELSQALASSFSVSQDLNSTAAPHPRLSQYKSKYSSLEQSERRRRLLELQKSKRLDYVNHARRLAEDDWTGMESEEENKKDDEEMDIDTVKKLPKHYANQLMLSEWLIDVPSDLGQEWIVVVCPVGKRALIVASRGSTSAYTKSGYCVNRFSSLLPGGNRRNSTAKDYTILDCIYNEVNQTYYVLDVMCWRGHPFYDCQTDFRFYWMHSKLPEEEGLGEKTKLNPFKFVGLKNFPCTPESLCDVLSMDFPFEVDGLLFYHKQTHYSPGSTPLVGWLRPYMVSDVLGVAVPAGPLTTKPDYAGHQLQQIMEHKKSQKEGMKEKLTHKASENGHYELEHLSTPKLKGSSHSPDHPGCLMEN

SEQ ID NO: 5290 - protein, 174 aa, Homo sapiens
LIHKPLKRAITTLMAGILRLVVQWPPGRLQTVTKGVESLICTDWIRHKFTRSRIPEKVFQASPEDHEKYGGDPQNPHKLHIVTRIKSTRRRPYWEKDIIKMLGLEKAHTPQVHKNIPSVNAKLKVVKHLIRIKPLKLPQGLPAEENMSNTCLKSTGELVVQWHLKPVEQKAHES

SEQ ID NO: 5291 - protein, 477 aa, Homo sapiens
MATYTCITCRVAFRDADMQRAHYKTDWHRYNLRRKVASMAPVTAEGFQERVRAQRAVAEEESKGSATYCTVCSKKFASFNAYENHLKSRRHVELEKKAVQAVNRKVEMMNEKNLEKGLGVDSVDKDAMNAAIQQAIKAQPSMSPKKAPPAPAKEARNVVAVGTGGRGTHDRDPSEKPPRLQWFEQQAKKLAKQQEEDSEEEEEDLDGDDWEDIDSDEELECEDTEAMDDVVEQDAEEEEAEEGPPLGAIPITDCLFCSHHSSSLMKNVAHMTKDHSFFIPDIEYLSDIKGLIKYLGEKVGVGKICLWCNEKGKSFYSTEAVQAHMNDKSHCKLFTDGDAALEFADFYDFRSSYPDHKEGEDPNKAEELPSEKNLEYDDETMELILPSGARVGHRSLMRYYKQRFGLSRAVAVAKNRKAVGRVLQQYRALGWTGSTGAALMRERDMQYVQRMKSKWMLKTGMKNNATKQMHFRVQVRF

SEQ ID NO: 5292 - protein, 953 aa, Homo sapiens
MITSAAGIISLLDEDEPQLKEFALHKLNAVVNDFWAEISESVDKIEVLYEDEGFRSRQFAALVASKVFYHLGAFEESLNYALGAGDLFNVNDNSEYVETIIAKCIDHYTKQCVENADLPEGEKKPIDQRLEGIVNKMFQRCLDDHKYKQAIGIALETRRLDVFEKTILESNDVPGMLAYSLKLCMSLMQNKQFRNKVLRVLVKIYMNLEKPDFINVCQCLIFLDDPQAVSDILEKLVKEDNLLMAYQICFDLYESASQQFLSSVIQNLRTVGTPIASVPGSTNTGTVPGSEKDSDSMETEEKTSSAFVGKTPEASPEPKDQTLKMIKILSGEMAIELHLQFLIRNNNTDLMILKNTKDAVRNSVCHTATVIANSFMHCGTTSDQFLRDNLEWLARATNWAKFTATASLGVIHKGHEKEALQLMATYLPKDTSPGSAYQEGGGLYALGLIHANHGGDIIDYLLNQLKNASNDIVRHGGSLGLGLAAMGTARQDVYDLLKTNLYQDDAVTGEAAGLALGLVMLGSKNAQAIEDMVGYAQETQHEKILRGLAVGIALVMYGRMEEADALIESLCRDKDPILRRSGMYTVAMAYCGSGNNKAIRRLLHVAVSDVNDDVRRAAVESLGFILFRTPEQCPSVVSLLSESYNPHVRYGAAMALGICCAGTGNKEAINLLEPMTNDPVNYVRQGALIASALIMIQQTEITCPKVNQFRQLYSKVINDKHDDVMAKFGAILAQGILDAGGHNVTISLQSRTGHTHMPSVVGVLVFTQFWFWFPLSHFLSLAYTPTCVIGLNKDLKMPKVQYKSNCKPSTFAYPAPLEVPKEKEKEKVSTAVLSITAKAKKKEKEKEKKEEEKMEVDEAEKKEEKEKKKEPEPNFQLLDNPARVMPAQLKVLTMPETCRYQPFKPLSIGGIIILKDTSEDIEELVEPVAAHGPKIEEEEQEPEPPEPFEYIDD

SEQ ID NO: 5293 - protein, 327 aa, Homo sapiens
MCSTSGCDLEEIPLDDDDLNTIEFKILAYYTRHHVFKSTPALFSPKLLRTRSLSQRGLGNCSANESWTEVSWPCRNSQSSEKAINLGKKKSSWKAFFGVVEKEDSQSTPAKVSAQGQRTLEYQDSHSQQWSRCLSNVEQCLEHEAVDPKVISIANRVAEIVYSWPPPQATQAGGFKSKEIFVTEGLSFQLQGHVPVASSSKKDEEEQILAKIVELLKYSGDQLERKLKKDKALMGHFQDGLSYSVFKTITDQVLMGVDPRGESEVKAQGFKAALVIDVTAKLTAIDNHPMNRVLGFGTKYLKENFSPWIQQHGGWEKILGISHEEVD

SEQ ID NO: 5294 - protein, 361 aa, Homo sapiens
MGGAVSAGEDNDELIDNLKEAQYIRTELVEQAFRAIDRADYYLEEFKENAYKDLAWKHGNIHLSAPCIYSEVMEALDLQPGLSFLNLGSGTGYLSSMVGLILGPFGVNHGVELHSDVIEYAKQKLDFFIRTSDSFDKFDFCEPSFVTGNCLEISPDCSQYDRVYCGAGVQKEHEEYMKNLLKVGGILVMPLEEKLTKITRTGPSAWETKKILAVSFAPLIQPCHSESGKSRLVQLPPVAVRSLQDLARIAIRGTIKKIIHQETVSKNGNGLKNTPRFKRRRVRRRRMETIVFLDKEVFASRISNPSDDNSCEDLEEERREEEEKTPPETKPDPPVNFLRQKVLSLPLPDPLKYYLLYYREK

SEQ ID NO: 5295 - protein, 259 aa, Homo sapiens
MKDVDNLKSIKEEWVCETGSDNQPLGNNQQSNCEYFVDSLFEEAQKVSSKCVSPAEQKKQVDVNIKLWKNGFTVNDDFRSYSDGASQQFLNSIKKGELPSELQGIFDKEEVDVKVEDKKNEICLSTKPVFQPFSGQGHRLGSATPKIVSKAKNIEVENKNNLSAVPLNNLEPITNIQIWLANGKRIVQKFNITHRVSHIKDFIEKYQGSQRSPPFSLATALPVLRLLDETLTLEEADLQNAVIIQRLQKTASFRELSEH

SEQ ID NO: 5296 - protein, 329 aa, Homo sapiens
MVRTKTWTLKKHFVGYPTNSDFELKTAELPPLKNGEVLLEALFLTVDPYMRVAAKRLKEGDTMMGQQVAKVVESKNVALPKGTIVLASPGWTTHSISDGKDLEKLLTEWPDTIPLSLALGTVGMPGLTAYFGLLEICGVKGGETVMVNAAAGAVGSVVGQIAKLKGCKVVGAVGSDEKVAYLQKLGFDVVFNYKTVESLEETLKKASPDGYDCYFDNVGGEFSNTVIGQMKKFGRIAICGAISTYNRTGPLPPGPPPEIVIYQELRMEAFVVYRWQGDARQKALKDLLKWVLEGKIQYKEYIIEGFENMPAAFMGMLKGDNLGKTIVKA

SEQ ID NO: 5297 - protein, 1000 aa, Homo sapiens
MQSTDLGNKESGKIWHRKPSPATRDGIIVNIIHNTSDYHPKVLRFLNVAFDGTGDCLIAGDHQGNIYVFDLHGNRFNLVQRTAQACTALAFNLRRKSEFLVALADYSIKCFDTVTKELVSWMRGHESSVFSISVHASGKYAITTSSDTAQLWDLDTFQRKRKLNIRQSVGIQKVFFLPLSNTILSCFKDNSIFAWECDTLFCKYQLPAPPESSSILYKVFAVTRDGRILAAGGKSNHLHLWCLEARQLFRIIQMPTKVRAIRHLEFLPDSFDAGSNQVLGVLSQDGIMRFINMQTCKLLFEIGSLDEGISSSAISPHGRYIASIMENGSLNIYSVQALTQEINKPPPPLVKVIEDLPKNKLSSSDLKMKVTSGRVQQPAKSRESKMQTRILKQDLTGDFESKKNELPDGLNKKRLQILLKGYGEYPTKYRMFIWRSLLQLPENHTAFSTLIDKGTHVAFLNLQKKYPIKSRKLLRVLQRTLSALAHWSVIFSDTPYLPLLAFPFVKLFQNNQLICFEVIATLIINWCQHWFEYFPNPPINILSMIENVLAFHDKELLQHFIDHDITSQLYAWPLLETVFSEVLTREEWLKLFDNIFSNHPSFLLMTVVAYNICSRTPLLSCNLKDDFEFFFHHRNNLDINVVIRQVYHLMETTPTDIHPDSMLNVFVALTKGQYPVFNQYPKFIVDYQTQERERIRNDELDYLRERQTVEDMQAKVDQQRVEDEAWYQKQELLRKAEETRREMLLQEEEKMIQQRQRLAAVKRELKVKEMHLQDAARRRFLKLQQDQQEMELRRLDDEIGRKVYMRDREIAATARDLEMRQLELESQKRLYEKNLTENQEALAKEMRADADAYRRKVDLEEHMFHKLIEAGETQSQKTQKWKEAEGKEFRLRSAKKASALSDASRKWFLKQEINAAVEHAENPCHKEEPRFQNEQDSSCLAASQLNDSSEMDPSTQISLNRRAVEWDTTGQNLIKKVRNLRQRLTARARHRCQTPHLLAA

SEQ ID NO: 5298 - protein, 216 aa, Homo sapiens
MSFLFGSRSSKTFKPKKNIPEGSHQYELLKHAEATLGSGNLRMAVMLPEGEDLNEWVAVNTVDFFNQINMLYGTITDFCTEESCPVMSAGPKYEYHWADGTNIKKPIKCSAPKYIDYLMTWVQDQLDDETLFPSKIGVPFPKNFMSVAKTILKRLFRVYAHIYHQHFDPVIQLQEEAHLNTSFKHFIFFVQEFNLIDRRELAPLQELIEKLTSKDR

SEQ ID NO: 5299 - protein, 158 aa, Homo sapiens
MAAQGVGPGPGSAAPPGLEAARQKLALRRKKVLSTEEMELYELAQAAGGGIDPDVFKILVDLLKLNVAPLAVFQMLKSMCAGQRLASEPQDPAAVSLPTSSVPETRGRDKGSAALGGVLALAERSNHEGSSQRMPRQPSATRLPKGGGPGKSPTQGST

SEQ ID NO: 5300 - protein, 473 aa, Homo sapiens
MNSVSPAAAQYRSSSPEDARRRPEARRPRGPRGPDPNGLGPSGASGPALGSPGAGPSEPDEVDKFKAKFLTAWNNVKYGWVVKSRTSFSKISSIHLCGRRYRFEGEGDIQRFQRDFVSRLWLTYRRDFPPLPGGCLTSDCGWGCMLRSGQMMLAQGLLLHFLPRDWTWAEGMGLGPPELSGSASPSRYHGPARWMPPRWAQGAPELEQERRHRQIVSWFADHPRAPFGLHRLVELGQSSGKKAGDWYGPSLVAHILRKAVESCSDVTRLVVYVSQDCTVYKADVARLVARPDPTAEWKSVVILVPVRLGGETLNPVYVPCVKELLRCELCLGIMGGKPRHSLYFIGYQDDFLLYLDPHYCQPTVDVSQADFPLESFHCTSPRKMAFAKMDPSCTVGFYAGDRKEFETLCSELTRVLSSSSATERYPMFTLAEGHAQDHSLDDLCSQLAQPTLRLAAGRLLRAKRPSSEDFVFL

SEQ ID NO: 5301 - protein, 314 aa, Homo sapiens
MAFVTRQFMRSVSSSSTASASAKKIIVKHVTVIGGGLMGAGIAQVAAATGHTVVLVDQTEDILAKSKKGIEESLRKVAKKKFAENLKAGDEFVEKTLSTIATSTDAASVVHSTDLVVEAIVENLKVKNELFKRLDKFAAEHTIFASNTSSLQITSIANATTRQDRFAGLHFFNPVPVMKLVEVIKTPMTSQKTFESLVDFSKALGKHPVSCKDTPGFIVNRLLVPYLMEAIRLYERGDASKEDIDTAMKLGAGYPMGPFELLDYVGLDTTKFIVDGWHEMDAENPLHQPSPSLNKLVAENKFGKKTGEGFYKYK

SEQ ID NO: 5302 - protein, 269 aa, Homo sapiens
MGNCCWTQCFGLLRKEAGRLQRVGGGGGSKYFRTCSRGEHLTIEFENLVESDEGESPGSSHRPLTEEEIVDLRERHYDSIAEKQKDLDKKIQKEQERQRIVQQYHPSNNGEYQSSGPEDDFESCLRNMKSQYEVFRSSRLSSDATVLTPNTESSCDLMTKTKSTSGNDDSTSLDLEWEDEEGMNRMLPMRERSKTEEDILRAALKYSNKKTGSNPTSASDDSNGLEWENDFVSAEMDDNGNSEYSGFVNPVLELSDSGIRHSDTDQQTR

SEQ ID NO: 5303 - protein, 456 aa, Homo sapiens
MKCEHCTRKECSKKTKTDDQENVSADAPSPAQENGEKGEFHKLADAKIFLSDCLACDSCMTAEEGVQLSQQNAKDFFRVLNLNKKCDTSKHKVLVVSVCPQSLPYFAAKFNLSVTDASRRLCGFLKSLGVHYVFDTTIAADFSILESQKEFVRRYRQHSEEERTLPMLTSACPGWVRYAERVLGRPITAHLCTAKSPQQVMGSLVKDYFARQQNLSPEKIFHVIVAPCYDKKLEALQESLPPALHGSRGADCVLTSGEIAQIMEQGDLSVRDAAVDTLFGDLKEDKVTRHDGASSDGHLAHIFRHAAKELFNEDVEEVTYRALRNKDFQEVTLEKNGEVVLRFAAAYGFRNIQNMILKLKKGKFPFHFVEVLACAGGCLNGRGQAQTPDGHADKALLRQMEGIYADIPVRRPESSAHVQELYQEWLEGINSPKAREVLHTTYQSQERGTHSLDIKW

SEQ ID NO: 5304 - protein, 203 aa, Homo sapiens
MAHVSSETQDVSPKDELTASEASTRSPLCEHTFPGDSDLRSMIEEHAFQVLSQGSLLESPSYTVCVSEPDKDDDFLSLNFPRKLWKIVESDQFKSISWDENGTCIVINEELFKKEILETKAPYRIFQTDAIKSFVRQLNLYGFSKIQQNFQRSAFLATFLSEEKESSVLSKIRFTKMKLSRSSTYENRYLCCNLHLKDESNYS

SEQ ID NO: 5305 - protein, 683 aa, Homo sapiens
MNTSIPYQQNPYNPRGSSNVIQCYRCGDTCKGEVVRVHNNHFHIRCFTCQVCGCGLAQSGFFFKNQEYICTQDYQQLYGTRCDSCRDFITGEVISALGRTYHPKCFVCSLCRKPFPIGDKVTFSGKECVCQTCSQSMASSKPIKIRGPSHCAGCKEEIKHGQSLLALDKQWHVSCFKCQTCSVILTGEYISKDGVPYCESDYHAQFGIKCETCDRYISGRVLEAGGKHYHPTCARCVRCHQMFTEGEEMYLTGSEVWHPICKQAARAEKKLKHRRTSETSISPPGSSIGSPNRVICAKVDNEILNYKDLAALPKVKSIYEVQRPDLISYEPHSRYMSDEMLERCGYGESLGTLSPYSQDIYENLDLRQRRASSPGYIDSPTYSRQGMSPTFSRSPHHYYRSGPESGRSSPYHSQLDVRSSTPTSYQAPKHFHIPAGDSNIYRKPPIYKRHGDLSTATKSKTSEDISQTSKYSPIYSPDPYYASESEYWTYHGSPKVPRARRFSSGGEEDDFDRSMHKLQSGIGRLILKEEMKARSSSYADPWTPPRSSTSSREALHTAGYEMSLNGSPRSHYLADSDPLISKSASLPAYRRNGLHRTPSADLFHYDSMNAVNWGMREYKIYPYELLLVTTRGRNRLPKDVDRTRLERHLSQEEFYQVFGMTISEFDRLALWKRNELKKQARLF

SEQ ID NO: 5306 - protein, 846 aa, Homo sapiens
MLFTVSCSKMSSIVDRDDSSIFDGLVEEDDKDKAKRVSRNKSEKKRRDQFNVLIKELGSMLPGNARKMDKSTVLQKSIDFLRKHKEITAQSDASEIRQDWKPTFLSNEEFTQLMLEALDGFFLAIMTDGSIIYVSESVTSLLEHLPSDLVDQSIFNFIPEGEHSEVYKILSTHLLESDSLTPEYLKSKNQLEFCCHMLRGTIDPKEPSTYEYVKFIGNFKSLNSVSSSAHNGFEGTIQRTHRPSYEDRVCFVATVRLATPQFIKEMCTVEEPNEEFTSRHSLEWKFLFLDHRAPPIIGYLPFEVLGTSGYDYYHVDDLENLAKCHEHLMQYGKGKSCYYRFLTKGQQWIWLQTHYYITYHQWNSRPEFIVCTHTVVSYAEVRAERRRELGIEESLPETAADKSQDSGSDNRINTVSLKEALERFDHSPTPSASSRSSRKSSHTAVSDPSSTPTKIPTDTSTPPRQHLPAHEKMVQRRSSFSSQSINSQSVGSSLTQPVMSQATNLPIPQGMSQFQFSAQLGAMQHLKDQLEQRTRMIEANIHRQQEELRKIQEQLQMVHGQGLQMFLQQSNPGLNFGSVQLSSGNSSNIQQLAPINMQGQVVPTNQIQSGMNTGHIGTTQHMIQQQTLQSTSTQSQQNVLSGHSQQTSLPSQTQSTLTAPLYNTMVISQPAAGSMVQIPSSMPQNSTQSAAVTTFTQDRQIRFSQGQQLVTKLVTAPVACGAVMVPSTMLMGQVVTAYPTFATQQQQSQTLSVTQQQQQQSSQEQQLTSVQQPSQAQLTQPPQQFLQTSRLLHGNPSTQLILSAAFPLQQSTFPQSHHQQHQSQQQQQLSRHRTDSLPDPSKVQPQ

SEQ ID NO: 5307 - protein, 551 aa, Homo sapiens
MGRKAIVLAIANTSLAFPLCQHLVTFCLGEDDGVHTVEDASRKLAVMDSQGRVWAQEMLLRVSPDHVTLLDPASKEELESYPLGAIVRCDAVMPPGRSRSLLLLVCQEPERAQPDVHFFQGLRLGAELIREDIQGALHNYRSGRGERRAAALRATQEELQRDRSPAAETPPLQRRPSVRAVISTVERGAGRGRPQAKPIPEAEEAQRPEPVGTSSNADSASPDLGPRGPDLAVLQAEREVDILNHVFDDVESFVSRLQKSAEAARVLEHRERGRRSRRRAAGEGLLTLRAKPPSEAEYTDVLQKIKYAFSLLARLRGNIADPSSPELLHFLFGPLQMIVNTSGGPEFASSVRRPHLTSDAVALLRDNVTPRENELWTSLGDSWTRPGLELSPEEGPPYRPEFFSGWEPPVTDPQSRAWEDPVEKQLQHERRRRQVTQATQQGRGWEVRGRGRSAWPRLTRLSYFLQQSAPQVAVNGHRDLEPESEPQLESETAGKWVLCNYDFQARNSSELSVKQRDVLEALQDKEKVSELEAVMEKQKKKVEGEVEMEVI

SEQ ID NO: 5308 - protein, 562 aa, Homo sapiens
MAASAKRKQEEKHLKMLRDMTGLPHNRKCFDCDQRGPTYVNMTVGSFVCTSCSGSLRGLNPPHRVKSISMTTFTQQEIEFLQKHGNEVCKQIWLGLFDDRSSAIPDFRDPQKVKEFLQEKYEKKRWYVPPEQAKVVASVHASISGSSASSTSSTPEVKPLKSLLGDSAPTLHLNKGTPSQSPVVGRSQGQQQEKKQFDLLSDLGSDIFAAPAPQSTATANFANFAHFNSHAAQNSANADFANFDAFGQSSGSSNFGGFPTASHSPFQPQTTGGSAASVNANFAHFDNFPKSSSADFGTFNTSQSHQTASAVSKVSTNKAGLQTADKYAALANLDNIFSAGQGGDQGSGFGTTGKAPVGSVVSVPSQSSASSDKYAALAELDSVFSSAATSSNAYTSTSNASSNVFGTVPVVASAQTQPASSSVPAPFGATPSTNPFVAAAGPSVASSTNPFQTNARGATAATFGTASMSMPTGFGTPAPYSLPTSFSGSFQQPAFPAQAAFPQQTAFSQQPNGAGFAAFGQTKPVVTPFGQVAAAGVSSNPFMTGAPTGQFPTGSSSTNPFL

SEQ ID NO: 5309 - protein, 683 aa, Homo sapiens
MAAAVAAPLAAGGEEAAATTSVPGSPGLPGRRSAERALEEAVATGTLNLSNRRLKHFPRGAARSYDLSDITQADLSRNRFPEVPEAACQLVSLEGLSLYHNCLRCLNPALGNLTALTYLNLSRNQLSLLPPYICQLPLRVLIVSNNKLGALPPDIGTLGSLRQLDVSSNELQSLPSELCGLSSLRDLNVRRNQLSTLPEELGDLPLVRLDFSCNRVSRIPVSFCRLRHLQVILLDSNPLQSPPAQVCLKGKLHIFKYLSTEAGQRGSALGDLAPSRPPSFSPCPAEDLFPGHRYDGGLDSGFHSVDSGSKRWSGNESTDEFSELSFRISELAREPRGPRERKEDGSADGDPVQIDFIDSHVPGEDEERGTVEEQRPPELSPGAGDRERAPSSRREEPAGEERRRPDTLQLWQERERRQQQQSGAWGAPRKDSLLKPGLRAVVGGAAAVSTQAMHNGSPKSSASQAGAAAGQGAPAPAPASQEPLPIAGPATAPAPRPLGSIQRPNSFLFRSSSQSGSGPSSPDSVLRPRRYPQVPDEKDLMTQLRQVLESRLQRPLPEDLAEALASGVILCQLANQLRPRSVPFIHVPSPAVPKLSALKARKNVESFLEACRKMGVPEADLCSPSDLLQGTARGLRTALEAVKRVGGKALPPLWPPSGLGGFVVFYVVLMLLLYVTYTRLLGS

SEQ ID NO: 5310 - protein, 100 aa, Homo sapiens
MSTSTSCPIPGGRDQLPDCYSTTPGGTLYATTPGGTRIIYDRKFLLECKNSPIARTPPCCLPQIPGVTTPPTAPLSKLEELKEQETEEEIPDDAQFEMDI

SEQ ID NO: 5311 - protein, 793 aa, Homo sapiens
MPMESASSDNKKQIPNEASARSERDTSDLEQNWSLQDHYRMYSPIIYQALCEHVQTQMSLMNDLTSKNIPNGIPAVPCHAPSHSESQATPHSSYGLCTSTPVWSLQRPPCPPKVHSEVQTDGNSQFASQGKTVSATCTDVLRNSFNTSPGVPCSLPKTDISAIPTLQQLGLVNGILPQQGIHKETDLLKCIQTYLSLFRSHGKETHLDSQTHRSPTQSQPAFLATNEEKCAREQIREATSERKDLNIHVRDTKTVKDVQKAKNVNKTAEKVRIIKYLLGELKALVAEQEDSEIQRLITEMEACISVLPTVSGNTDIQVEIALAMQPLRSENAQLRRQLRILNQQLREQQKTQKPSGAVDCNLELFSLQSLNMSLQNQLEESLKSQELLQSKNEELLKVIENQKDENKKFSSIFKDKDQTILENKQQYDIEITRIKIELEEALVNVKSSQFKLETAEKENQILGITLRQRDAEVTRLRELTRTLQTSMAKLLSDLSVDSARCKPGNNLTKSLLNIHDKQLQHDPAPAHTSIMSYLNKLETNYSFTHSEPLSTIKNEETIEPDKTYENVLSSRGPQNSNTRGMEEASAPGIISALSKQDSDEGSETMALIEDEHNLDNTIYIPFARSTPEKKSPLSKRLSPQPQIRAATTQLVSNSGLAVSGKENKLCTPVICSSSTKEAEDAPEKLSRASDMKDTQLLKKIKEAIGKIPAATKEPEEQTACHGPSGCLSNSLQVKGNTVCDGSVFTSDLMSDWSISSFSTFTSRDEQDFRNGLAALDANIARLQKSLRTGLLEK

SEQ ID NO: 5312 - protein, 372 aa, Homo sapiens; identical to SEQ ID NO: 5230

SEQ ID NO: 5313 - protein, 111 aa, Homo sapiens
MTTLRAFTCDDLFRFNNINLDPLTETYGIPFYLQYLAHWPEYFIVAEAPGGELMGYIMGKAEGSVAREEWHGHVTALSVAPEFRRLGLAAKLMELLEEISERYEESTFQGY

SEQ ID NO: 5314 - protein, 481 aa, Homo sapiens
MNGTLDHPDQPDLDAIKMFVGQVAAWSEKDLRELFEQYGAVYEINVLRDRSQNPPQSKGCCFVTFYTRKAALEAQNALHNMKVLPGMHHPIQMKPADSEKNNAVEDRKLFIGMISKKCTENDIRVMFSSFGQIEECRILRGPDGLSRGCAFVTFTTRAMAQTAIKAMHQAQTMEGCSSPMVVKFADTQKDKEQKRMAQQLQQQMQQISAASVWGNLAGLNTLGPQYLALLQQTASSGNLNTLSSLHPMGGLNAMQLQNLAALAAAASAAQNTPSGTNALTTSSSPLSVLTSSGSSPSSSSSNSVNPIASLGALQTLAGATAGLNVGSLAGMAALNGGLGSSGLSNGTGSTMEALTQAYSGIQQYAAAALPTLYNQNLLTQQSIGAAGSQKEGPEGANLFIYHLPQEFGDQDLLQMFMPFGNVVSAKVFIDKQTNLSKCFGFVSYDNPVSAQAAIQSMNGFQIGMKRLKVQLKRSKNDSKPY

SEQ ID NO: 5315 - protein, 448 aa, Homo sapiens
MSPLECSECFGDQLLHRTYTWQLTLHSRPNYTRKRDTRSESLEIPISVVLPQRGTAEPFPRLHNLYSTPRCAQQAALPRLSRRMASQHSYPLNRFSSVPLDPMERPMSQADLELDYNPPRVQLSDEMFVFQDGRWVNENCRLQSPYFSPSASFHHKLHHKRLAKECMLQEENKSLREENKALREENRMLSKENKILQVFWEEHKASLGREESRAPSPLLHKDSASLEVVKKDHVALQVPRGKEDSTLQLLREENRALQQLLEQKQAYWAQAEDTAAPAEESKPAPSPHEEPCSPGLLQDQGSGLSSRFEEPKGPPARQEDSKELRALRKMVSNMSGPSGEEEAKVGPGLPDGCQPLQLLREMRQALQALLKENRLLQEENRTLQVLRAEHRGFQEENKALWENNKLKLQQKLVIDTVTEVTARMEMLIEELYAFMPARSQDPKKPSRV

SEQ ID NO: 5316 - protein, 333 aa, Homo sapiens
MAAAAAGTATSQRFFQSFSDALIDEDPQAALEELTKALEQKPDDAQYYCQRAYCHILLGNYCVAVADAKKSLELNPNNSTAMLRKGICEYHEKNYAAALETFTEGQKLDSADANFSVWIKRCQEAQNGSESEVWTHQSKIKYDWYQTESQVVITLMIKNVQKNDVNVEFSEKELSALVKLPSGEDYNLKLELLHPIIPEQSTFKVLSTKIEIKLKKPEAVRWEKLEGQGDVPTPKQFVADVKNLYPSSSPYTRNWDKLVGEIKEEEKNEKLEGDAALNRLFQQIYSDGSDEVKRAMNKSFMESGGTVLSTNWSDVGKRKVEINPPDDMEWKKY

SEQ ID NO: 5317 - protein, 342 aa, Homo sapiens
MSLHGKRKEIYKYEAPWTVYAMNWSVRPDKRFRLALGSFVEEYNNKVQLVGLDEESSEFICRNTFDHPYPTTKLMWIPDTKGVYPDLLATSGDYLRVWRVGETETRLECLLNNNKNSDFCAPLTSFDWNEVDPYLLGTSSIDTTCTIWGLETGQVLGRVNLVSGHVKTQLIAHDKEVYDIAFSRAGGGRDMFASVGADGSVRMFDLRHLEHSTIIYEDPQHHPLLRLCWNKQDPNYLATMAMDGMEVVILDVRVPCTPVARLNNHRACVNGIAWAPHSSCHICTAADDHQALIWDIQQMPRAIEDPILAYTAEGEINNVQWASTQPDWIAICYNNCLEILRV

SEQ ID NO: 5318 - protein, 168 aa, Homo sapiens
MAEGSRIPQARALLQQCLHARLQIRPADGDVAAQWVEVQRGLVIYVCFFKGADKELLPKMVNTLLNVKLSETENGKHVSILDLPGNILIIPQATLGGRLKGRNMQYHSNSGKEEGFELYSQFVTLCEKEVAANSKCAEARVVVEHGTYGNRQVLKLDTNGPFTHLIEF

SEQ ID NO: 5319 - protein, 1023 aa, Homo sapiens
MEGALTARDKVGVQDFVLLDAYTSESAFVDNLRKRFSENLIYTYIGTLLVSVNPYQELGIYTVSQMELYQGVNFFELPPHVYAIADNAYRMMCAELNNHFILISGESGAGKTEASKKILEYFAVTCPMTQSLQIARDRLLFSNPVLEAFGNARTLRNDNSSRFGKYMDIQFDFQGIPVGGHIISYLIEKSRVVYQNEGERNFHIFYQLLAGGEEERLSYLGLERDPQLYKYLSQGHCAKESSISDKNDWKTVSNAFSVIDFTEADLENLFGIIASVLHLGNIGFEEDDQGCATIPDTHEIKWIAKLLGVHPSVLLEALTHRKIEAKTEEVICPLTLELSVYARDAMAKAVYGRTFTWLVNKINSSLVNKDFTRKTVIGLLDIYGFEVFDKNGFEQFCINYCNEKLQQLLIERTLKAEQAEYEMEGIEWEPIKYFNNKIICDLVEERHKGIISILDEECIRPGPATDLSFLEKLEEKVGKHAHFETRKLAGPKGRKRIGWMEFRLLHYAGEVTYCTKGFLEKNNDLLYRHLKEVLCKSKNIILRECFLLAELENRRRPPTVGTQFKNSLSSLLETLISKEPSYIRCIKPNDRKEPSKFDDFLIRHQIKYLGLMEHLRVRRAGFAYRRKYEHFLQRYKSLCPDTWPHWHGPPAEGVERLIKYIGYKPEEYKLGKTKIFIRFAALFATEDAFEFSKHQLVARIQATYKRCLGRREYVKKRQAAIKLEAHWRGALARKAIQRRKWAVRIIRKFIKGFISRNKPLCPDNEEFIVFVRKNYILNLRYHLPKTVLDKSWLRPPGILENASDLLRKMCVRNLVQKYCRGITAERKAMMQQKVVTSEIFRGRKDGYTESLNQPFVNSRIDEGDINPKVLQLISHEKIQYGVPVIKYDRKGFKARQRQLILTQKAAYVVELAKIKQKIEYSALKGVSTSNLSDGILVIHVSPEDSKQKGDAVLQCGHVFEAVTKLVMLVKKENIVNVVQGSLQFFISPGKEGTIVFDTGLEEQVYKNKNGQLTVVSVRARGSS

SEQ ID NO: 5320 - protein, 347 aa, Homo sapiens
MNTLMDVLRHRPGWVEVKDEGEWDFYWCDVSWLRENFDHTYMDEHVRISHFRNHYELTRKNYMVKNLKRFRKQLEREAGKLEAAKCDFFPKTFEMPCEYHLFVEEFRKNPGITWIMKPVARSQGKGIFLFRRLKDIVDWRKDTRSSDDQKDDIPVENYVAQRYIENPYLIGGRKFDLRVYVLVMSYIPLRAWLYRDGFARFSNTRFTLNSIDDQYVHLTNVAVQKTSPDYHPKKGCKWTLQRFRQYLASKHGPEAVETLFRDIDNIFVKSLQSVQKVIISDKHCFELYGYDILIDQDLKPWLLEVNASPSLTASSQEDYELKTCLLEDTLHVVDMEARSLRADSPCW

SEQ ID NO: 5321 - protein, 147 aa, Homo sapiens
MSSEPPPPPQPPTHQASVGLLDTPRSRERSPSPLRGNVVPSPLPTRRTRTFSATVRASQGPVYKGVCKCFCRSKGHGFITPADGGPDIFLHISDVEGEYVPVEGDEVTYKMCSIPPKNEKLQAVEVVITHLAPGTKHETWSGHVISS

SEQ ID NO: 5322 - protein, 185 aa, Homo sapiens
MADGGGGGGTGAVGGGGTSQASAGAATGATGASGGGGPINPASLPPGDPQLIALIVEQLKSRGLFDSFRRDCLADVDTKPAYQNLRQKVDNFVSTHLDKQEWNPTMNKNQLRNGLRQSVVQSGMLEAGVDRIISQVVDPKLNHIFRPQIERAIHEFLAAQKKAAVPAPPPEPEGQDPPAPSQDTS

SEQ ID NO: 5323 - protein, 2116 aa, Homo sapiens
MDEVEQDQHEARLKELFDSFDTTGTGSLGQEELTDLCHMLSLEEVAPVLQQTLLQDNLLGRVHFDQFKEALILILSRTLSNEEHFQEPDCSLEAQPKYVRGGKRYGRRSLPEFQESVEEFPEVTVIEPLDEEARPSHIPAGDCSEHWKTQRSEEYEAEGQLRFWNPDDLNASQSGSSPPQDWIEEKLQEVCEDLGITRDGHLNRKKLVSICEQYGLQNVDGEMLEEVFHNLDPDGTMSVEDFFYGLFKNGKSLTPSASTPYRQLKRHLSMQSFDESGRRTTTSSAMTSTIGFRVFSCLDDGMGHASVERILDTWQEEGIENSQEILKALDFSLDGNINLTELTLALENELLVTKNSIHQAALASFKAEIRHLLERVDQVVREKEKLRSDLDKAEKLKSLMASEVDDHHAAIERRNEYNLRKLDEEYKERIAALKNELRKEREQILQQAGKQRLELEQEIEKAKTEENYIRDRLALSLKENSRLENELLENAENVLAEKFGDLDPSSAEFFLQEERLTQMRNEYERQCRVLQDQVDELQSELEEYRAQGRVLRLPLKNSPSEEVEANSGGIEPEHGLGSEECNPLNMSIEAELVIEQMKEQHHRDICCLRLELEDKVRHYEKQLDETVVSCKKAQENMKQRHENETHTLEKQISDLKNEIAELQGQAAVLKEAHHEATCRHEEEKKQLQVKLEEEKTHLQEKLRLQHEMELKARLTQAQASFEREREGLQSSAWTEEKVRGLTQELEQFHQEQLTSLVEKHTLEKEELRKELLEKHQRELQEGREKMETECNRRTSQIEAQFQSDCQKVTERCESALQSLEGRYRQELKDLQEQQREEKSQWEFEKDELTQECAEAQELLKETLKREKTTSLVLTQEREMLEKTYKEHLNSMVVERQQLLQDLEDLRNVSETQQSLLSDQILELKSSHKRELREREEVLCQAGASEQLASQRLERLEMEHDQERQEMMSKLLAMENIHKATCETADRERAEMSTEISRLQSKIKEMQQATSPLSMLQSGCQVIGEEEVEGDGALSLLQQGEQLLEENGDVLLSLQRAHEQAVKENVKMATEISRLQQRLQKLEPGLVMSSCLDEPATEFFGNTAEQTEQFLQQNRTKQVEGVTRRHVLSDLEDDEVRDLGSTGTSSVQRQEVKIEESEASVEGFSELENSEETRTESWELKNQISQLQEQLMMLCADCDRASEKKQDLLFDVSVLKKKLKMLERIPEASPKYKLLYEDVSRENDCLQEELRMMETRYDEALENNKELTAEVFRLQDELKKMEEVTETFLSLEKSYDEVKIENEGLNVLVLRLQGKIEKLQESVVQRCDCCLWEASLENLEIEPDGNILQLNQTLEECVPRVRSVHHVIEECKQENQYLEGNTQLLEKVKAHEIAWLHGTIQTHQERPRVQNQVILEENTTLLGFQDKHFQHQATIAELELEKTKLQELTRKLKERVTILVKQKDVLSHGEKEEELKAMMHDLQITCSEMQQKVELLRYESEKLQQENSILRNEITTLNEEDSISNLKLGTLNGSQEEMWQKTETVKQENAAVQKMVENLKKQISELKIKNQQLDLENTELSQKNSQNQEKLQELNQRLTEMLCQKEKEPGNSALEEREQEKFNLKEELERCKVQSSTLVSSLEAELSEVKIQTHIVQQENHLLKDELEKMKQLHRCPDLSDFQQKISSVLSYNEKLLKEKEALSEELNSCVDKLAKSSLLEHRIATMKQEQKSWEHQSASLKSQLVASQEKVQNLEDTVQNVNLQMSRMKSDLRVTQQEKEALKQEVMSLHKQLQNAGGKSWAPEIATHPSGLHNQQKRLSWDKLDHLMNEEQQLLWQENERLQTMVQNTKAELTHSREKVRQLESNLLPKHQKHLNPSGTMNPTEQEKLSLKRECDQFQKEQSPANRKVSQMNSLEQELETIHLENEGLKKKQVKLDEQLMEMQHLRSTATPSPSPHAWDLQLLQQQACPMVPREQFLQLQRQLLQAERINQHLQEELENRTSETNTPQGNQEQLVTVMEERMIEVEQKLKLVKRLLQEKVNQLKEQLCKNTKADAMVKDLYVENAQLLKALEVTEQRQKTAEKKNYLLEEKIASLSNIVRNLTPAPLTSTPPLRS

SEQ ID NO: 5324 - protein, 886 aa, Homo sapiens
MPILLFLIDTSASMNQRSHLGTTYLDTAKGAVETFMKLRARDPASRGDRYMLVTFEEPPYAIKAGWKENHATFMNELKNLQAEGLTTLGQSLRTAFDLLNLNRLVTGIDNYGQGRNPFFLEPAIIITITDGSKLTTTSGVQDELHLPLNSPLPGSELTKEPFRWDQRLFALVLRLPGTMSVESEQLTGVPLDDSAITPMCEVTGGRSYSVCSPRMLNQCLESLVQKVQSGVVINFEKAGPDPSPVEDGQPDISRPFGSQPWHSCHKLIYVRPNPKTGVPIGHWPVPESFWPDQNSPTLPAASHPVVKFSCTDCEPMVIDKLPFDKYELEPSPLTQFILERKSPQTCWQVYVSNSAKYSELGHPFGYLKASTALNCVNLFVMPYNYPVLLPLLDDLFKVHKAKPTLKWRQSFESYLKTMPPYYLGPLKKAVRMMGAPNLIADSMEYGLSYSVISYLKKLSQQAKIESDRVIGSVGKKVVQETGIKVRSRSHGLSMAYRKDFQQLLQGISEDVPHRLLDLNMKEYTGFQVALLNKDLKPQTFRNAYDIPRRNLLDHLTRMRSNLLKSTRRFLKGQDEDQVHSVPIAQMGNYQEYLKQVPSPLRELDPDQPRRLHTFGNPFKLDKKGMMIDEADEFVAGPQNKHKRPGEPNMQGIPKRRRCMSPLLRGRQQNPVVNNHIGGKGPPAPTTQAQPDLIKPLPLHKISETTNDSIIHDVVENHVADQLSSDITPNAMDTEFSASSPASLLERPTNHMEALGHDHLGTNDLTVGGFLENHEEPRDKEQCAEENIPASSLNKGKKLMHCRSHEEVNTELKAQIMKEIRKPGRKYERIFTLLKHVQGSLQTRLIFLQNVIKEASRFKKRMLIEQLENFLDEIHRRANQINHINSN

SEQ ID NO: 5325 - protein, 647 aa, Homo sapiens
MSDEVFSTTLAYTKSPKVTKRTTFQDELIRAITARSARQRSSEYSDDFDSDEIVSLGDFSDTSADENSVNKKMNDFHISDDEEKNPSKLLFLKTNKSNGNITKDEPVCAIKNEEEMAPDGCEDIVVKSFSESQNKDEEFEKDKIKMKPKPRILSIKSTSSAENNSLDTDDHFKPSPRPRSMLKKKSHMEEKDGLEDKETALSEELELHSAPSSLPTPNGIQLEAEKKAFSENLDPEDSCLTSLASSSLKQILGDSFSPGSEGNASGKDPNEEITENHNSLKSDENKENSFSADHVTTAVEKSKESQVTADDLEEEKAKAELIMDDDRTVDPLLSKSQSILISTSATASSKKTIEDRNIKNKKSTNNRASSASARLMTSEFLKKSSSKRRTPSTTTSSHYLGTLKVLDQKPSQKQSIEPDRADNIRAAVYQEWLEKKNVYLHEMHRIKRIESENLRIQNEQKKAAKREEALASFEAWKAMKEKEAKKIAAKKRLEEKNKKKTEEENAARKGEALQAFEKWKEKKMEYLKEKNRKEREYERAKKQKEEETVAEKKKDNLTAVEKWNEKKEAFFKQKEKEKINEKRKEELKRAEKKDKDKQAINEYEKWLENKEKQERIERKQKKRHSFLESEALPPWSPPSRTVFAKVF

SEQ ID NO: 5326 - protein, 357 aa, Homo sapiens
MQTFLKGKRVGYWLSEKKIKKLNFQAFAELCRKRGMEVVQLNLSRPIEEQGPLDVIIHKLTDVILEADQNDSQSLELVHRFQEYIDAHPETIVLDPLPAIRTLLDRSKSYELIRKIEAYMEDDRICSPPFMELTSLCGDDTMRLLEKNGLTFPFICKTRVAHGTNSHEMAIVFNQEGLNAIQPPCVVQNFINHNAVLYKVFVVGESYTVVQRPSLKNFSAGTSDRESIFFNSHNVSKPESSSVLTELDKIEGVFERPSDEVIRELSRALRQALGVSLFGIDIIINNQTGQHAVIDINAFPGYEGVSEFFTDLLNHIATVLQGQSTAMAAPSGEFRAGDLCCDLGKSFQVFGPPPPCL

SEQ ID NO: 5327 - protein, 283 aa, Homo sapiens
MLRCGQMIFAQALVCRHLGRDWRWTQRKRQPDSYFSVLNAFIDRKDSYYSIHQIAQMGVGEGKSIGQWYGPNTVAQVLKKLAVFDTWSSLAVHIAMDNTVVMEEIRRLCRTSVPCAGATAFPADSDRHCNGFPAGAEVTNRPSPWRPLVLLIPLRLGLTDINEAYVETLKHCFMMPQSLGVIGGKPNSAHYFIGYVGEELIYLDPHTTQPAVEPTDGCFIPDESFHCQHPPCRMSIAELDPSIAVVLGVGKQGRLVRSIPWAPRPSSWCAAVLGAAVVMCGTP

SEQ ID NO: 5328 - protein, 719 aa, Homo sapiens
MGFSNMEDDGPEEEERVAEPQANFNTPQALRFEELLANLLNEQHQIAKELFEQLKMKKPSAKQQKEVEKVKPQCKEVHQTLILDPAQRKRLQQQMQQHVQLLTQIHLLATCNPNLNPEASSTRICLKELGTFAQSSIALHHQYNPKFQTLFQPCNLMGAMQLIEDFSTHVSIDCSPHKTVKKTANEFPCLPKQVAWILATSKVFMYPELLPVCSLKAKNPQDKILFTKAEDNKYLLTCKTARQLTVRIKNLNMNRAPDNIIKFYKKTKQLPVLGKCCEEIQPHQWKPPIEREEHRLPFWLKASLPSIQEELRHMADGAREVGNMTGTTEINSDQGLEKDNSELGSETRYPLLLPKGVVLKLKPVADRFPKKAWRQKRSSVLKPLLIQPSPSLQPSFNPGKTPAQSTHSEAPPSKMVLRIPHPIQPATVLQTVPGVPPLGVSGGESFESPAALPAMPPEARTSFPLSESQTLLSSAPVPKVMMPSPASSMFRKPYVRRRPSKRRGARAFRCIKPAPVIHPASVIFTVPATTVKIVSLGGGCNMIQPVNAAVAQSPQTIPIATLLVNPTSFPCPLNQPLVASSVSPLIVSGNSVNLPIPSTPEDKAHMNVDIACAVADGENAFQGLEPKLEPQELSPLSATVFPKVEHSPGPPPVDKQCQEGLSENSAYRWTVVKTEEGRQALEPLPQGIQESLNNSSPGDLEEVVKMEPEDATEEISGFL

SEQ ID NO: 5329 - protein, 376 aa, Homo sapiens
MEAAAVTVTRSATRRRRRQLQGLAAPEAGTQEEQEDQEPRPRRRRPGRSIKDEEEETVFREVVSFSPDPLPVRYYDKDTTKPISFYLSSLEELLAWKPRLEDGFNVALEPLACRQPPLSSQRAALLCHDMMGGYLDDRFIQGSVVQTPYAFYHWQCIDVFVYFSHHTVTIPPVGWTNTAHRHGVCVLGTFITEWNEGGRLCEAFLAGDERSYQAVADRLVQITQFFRFDGWLINIENSLSLAAVGNMPPFLRYLTTQLHRQVPGGLVLWYDSVVQSGQLKWQDELNQHNRVFFDSCDGFFTNYNWREEHLERMLGQAGERRADVYVGVDVFARGNVVGGRFDTDKSLELIRKHGFSVALFAPGCSVFPGVGNLLCC

SEQ ID NO: 5330 - protein, 308 aa, Homo sapiens
MRGKRRPQTRAARRLAAQESSEAEDMSVPRGPIAQWADGAISPNGHRPQLRAASGEDSTEEALAAAAAPWEGGPVPGVDTSPFAKSLGHSRGEADLFDSGDIFSTGTGSQSVERTKPKAKIAENPANPPVGGKAKSPMFPALGEASSDDDLFQSAKPKPAKKTNPFPLLEDEDDLFTDQKVKKNETKSSSQQDVILTTQDIFEDDIFATEAIKPSQKTREKEKTLESNLFDDNIDIFADLTVKPKEKSKKKVEAKSIFDDDMDDIFSTGIQAKTTKPKSRSAQAAPEPRFEHKVSNIFDDPLNAFGGQ

SEQ ID NO: 5331 - protein, 310 aa, Homo sapiens
MLKNKGHSSKKDNLAVNAVALQDHILHDLQLRNLSVADHSKTQVQKKENKSLKRDTKAIIDTGLKKTTQCPKLEDSEKEYVLDPKPPPLTLAQKLGLIGPPPPPLSSDEWEKVKQRSLLQGDSVQPCPICKEEFELRPQVLLSCSHVFHKACLQAFEKFTNKKTCPLCRKNQYQTRVIHDGARLFRIKCVTRIQAYWRGCVVRKWYRNLRKTVPPTDAKLRKKFFEKKFTEISHRILCSYNTNIEELFAEIDQCLAINRSVLQQLEEKCGHEITEEEWEKIQVQNETSACFEDPCLGAHGSHFSLSNFLL

SEQ ID NO: 5332 - protein, 372 aa, Homo sapiens
MRVGPVRSAMSGASQPRGPALLFPATRGVPAKRLLDADDAAAVAAKCPRLSECSSPPDYLSPPGSPCSPQPPPAAPGAGGGSGSAPGPSRIADYLLLPLAEREHVSRALCIHTGRELRCKVFPIKHYQDKIRPYIQLPSHSNITGIVEVILGETKAYVFFEKDFGDMHSYVRSRKRLREEEAARLFKQIVSAVAHCHQSAIVLGDLKLRKFVFSTEERTQLRLESLEDTHIMKGEDDALSDKHGCPAYVSPEILNTTGTYSGKAADVWSLGVMLYTLLVGRYPFHDSDPSALFSKIRRGQFCIPEHISPKARCLIRSLLRREPSERLTAPEILLHPWFESVLEPGYIDSEIGTSDQIVPEYQEDSDISSFFC

SEQ ID NO: 5333 - protein, 517 aa, Homo sapiens
METDLNSQDRKDLDKFIKFFALKTVQVIVQARLGEKICTRSSSSPTGSDWFNLAIKDIPEVTHEAKKALAGQLPAVGRSMCVEISLKTSEGDSMELEIWCLEMNEKCDKEIKVSYTVYNRLSLLLKSLLAITRVTPAYRLSRKQGHEYVILYRIYFGEVQLSGLGEGFQTVRVGTVGTPVGTITLSCAYRINLAFMSTRQFERTPPIMGIIIDHFVDRPYPSSSPMHPCNYRTAGEDTGVIYPSVEDSQEVCTTSFSTSPPSQLSSSRLSYQPAALGVGSADLAYPVVFAAGLNATHPHQLMVPGKEGGVPLAPNQPVHGTQADQERLATCTPSDRTHCAATPSSSEDTETVSNSSEGRASPHDVLETIFVRKVGAFVNKPINQVTLTSLDIPFAMFAPKNLELEDTDPMVNPPDSPETESPLQGSLHSDGSSGGSSGNTHDDFVMIDFKPAFSKDDILPMDLGTFYREFQNPPQLSSLSIDIGAQSMAEDLDSLPEKLAVHEKNVREFDAFVETLQ

SEQ ID NO: 5334 - protein, 495 aa, Homo sapiens
MWRGCARSRKRKKVDNDYNALRERLSTLPDKLSYNIMVPFGPFAFMPGKLVHTNEVTVLLGDNWFAKCSAKQAVGLVEHRKEHVRKTIDDLKKVMKNFESRVEFTEDLQKMSDAAGDIVDIREEIKCDFEFKAKHRIAHKPHSKPKTSDIFEADIANDVKSKDLLADKELWARLEELERQEELLGELDSKPDTVIANGEDTTSSEEEKEDRNTNVNAMHQVTDSHTPCHKDVASSEPFSGQVNSQLNCSVNGSSSYHSDDDDDDDDDDDDDNIDDDDGDNDHEALGVGDNSIPTIYFSHTVEPKRVRINTGKNTTLKFSEKKEEAKRKRKNSTGSGHSAQELPTIRTPADIYRAFVDVVNGEYVPRKSILKSRSRENSVCSDTSESSAAEFDDRRGVLRSISCEEATCSDTSESILEEEPQENQKKLLPLSVTPEAFSGTVIEKEFVSPSLTPPPAIAHPALPTIPERKEVLLEASEETGKRVSKFKAARLQQKD

SEQ ID NO: 5335 - protein, 485 aa, Homo sapiens
MCQVGEDYGEPAPEEPPPAPRPSREQKCVKCKEAQPVVVIRAGDAFCRDCFKAFYVHKFRAMLGKNRLIFPGEKVLLAWSGGPSSSSMVWQVLEGLSQDSAKRLRFVAGVIFVDEGAACGQSLEERSKTLAEVKPILQATGFPWHVVALEEVFSLPPSVLWCSAQELVGSEGAYKAAVDSFLQQQHVLGAGGGPGPTQGEEQPPQPPLDPQNLARPPAPAQTEALSQLFCSVRTLTAKEELLQTLRTHLILHMARAHGYSKVMTGDSCTRLAIKLMTNLALGRGAFLAWDTGFSDERHGDVVVVRPMRDHTLKEVAFYNRLFSVPSVFTPAVDTKAPEKASIHRLMEAFILRLQTQFPSTVSTVYRTSEKLVKGPRDGPAAGDSGPRCLLCMCALDVDAADSATAFGAQTSSRLSQMQSPIPLTETRTPPGPCCSPGVGWAQRCGQGACRREDPQACIEEQLCYSCRVNMKDLGLGLAGDPGLSD

SEQ ID NO: 5336 - protein, 450 aa, Homo sapiens
MSLRLSSASRRSCPRPTTGSLRLYGGGTSFGTGNSCGISGIGSGFSSAFGGSSSGGNTGGGNPCAGFTVNERGLLSGNEKVTMQNLNDRLASYLDSVHALEEANADLEQKIKGWYEKFGPGSCRGLDHDYSRYFPIIDDLKNQIIASTTSNANAVLQIDNARLTADDFRLKYENELALHQSVEADVNGLRRVLDEITLCRTDLEIQYETLSEEMTYLKKNHKEEMQVLQCAAGGNVNVEMNAAPGVDLTVLLNNMRAEYEALAEQNRRDAEAWFNEKSASLQQQISEDVGATTSARNELTEMKRTLQTLEIELQSLLATKHSLECSLTETESNYCAQLAQIQAQIGALEEQLHQVRTETEGQKLEYEQLLDIKLHLEKEIETYCLLIGGDDGACKSGGYKSKDYGSGNVGSQVKDPAKAIVVKKVLEEVDQRSKILTTRLHSLEEKSQSN

SEQ ID NO: 5337 - protein, 891 aa, Homo sapiens
MDQPEAPCSSTGPRLAVARELLLAALEELSQEQLKRFRHKLRDVGPDGRSIPWGRLERADAVDLAEQLAQFYGPEPALEVARKTLKRADARDVAAQLQERRLQRLGLGSGTLLSVSEYKKKYREHVLQLHARVKERNARSVKITKRFTKLLIAPESAAPEEAMGPAEEPEPGRARRSDTHTFNRLFRRDEEGRRPLTVVLQGPAGIGKTMAAKKILYDWAAGKLYQGQVDFAFFMPCGELLERPGTRSLADLILDQCPDRGAPVPQMLAQPQRLLFILDGADELPALGGPEAAPCTDPFEAASGARVLGGLLSKALLPTALLLVTTRAAAPGRLQGRLCSPQCAEVRGFSDKDKKKYFYKYFRDERRAERAYRFVKENETLFALCFVPFVCWIVCTVLRQQLELGRDLSRTSKTTTSVYLLFITSVLSSAPVADGPRLQGDLRNLCRLAREGVLGRRAQFAEKELEQLELRGSKVQTLFLSKKELPGVLETEVTYQFIDQSFQEFLAALSYLLEDGGVAAAAGGVGTLLRGDAQPHSHLVLTTRFLFGLLSAERMRDIERHFGCMVSERVKQEALRWVQGQGQGCPGVAPEVTEGAKGLEDTEEPEEEEEGEEPNYPLELLYCLYETQEDAFVRQALCRFPELALQRVRFCRMDVAVLSYCVRCCPAGQALRLISCRLVAAQEKKKKSLGKRLQASLGGGSSSQGTTKQLPASLLHPLFQAMTDPLCHLSSLTLSHCKLPDAVCRDLSEALRAAPALTELGLLHNRLSEAGLRMLSEGLAWPQCRVQTVRVQLPDPQRGLQYLVGMLRQSPALTTLDLSGCQLPAPMVTYLCAVLQHQGCGLQTLSLASVELSEQSLQELQAVKRAKPDLVITHPALDGHPQPPKELISTF

SEQ ID NO: 5338 - protein, 348 aa, Homo sapiens
MGKDYYKILGIPSGANEDEIKKAYRKMALKYHPDKNKEPNAEEKFKEIAEAYDVLSDPKKRGLYDQYGEEGLKTGGGTSGGSSGSFHYTFHGDPHATFASFFGGSNPFDIFFASSRSTRPFSGFDPDDMDVDEDEDPFGAFGRFGFNGLSRGPRRAPEPLYPRRKVQDPPVVHELRVSLEEIYHGSTKRMKITRRRLNPDGRTVRTEDKILHIVIKRGWKEGTKITFPKEGDATPDNIPADIVFVLKDKPHAHFRRDGTNVLYSALISLKEALCGCTVNIPTIDGRVIPLPCNDVIKPGTVKRLRGEGLPFPKVPTQRGDLIVEFKVRFPDRLTPQTRQILKQHLPCS

SEQ ID NO: 5339 - protein, 631 aa, Homo sapiens
MDTMMLNVRNLFEQLVRRVEILSEGNEVQFIQLAKDFEDFRKKWQRTDHELGKYKDLLMKAETERSALDVKLKHARNQVDVEIKRRQRAEADCEKLERQIQLIREMLMCDTSGSIQLSEEQKSALAFLNRGQPSSSNAGNKRLSTIDESGSILSDISFDKTDESLDWDSSLVKTFKLKKREKRRSTSRQFVDGPPGPVKKTRSIGSAVDQGNESIVAKTTVTVPNDGGPIEAVSTIETVPYWTRSRRKTGTLQPWNSDSTLNSRQLEAAETDSVGTPQSNGGMRLHDFVSKTVIKPESCVPCGKRIKFGKLSLKCRDCRVVSHPECRDRCPLPCIPTLIGTPVKIGEGMLADFVSQTSPMIPSIVVHCVNEIEQRGLTETGLYRISGCDRTVKELKEKFLRVKTVPLLSKVDDIHAICSLLKDFLRNLKEPLLTFRLNRAFMEAAEITDEDNSIAAMYQAVGELPQANRDTLAFLMIHLQRVAQSPHTKMDVANLAKVFGPTIVAHAVPNPDPVTMLQDIKRQPKVVERLLSLPLEYWSQFMMVEQENIDPLHVIENSNAFSTPQTPDIKVSLLGPVTTPEHQLLKTPSSSSLSQRVRSTLTKNTPRFGSKSKSATNLGRQGNFFASPMLK

SEQ ID NO: 5340 - protein, 4026 aa, Homo sapiens
MSSEQDKSASKEKSKKPVRFLPQLSMEKLASKEKFKAPARALPQLSMVSTKPHWQQAAPSFHLSVKQDDESPEPFSVKNEQSHAEYMERFGKKGKLPHQVDDSYVGPSTSKSKGKSPHKERENFRSTLVNVIMQQDADLDSAVPDGSTIPKPTASAIEKDILRYYYYIHHGIDTDHVAPMEDSWLEHVLDLVPQHLKVFTDSIVTLSDEMREDYLLSVRKSIVDFVLKDPREKGDDKKTDELPAHRAEMEILPKPWRKSFLAASSYIRDHLNAMNPTMLAVLDLWHTNFKKLRLVDIKEFHNCQDALELSSFQNIIMRHMDSAKETLLKMWFPEVQNIYYQGNKKKQLPTGDSSAKLESFFNCAAALMTLQLQDLTLVSMQDFTDLIAQPPDSVRAFEHPGFIMRLILDNDTIKFEPELSDYIDIFLNVYDVMIKAVSFVPRVETKLYSKWESKSKPTTLKPIILNEIVDAHKEKIKEVIMKESVAPTEHLRLYDKYDFLITRKAERDVDNFLAENHSYEKIIDEICKYQKLIEEIQYTSIKTIRLGMFEMHCEELIRALVKRADIICGKLLAKMFRDHQEVNTRLCDEFERIAEKALSTPPNTAELMEMKAYIQKVEVTDMIELEQRLVDSKNCLAFLIEYVNFSPADMRLNNSVFQWYGRMGEIFEEHRKIIKEKIEQYQEGLKLRCERFVEELESYAKQSEEFYSFGDLQDVQRYLKKAQILNGKLDLAADKIEQFNAEEEAFGWLPSVYPQRKKIQDGLNPYLRLYETAVEFSSNYRAWTEGPYHKVNPDQVEADIGNYWRGLYKLEKTFHDSPYALAMTKKVRSKVEDFKQHIPLIQVICNPGLRPRHWEAMSAIVGYPLQPSDDSTVSSFLDMNLEPYIDRFEGISEAASKEYSLEKAMEKMITEWDAVEFVIHSYRETGTFILASVDEIQMLLDDHIIKTQTMRGSPFIKPYEKQMREWEGKLLLLQEILDEWLKVQATWLYLEPIFSSPDIMSQMPEEGRRFTAVDKTWRDIMRSVMQDKHVLTVVTIDRMLERLKKSNELLELILKGLNEYLEKKRLFFPRFFFLSNDELLEILSETKDPTRVQPHLKKCFEGIAKVEFTETLDITHMKSSEGEVVELIEIISTAKARGQVEKWLVELERVMINSIHKVTGDATFAYTKYERINWVRDWPGQTVLCVSQIFWTKEVQTAIPMGIKALEQYLKTCNRQIDDIVTLVRGKLSMQNRVTLGALVVLDVHARDVLSSLVKKNISDDSDFEWLSQLRYYWQENHLETKMINAGLRYGYEYLGNSPRLVITPLTDRCYRTLFGALHLHLGGAPEGPAGTGKTETTKDLAKAVAKQCVVFNCSDGLDYLALGKFFKGLLSCGAWACFDEFNRIDLEVLSVVAQQILTIQRGINAGADILMFEGTELKLDPTCAVFITMNPGYAGRSELPDNLKALFRTVAMMVPDYAMIAEIVLYSCGFVTARPLSVKIVATYRLCSEQLSSQHHYDYGMRAVKSVLTAAGNLKLKYPNENEEILLLRSIIDVNLPKFLSHDLPLFEGITSDLFPGVKLPKPDYNDLLAAIKDNCASMNLQMTAFFSEKILQVYEMMIVRHGFMIVGEPFGGKTSAYRVLAGALNDICEKGLMEENKVQITVLNPKSVTMGQLYGQFDSVSHEWSDGVLAVSFRAFASSVTPDRKWLIFDGPVDAVWIENMNTVLDDNKKLCLMSGEIIQMSPQMNLIFEPMDLEVASPATVSRCGMIYMEPHMLGWRPLMLSWVNLLPASVSVIQKEFIMGLFDRMVPVSVEFIRKHTKELSPTSDTNLVRSLMNLIDCFMDDFADEVKLKERNDRETYSLLEGIFLFSLIWSVGASCTDDDRLKFNKILRELMESPISDRTRNTFKLQSGTEQTSSKALTVPFPEKGTIYDYQFVTEGIGKWEPWIKKLKEAPPIPKDVMFNEIIVPTLDTIRYSALMELLTTHQKPSIFVGPTGTGKSVYITNFLLNQLNKEIYKPLLINFSAQTTAAQTQNIVMSKLDKRRKGVFGPPLGKRMVVFVDDVNMPAREVYGAQPPIELLRQWLDHWNWYDLKDCSMIKLVDIQIMCAMGPPGGGRNPVTPRYMRHFNIITINEFSDKSMYTIFSRILTWHLEICYKFPDEFLDLTTQIVNGTMTLYKEAMKNLLPTPAKSHYLFNLRDFSRVIQGVCLSRPETTETTEVIKRLWVHEVLRVYYDRLLDNTDRSWLINYIQEILRNYMYEDFHELFQRLDFDNDGMVEADDLRSLMFCDFHDPKREDTNYREIADVDNLRMIVEIHLEEYNNISKKPMNLVLFRFAIEHISRISRILKQPRSHALLVGVGGSGRQSVTRLAAHMADYSVFQVEISKGYDTTEWHEDLKVILARGSCAEGEMQGVFLFTDTQIKEESFLEDVSNLLNAGEIPNLFALDEKQEICDKMRQLDRQRDKTKQTDGSPIALFNMFIDHCRSQLHVVLAMSPIGDAFRNRLRKFPALVNCCTIDWFQSWPEDALQAVASRFLEEIEMSEEIRDGCIDMCKSFHTSTIDLSKSFFVELQRYNYVTPTSYLELISTFKLLLEKKRSEVMKMKKRYEVGLEKLDSASSQVATMQMELEALHPQLKVASKEVDEMMIMIEKESVEVAKTEKIVKADETIANEQAMASKAIKDECDADLAGALPILESALAALDTLTAQDITVVKSMKSPPAGVKLVMEAICILKGIKADKIPDPTGSGKKIEDFWGPAKRLLGDMRFLQSLHEYDKDNIPPAYMNIIRKNYIPNPDFVPEKIRNASTAAEGLCKWVIAMDSYDKVAKIVAPKKIKLAAAEGELKIAMDGLRKKQAALKEVQDKLARLQDTLELNKQKKADLENQVDLCSKKLERAEQLIGGLGGEKTRWSHTALELGQLYINLTGDILISSGVVAYLGAFTSTYRQNQTKEWTTLCKGRDIPCSDDCSLMGTLGEAVTIRTWNIAGLPSDSFSIDNGIIIMNARRWPLMIDPQSQANKWIKNMEKANSLYVIKLSEPDYVRTLENCIQFGTPVLLENVGEELDPILEPLLLKQTFKQGGSTCIRLGDSTIEYAPDFRFYITTKLRNPHYLPETSVKVTLLNFMITPEGMQDQLLGIVVAQERPDLEEEKQALILQGAENKRQLKEIEDKILEVLSSSEGNILEDETAIKILSSSKALANEISQKQEVAEETEKKIDTTRMGYRPIAIHSSILFFSLADLANIEPMYQYSLTWFINLFILSIENSEKSEILAKRLQILKDHFTYSLYVNVCRSLFEKDKLLFSFCLTINLLLHERAINKAEWRFLLTGGIGLDNPYANLCTWLPQKSWDEICRLDDLPAFKTIRREFMRLKDGWKKVYDSLEPHHEVFPEEWEDKANEFQRMLIIRCLRPDKVIPMLQEFIINRLGRAFIEPPPFDLAKAFGDSNCCAPLIFVLSPGADPMAALLKFADDQGYGGSKLSSLSLGQGQGPIAMKMLEKAVKEGTWVVLQNCHLATSWMPTLEKVCEELSPESTHPDFRMWLTSYPSPNFPVSVLQNGVKMTNEAPKGLRANIIRSYLMDPISDPEFFGSCKKPEEFKKLLYGLCFFHALVQERRKFGPLGWNIPYEFNETDLRISVQQLHMFLNQYEELPYEALRYMTGECNYGGRVTDDWDRRTLRSILNKFFNPELVENSDYKFDSSGIYFVPPSGDHKSYIEYTKTLPLTPAPEIFGMNANADITKDQSETQLLFDNILLTQSRSAGAGAKSSDEVVNEVASDILGKLPNNFDIEAAMRRYPTTYTQSMNTVLVQEMGRFNKLLKTIRDSCVNIQKAIKGLAVMSTDLEEVVSSILNVKIPEMWMGKSYPSLKPLGSYVNDFLARLKFLQQWYEVGPPPVFWLSGFFFTQAFLTGAQQNYARKYTIPIDLLGFDYEVMEDKEYKHPPEDGVFIHGLFLDGASWNRKIKKLAESHPKILYDTVPVMWLKPCKRADIPKRPSYVAPLYKTSERRGVLSTTGHSTNFVIAMTLPSDQPKEHWIGRGVALLCQLNS

SEQ ID NO: 5341 - protein, 501 aa, Homo sapiens
MSSRQDKSASKEKSKKPVRFLPQLSMEKLASKEKFKAPARALPQLSMVSTKPHWQQAAPSFHLSVKQDDESPEPFSVKNEQSHAEYMERFGKKGKLPHQVDDSYVGPSTSKSKGKSPHKERENFRSTLVNVIMQQDADLDSAVPDGSTIPKPTASAIEKDILRYYYYIHHGIDTDHVAPMEDSWLEHVLDLVPQHLKVFTDSIVTLSDEMREDYLLSVRKSIVDFVLKDPREKGDDKKTDELPAHRAEMEILPKPWRKSFLAASSYIRDHLNAMNPTMLAVLDLWHTNFKKLRLVDIKEFHNCQDALELSSFQNIIMRHMDSAKETLLKMWFPEVQNIYYQGNKKKQLPTGDSSAKLESFFNCAAALMTLQLQDLTLVSMQDFTDLIAQPPDSVRAFEHPGFIMRLILDNDTIKFEPELSDYIDIFLNVYDVMIKAVSFVPRVETKLYSKWRNKAKPGHFYFSHIQRSVTFQHSEVSSPQNSHFKIVSPFSVLGFTWRCQL

SEQ ID NO: 5342 - protein, 279 aa, Homo sapiens [sequence omitted]

SEQ ID NO: 5343 - protein, 202 aa, Homo sapiens
MEAEAGGLEELTDEEMAALGKEELVRRLRREEAARLAALVQRGRLMQEVNRQLQGHLGEIRELKQLNRRLQAENRELRDLCCFLDSERQRGRRAARQWQLFGTQASRAVREDLGGCWQKLAELEGRQEELLRENLALKELCLALGEEWGPRGGPSGAGGSGAGPAPELALPPCGPRDLGDGSSSTGSVGSPDQLPLACSPDD

SEQ ID NO: 5344 - protein, 450 aa, Homo sapiens
MRECISIHVGQAGVQIGNACWELYCLEHGIQPDGQMPSDKTIGGGDDSFNTFFSETGAGKHVPRAVFVDLEPTVVDEVRTGTYRQLFHPEQLITGKEDAASNYARGHYTIGKEIVDLVLDRIRKLADLCTGLQGFLIFHSFGGGTGSGFASLLMERLSVDYSKKSKLEFAIYPAPQVSTAVVEPYNSILTTHTTLEHSDCAFMVDNEAIYDICRRNLDIERPTYTNLNRLIGQIVSSITASLRFDGALNVDLTEFQTNLVPYPRIHFPLATYAPVISAEKAYHEQLSVAEITNACFEPANQMVKCDPRHGKYMACCMLYRGDVVPKDVNAAIATIKTKRTIQFVDWCPTGFKVGINYQPPTVVPGGDLAKVQRAVCMLSNTTAIAEAWARLVHKFDLMYAKWAFVHWYVGEGMEEGEFSEAREDLAALEKDCEEVGVDSVEAEAEEGEAY

SEQ ID NO: 5345 - protein, 1025 aa, Homo sapiens
MVAMAEAEAGVAVEVRGLPPAVPDELLTLYFENRRRSGGGPVLSWQRLGCGGVLTFREPADAERVLAQADHELHGAQLSLRPAPPRAPARLLLQGLPPGTTPQRLEQHVQALLRASGLPVQPCCALASPRPDRALVQLPKPLSEADVRVLEEQAQNLGLEGTLVSLARVPQARAVRVVGDGASVDLLLLELYLENERRSGGGPLEDLQRLPGPLGTVASFQQWQVAERVLQQEHRLQGSELSLVPHYDILEPEELAENTSGGDHPSTQGPRATKHALLRTGGLVTALQGAGTVTMGSGEEPGQSGASLRTGPMVQGRGIMTTGSGQEPGQSGTSLRTGPMGSLGQAEQVSSMPMGSLEHEGLVSLRPVGLQEQEGPMSLGPVGSAGPVETSKGLLGQEGLVEIAMDSPEQEGLVGPMEITMGSLEKAGPVSPGCVKLAGQEGLVEMVLLMEPGAMRFLQLYHEDLLAGLGDVALLPLEGPDMTGFRLCGAQASCQAAEEFLRSLLGSISCHVLCLEHPGSARFLLGPEGQHLLQGLEAQFQCVFGTERLATATLDTGLEEVDPTEALPVLPGNAHTLWTPDSTGGDQEDVSLEEVRELLATLEGLDLDGEDWLPRELEEEGPQEQPEEEVTPGHEEEEPVAPSTVAPRWLEEEAALQLALHRSLEPQGQVAEQEEAAALRQALTLSLLEQPPLEAEEPPDGGTDGKAQLVVHSAFEQDVEELDRALRAALEVHVQEETVGPWRRTLPAELRARLERCHGVSVALRGDCTILRGFGAHPARAARHLVALLAGPWDQSLAFPLAASGPTLAGQTLKGPWNNLERLAENTGEFQEVVRAFYDTLDAARSSIRVVRVERVSHPLLQQQYELYRERLLQRCERRPVEQVLYHGTTAPAVPDICAHGFNRSFCGRNATVYGKGVYFARRASLSVQDRYSPPNADGHKAVFVARVLTGDYGQGRRGLRAPPLRGPGHVLLRYDSAVDCICQPSIFVIFHDTQALPTHLITCEHVPRASPDDPSGLPGRSPDT

SEQ ID NO: 5346 - protein, 129 aa, Homo sapiens
MSHLQSLLLDTLLGTKHVDSAALIKIQERSLCVASPGFNVTPSDVRTLVNGFAKNPLQARREGLYFKGKDYRCVRADEYSLYAKNENTGVVVVKTHLYLLVATYTEGMYPSICVEATESLGDYLRKKGS

SEQ ID NO: 5347 - protein, 314 aa, Homo sapiens
MLGKGGKRKFDEHEDGLEGKIVSPCDGPSKVSYTLQRQTIFNISLMKLYNHRPLTEPSLQKTVLINNMLRRIQEELKQEGSLRPMFTPSSQPTTEPSDSYREAPPAFSHLASPSSHPCDLGSTTPLEACLTPASLLEDDDDTFCTSQAMQPTAPTKLSPPALLPEKDSFSSALDEIEELCPTSTSTEAATAATDSVKGTSSEAGTQKLDGPQESRADDSKLMDSLPGNFEITTSTGFLTDLTLDDILFADIDTSMYDFDPCTSSSGTASKMAPVSADDLLKTLAPYSSQPVTPSQPFKMDLTELDHIMEVLVGS

SEQ ID NO: 5348 - protein, 81 aa, Homo sapiens
MKGSRIELGDVTPHNIKQLKRLNQVIFPVSYNDKFYKKFGFEIIETKKNYYKRIEPADAHVLQKNLKVPSGQNADVQKTDN

SEQ ID NO: 5349 - protein, 477 aa, Homo sapiens
MASATEDPVLERYFKGHKAAITSLDLSPNGKQLATASWDTFLMLWNFKPHARAYRYVGHKDVVTSVQFSPHGNLLASASRDRTVRLWIPDKRGKFSEFKAHTAPVRSVDFSADGQFLATASEDKSIKVWSMYRQRFLYSLYRHTHWVRCAKFSPDGRLIVSCSEDKTIKIWDTTNKQCVNNFSDSVGFANFVDFNPSGTCIASAGSDQTVKVWDVRVNKLLQHYQVHSGGVNCISFHPSGNYLITASSDGTLKILDLLEGRLIYTLQGHTGPVFTVSFSKGGELFASGGADTQVLLWRTNFDELHCKGLTKRNLKRLHFDSPPHLLDIYAAPHPHEEKVETVEINPKLEVIDLQISTPPVMDILSFDSTTTTETSGRTLPDKGEEACGYFLNPSLMSPECLPTTTKKKTEDMSDLPCESQRSIPLAVTDALEHIMEQLNVLTQTVSILEQRLTLTEDKLKDCLENQQKLFSAVQQKS

SEQ ID NO: 5350 - protein, 420 aa, Homo sapiens
MLKAVILIGGPQKGTRFRPLSFEVPKPLFPVAGVPMIQHHIEACAQVPGMQEILLIGFYQPDEPLTQFLEAAQQEFNLPVRYLQEFAPLGTGGGLYHFRDQILAGSPEAFFVLNADVCSDFPLSAMLEAHRRQRHPFLLLGTTANRTQSLNYGCIVENPQTHEVLHYVEKPSTFISDIINCGIYLFSPEALKPLRDVFQRNQQDGQLEDSPGLWPGAGTIRLEQDVFSALAGQGQIYVHLTDGIWSQIKSAGSALYASRLYLSRYQDTHPERLAKHTPGGPWIRGNVYIHPTAKVAPSAVLGPNVSIGKGVTVGEGVRLRESIVLHGATLQEHTCVLHSIVGWGSTVGRWARVEGTPSDPNPNDPRARMDSESLFKDGKLLPAITILGCRVRIPAEVLILNSIVLPHKELSRSFTNQIIL

SEQ ID NO: 5351 - protein, 404 aa, Homo sapiens
MDQDYERRLLRQIVIQNENTMPRVTEMRRTLTPASSPVSSPSKHGDRFIPSRAGANWSVNFHRINENEKSPSQNRKAKDATSDNGKDGLAYSALLKNELLGAGIEKVQDPQTEDRRLQPSTPEKKGLFTVTRLCDLSVEGDSVTSVGWSERGNLVAVGTHKGFVQIWDAAAGKKLSMLEGHTARVGALAWNAEQLSSGSRDRMILQRDIRTPPLQSERRLQGHRQEVCGLKWSTDHQLLASGGNDNKLLVWNHSSLSPVQQYTEHLAAVKAIAWSPHQHGLLASGGGTADRCIRFWNTLTGQPLQCIDTGSQVCNLAWSKHANELVSTHGYSQNQILVWKYPSLTQVAKLTGHSYRVLYLAMSPDGEAIVTGAGDETLRFWNVFSKTRSTKESVSVLNLFTRIR

SEQ ID NO: 5352 - protein, 1962 aa, Homo sapiens
MKQRKGQGSGGSRGRKKRGLSDISPSTSLPPLVEGQLRCFLKLTVNRVIWKIAKPPTCVLVRVRWWGETSDGTLFCPRDALQTEPKAVRTTTRYAIRCGPKQFTSYLTDMAVLVLEVITKLDGLPIGRVQINGLAQLSPTHQINGFFTIVSSTSKKLGELQVSLALEPLSETYDSYHPLPTTDMTENVLLSKQGFRENTEPSSTQFQVPSRPRDIHTIKIDGKELAANSSRSTTPRGKDHVCFAENPDTIKDSSFGLQHSLNSGQSLESVTLKGRAPRKQMSLLNSSEFQPQIRTVAKSHSDSCILSSNNLPTKDLLSALLEQGNKLRNAMVISAMKSSPETSMLLDQVHPPINEDSLRASTQIRAFSRNRFKDHIEDHLLPSTENTFWRHDTKADTRAIQLLLGSAELSQGNFWDGLGSPPDSPSPGSDVYCISELNDPQYDQSLLENLFYTAPKSDTSISDFLSEEDDIVPSKKISQSTALARSSKVLESSDHKLKKRSAGKRNRNLVEQQMLSETPEDAQTMTLSVDRLALLGRTHSVRIIIETMGVPPDSPQMTPGKKSYAGPPPKVTTAKKRTFFVEYHFPVGFSESGLGKTALITEVVRLASSKITDGKVKFQQRFVFPVQFGGPMIEHWWNSNLTFQIYVKKTPQKKPEVIGSVSLSLRAVIQSELLSFSDQLPVQQENGQSPFGPLKVTMELITDNKDFTGINTKLSGNTHYTPLCAPTSPNKALPELNQDMTCTKNPQNLNQIHEETAKKAQNLVLPNRKSPSPVAPHPSTFVATPASHNLVNQTNGTTKESALLLHVLLMVPDGKDFISGESEKQSPCNVYLNCKLFSTEEVTRSVIAWGTTQPVFNFSQVIPVSLSSKYLERLKNNVMVIETWNKVRSPGQDKLLGLVKLPLHQFYMSFKDAKISRLLLDAQYPVVAVDSYMPVIDVFSGHQNGSLRVFLAMGSSNQIMALQRLKNEEGTLPPFSPRPAHFLDQPTAASVAMAEDRGNGLMEHCFEIHIEMVKGLAPLQATVWGEADCYVQYYFPVQHSQSSVLKGPEFLENGITLKPFRTATTLCVPDPIFNSEHHHSLLLPAEVPVQRLLLSAFSAQGLVPGGGVQFEIWCRYYYPNVRDQKVAKGTLPLSRICAMVTTQHREDVGIQTFNLPLTPRIENRKELRNQSSGLLDVGLRYRRSAAAEGVLAARTVSISVQIIRACGLQAAAKALAEREPALQFSATVGVNASVTTHLSFLPQGEQRRTHPVACSFCPEFSHHVEFTCNLVTQHCSGEACFLAELLEFAEVIFAVYHENTKSASDIISIESCKEYLLGVVKVPTKELLIKRSGITGWYPIILPEDGGLPHGLELMQKIVGGLELSISFTHRGDRERVLEAAEHLGWSFENSLKDFVRMDEGEPATVTISTPRLWLPIHCVLLAGHNHIHKNTYCYLRYKFYDHEAFWTPLKKPKESVNKKQIMVTFKASKRAEVTRGPSLLWYFREERLEIQVWRAYGNDSVERPHQTDSWIGSAYVDLARLGERSARTLTVSGVYPLFGRNASNLSGAALRVHVVLSSLSSHLEPTHELDSMDCSSHSESEQLPRRNDEVQLSPPEVISCHQKSPASTQVPCSSTTAEVRLTQEGPADLDGTFAVSILVERAMHLSLKGSPLTERKVSIPSCCVSFATADESSPVYTQVVENTDSPIWNFQQQSRLSKELLLDPQQTLVFKVWHKGDEERVIGFASVDLSPLLSGFQFVCGWYNITDFSGECQGQIKVAVSPLESLIHFKEERQARRGVETSKSLIPIYSPFSFPASDTYAAFSSHMARQTLDQLAHASSKELDFSSPGRSDTTRSQASRHEEHVQNIRRFHESLHLQGEAPLPCDDKLTTSPLSSQTSILTSLRKNLSELDQIQRYFRQKLTKPFLPLSPQTQTAISQHQESCRDHLGPGASSLDPGSQCILEKSSNLVLQVSSLITGSY

SEQ ID NO: 5353 - protein, 1860 aa, Homo sapiens
MKQRKGQGSGGSRGRKKRGLSDISPSTSLPPLVEGQLRCFLKLTVNRVIWKIAKPPTCVLVRVRWWGETSDGTLFCPRDALQTEPKAVRTTTRYAIRCGPKQFTSYLTDMAVLVLEVITKLDGLPIGRVQINGLAQLSPTHQINGFFTIVSSTSKKLGELQVSLALEPLSETYDSYHPLPTTDMTENVLLSKQGFRENTEPSSTQFQVPSRPRDIHTIKIDGKELAANSSRSTTPRGKDHVCFAENPDTIKDSSFGLQHSLNSGQSLESVTLKGRAPRKQMSLLNSSEFQPQIRTVAKSHSDSCILSSNNLPTKDLLSALLEQGNKLRNAMVISAMKSSPETSMLLDQVHPPINEDSLRASTQIRAFSRNRFKDHIEDHLLPSTENTFWRHDTKADTRAIQLLLGSAELSQGNFWDGLGSPPDSPSPGSDVYCISELNDPQYDQSLLENLFYTAPKSDTSISDFLSEEDDIVPSKKISQSTALARSSKVLESSDHKLKKRSAGKRNRNLVEQQMLSETPEDAQTMTLSVDRLALLGRTHSVRIIIETMGVPPDSPQMTPGKKSYAGPPPKVTTAKKRTFFVEYHFPVGFSESGLGKTALITEVVRLASSKITDGKVKFQQRFVFPVQFGGPMIEHWWNSNLTFQIYVKKTPQKKPEVIGSVSLSLRAVIQSELLSFSDQLPVQQENGQSPFGPLKVTMELITDNKDFTGINTKLSGNTHYTPLCAPTSPNKALPELNQDMTCTKNPQNLNQIHEETAKKAQNLVLPNRKSPSPVAPHPSTFVATPASHNLVNQTNGTTKESALLLHVLLMVPDGKDFISGESEKQSPCNVYLNCKLFSTEEVTRSVIAWGTTQPVFNFSQVIPVSLSSKYLERLKNNVMVIETWNKVRSPGQDKLLGLVKLPLHQFYMSFKDAKISRLLLDAQYPVVAVDSYMPVIDVFSGHQNGSLRVFLAMGSSNQIMALQRLKNEEGTLPPFSPRPAHFLDQPTAASVAMAEDRGNGLMEHCFEIHIEMVKGLAPLQATVWGEADCYVQYYFPVQHSQSSVLKGPEFLENGITLKPFRTATTLCVPDPIFNSEHHHSLLLPAEVPVQRLLLSAFSAQGLVPGGGVQFEIWCRYYYPNVRDQKVAKGTLPLSRICAMVTTQHREDVGIQTFNLPLTPRIENRKELRNQSSGLLDVGLRYRRSAAAEGVLAARTVSISVQIIRACGLQAAAKALAEREPALQFSATVGVNASVTTHLSFLPQGEQRRTHPVACSFCPEFSHHVEFTCNLVTQHCSGEACFLAELLEFAEVIFAVYHENTKSASDIISIESCKEYLLGVVKVPTKELLIKRSGITGWYPIILPEDGGLPHGLELMQKIVGGLEHLGWSFENSLKDFVRMDEGEPATVTISTPRLWLPIHCVLLAGHNHIHKNTYCYLRYKFYDHEAFWTPLKKPKESVNKKQIMVTFKASKRAEVTRGPSLLWYFREERLEIQVWRAYGNDSVERPHQTDSWIGSAYVDLARLGERSARTLTVSGVYPLFGRNASNLSGAALRVHVVLSSLSSHLEPTHELDSMDCSSHSESEQLPRRNDEVQLSPPEVISCHQKSPASTQVPCSSTTAEVRLTQEGPADLDGTFAVSILVERAMHLSLKGSPLTERKVSIPSCCVSFATADESSPVYTQVVENTDSPIWNFQQQSRLSKELLLDPQQTLVFKVWHKGDEERVIGFASVDLSPLLSGFQFVCGWYNITDFSGECQGQIKVAVSPLESLIHFKEERQARRGVETSKSLIPIYSPFSFPASDTYAAFSSHMARQTLDQLAHASSKELDFSSPGRSDTTRSQASRHEEHVQNIRRFHESLHLQGEAPLPCDDKLTTSPLSSQT

SEQ ID NO: 5354 - protein, 376 aa, Homo sapiens
MLTFLQQLRVDWPAASERASSHTLRSHALEELTSANDGRTLSPGILGRLCLKELVEEQGRTAGYDPNLDNCLVTEDLLSVLAELQEALWHWPEDSHPGLAGASDTGTGGCLVVHVVSCEEEFQQQKLDLLWQKLVDKAPLRQKHLICGPVKVAGAPGTLMTAPEYYEFRHTQVCKASALKHGGDLAQDPAWTEIFGVLSVATIKFEMLSTAPQSQLFLALADSSISTKGTKSGTFVMYNCARLATLFESYKCSMEQGLYPTFPPVSSLDFSLLHDEGEWLLLFNSILPFPDLLSRTAVLDCTAPGLHIAVRTEMICKFLVQLSMDFSSYYNRVHILGEPRPHLFGQMFVRLQLLRAVREVLHTGLAMLGLPPLSHI

SEQ ID NO: 5355 - protein, 523 aa, Homo sapiens
MNQPCNSMEPRVMDDDMLKLAVGDQGPQEEAGQLAKQEGILFKDVLSLQLDFRNILRIDNLWQFENLRKLQLDNNIIEKIEGLENLAHLVWLDLSFNNIETIEGLDTLVNLEDLSLFNNRISKIDSLDALVKLQVLSLGNNRIDNMMNIIYLRRFKCLRTLSLSRNPISEAEDYKMFICAYLPDLMYLDYRRIDDHTKKLAEAKHQYSIDELKHQENLMQAQLEDEQAQREELEKHKTAFVEHLNGSFLFDSMYAEDSEGNNLSYLPGVGELLETYKDKFVIICVNIFEYGLKQQEKRKTELDTFSECVREAIQENQEQGKRKIAKFEEKHLSSLSAIREELELPNIEKMILECSADISELFDALMTLEMQLVEQLEETINMFERNIVDMVGLFIENVQSLMAQCRDLENHHHEKLLEISISTLEKIVEGDLDEDLPNDLRALFVDKDTIVNAVGASHDIHLLKIDNREDELVTRINSWCTRLIDRIHKDEIMRNRKRVKEINQYIDHMQSELDNLECGDILD

SEQ ID NO: 5356 - protein, 559 aa, Homo sapiens
MKVITCEIAWHNKEPVYSLDFQHGTAGRIHRLASAGVDTNVRIWKVEKGPDGKAIVEFLSNLARHTKAVNVVRFSPTGEILASGGDDAVILLWKVNDNKEPEQIAFQDEDEAQLNKENWTVVKTLRGHLEDVYDICWATDGNLMASASVDNTAIIWDVSKGQKISIFNEHKSYVQGVTWDPLGQYVATLSCDRVLRVYSIQKKRVAFNVSKMLSGIGAEGEARSYRMFHDDSMKSFFRRLSFTPDGSLLLTPAGCVESGENVMNTTYVFSRKNLKRPIAHLPCPGKATLAVRCCPVYFELRPVVETGVELMSLPYRLVFAVASEDSVLLYDTQQSFPFGYVSNIHYHTLSDISWSSDGAFLAISSTDGYCSFVTFEKDELGIPLKEKPVLNMRTPDTAKKTKSQTHRGSSPGPRPVEGTPASRTQDPSSPGTTPPQARQAPAPTVIRDPPSITPAVKSPLPGPSEEKTLQPSSQNTKAHPSRRVTLNTLQAWSKTTPRRINLTPLKTDTPPSSVPTSVISTPSTEEIQSETPGDAQGSPPELKRPRLDENKGGTESLDP

SEQ ID NO: 5357 - protein, 508 aa, Homo sapiens
MADGQVAELLLRRLEASDGGLDSAELAAELGMEHQAVVGAVKSLQALGEVIEAELRSTKHWELTAEGEEIAREGSHEARVFRSIPPEGLAQSELMRLPSGKVGFSKAMSNKWIRVDKSAADGPRVFRVVDSMEDEVQRRLQLVRGGQAEKLGEKERSELRKRKLLAEVTLKTYWVSKGSAFSTSISKQETELSPEMISSGSWRDRPFKPYNFLAHGVLPDSGHLHPLLKVRSQFRQIFLEMGFTEMPTDNFIESSFWNFDALFQPQQHPARDQHDTFFLRDPAEALQLPMDYVQRVKRTHSQGGYGSQGYKYNWKLDEARKNLLRTHTTSASARALYRLAQKKPFTPVKYFSIDRVFRNETLDATHLAEFHQIEGVVADHGLTLGHLMGVLREFFTKLGITQLRFKPAYNPYTEPSMEVFSYHQGLKKWVEVGNSGVFRPEMLLPMGLPENVSVIAWGLSLERPTMIKYGINNIRELVGHKVNLQMVYDSPLCRLDAEPRPPPTQEAA

SEQ ID NO: 5358 - protein, 400 aa, Homo sapiens
MSSPLASLSKTRKVPLPSEPMNPGRRGIRIYGDEDEVDMLSDGCGSEEKISVPSCYGGIGAPVSRQGDSLAPPEVDFDRLLASLQDLSELVVEGDTQVTPVPGGARLRTLEPIPLKLYRNGIMMFDGPFQPFYDPSTQRCLRDILDGFFPSELQRLYPNGVPFKVSDLRNQVYLEDGLDPFPGEGRVVGRQLMHKALDRVEEHPGSRMTAEKFLNRLPKFVIRQGEVIDIRGPIRDTLQNCCPLPARIQEIVVETPTLAAERERSQESPNTPAPPLSMLRIKSENGEQAFLLMMQPDNTIGDVRALLAQARVMDASAFEIFSTFPPTLYQDDTLTLQAAGLVPKAALLLRARRAPKSSLKFSPGPCPGPGPGPSPGPGPGPSPGPGPGPSPCPGPSPSPQ

SEQ ID NO: 5359 - protein, 449 aa, Homo sapiens
MASALRPPRVPKPKGVLPSHYYESFLEKKGPCDRDYKKFWAGLQGLTIYFYNSNRDFQHVEKLNLGAFEKLTDEIPWGSSRDPGTHFSLILRDQEIKFKVETLECREMWKGFILTVVELRVPTDLTLLPGHLYMMSEVLAKEEARRALETPSCFLKVSRLEAQLLLERYPECGNLLLRPSGDGADGVSVTTRQMHNGTHVVRHYKVKREGPKYVIDVEQPFSCTSLDAVVNYFVSHTKKALVPFLLDEDYEKVLGYVEADKENGENVWVAPSAPGPGPAPCTGGPKPLSPASSQDKLPPLPPLPNQEENYVTPIGDGPAVDYENQDVASSSWPVILKPKKLPKPPAKLPKPPVGPKPVEKGFHHVAQAGLELLTSSDPPTSASQSAGITGVSHHTWPHLSSLPEPKVFNGGLGRKLPVSSAQPLFPTAGLADMTAELQKKLEKRRALEH

SEQ ID NO: 5360 - protein, 412 aa, Homo sapiens
MDPIRSFCGKLRSLASTLDCETARLQRALDGEESDFEDYPMRILYDLHSEVQTLKDDVNILLDKARLENQEGIDFIKATKVLMEKNSMDIMKIREYFQKYGYSPRVKKNSVHEQEAINSDPELSNCENFQKTDVKDDLSDPPVASSCISEKSPRSPQLSDFGLERYIVSQVLPNPPQAVNNYKEEPVIVTPPTKQSLVKVLKTPKCALKMDDFECVTPKLEHFGISEYTMCLNEDYTMGLKNARNNKSEEAIDTESRLNDNVFATPSPIIQQLEKSDAEYTNSPLVPTFCTPGLKIPSTKNSIALVSTNYPLSKTNSSSNDLEVEDRTSLVLNSDTCFENLTDPSSPTISSYENLLRTPTPPEVTKIPEDILQLLSKYNSNLATPIAIKAVPPSKRFLKHGQNIRDVSNKEN

SEQ ID NO: 5361 - protein, 860 aa, Homo sapiens
MTEGTKKTSKKFKFFKFKGFGSLSNLPRSFTLRRSSASISRQSHLEPDTFEATQDDMVTVPKSPPAYARSSDMYSHMGTMPRPSIKKAQNSQAARQAQEAGPKPNLVPGGVPDPPGLEAAKEVMVKATGPLEDTPAMEPNPSAVEVDPIRKPEVPTGDVEEERPPRDVHSERAAGEPEAGSDYVKFSKEKYILDSSPEKLHKELEEELKLSSTDLRSHAWYHGRIPREVSETLVQRNGDFLIRDSLTSLGDYVLTCRWRNQALHFKINKVVVKAGESYTHIQYLFEQESFDHVPALVRYHVGSRKAVSEQSGAIIYCPVNRTFPLRYLEASYGLGQGSSKPASPVSPSGPKGSHMKRRSVTMTDGLTADKVTRSDGCPTSTSLPRPRDSIRSCALSMDQIPDLHSPMSPISESPSSPAYSTVTRVHAAPAAPSATALPASPVARRSSEPQLCPGSAPKTHGESDKGPHTSPSHTLGKASPSPSLSSYSDPDSGHYCQLQPPVRGSREWAATETSSQQARSYGERLKELSENGAPEGDWGKTFTVPIVEVTSSFNPATFQSLLIPRDNRPLEVGLLRKVKELLAEVDARTLARHVTKVDCLVARILGVTKEMQTLMGVRWGMELLTLPHGRQLRLDLLERFHTMSIMLAVDILGCTGSAEERAALLHKTIQLAAELRGTMGNMFSFAAVMGALDMAQISRLEQTWVTLRQRHTEGAILYEKKLKPFLKSLNEGKEGPPLSNTTFPHVLPLITLLECDSAPPEGPEPWGSTEHGVEVVLAHLEAARTVAHHGGLYHTNAEVKLQGFQARPELLEVFSTEFQMRLLWGSQGASSSQARRYEKFDKVLTALSHKLEPAVRSSEL

SEQ ID NO: 5362 - protein, 190 aa, Homo sapiens
MTVPWRPGKRRITYKEEEDLTLQPRPASSAPESLVGLQEGKSTEQGNHDQLKELYSAGNLTVLATDPLLHQDPVQLDFHFRLTSQTSAHWHGLLCDRRLFLDIPYQALDQGNRESLTATLEYVEEKTNVDSVFVNFQNDRNDRGALLRAFSYMGFEVVRPDHPALPPLDNVIFMVYPLERDVGHLPSEPP

SEQ ID NO: 5363 - protein, 508 aa, Homo sapiens
MATDWLGSIVSINCGDSLGVYQGRVSAVDQVSQTISLTRPFHNGVKCLVPEVTFRAGDITELKILEIPGPGDNQHFGDLHQTELGPSGAGCQVGINQNGTGKFVKKPASSSSAPQNIPKRTDVKSQDVAVSPQQQQCSKSYVDRHMESLSQSKSFRRRHNSWSSSSRHPNQATPKKSGLKNGQMKNKDDECFGDDIEEIPDTDFDFEGNLALFDKAAVFEEIDTYERRSGTRSRGIPNERPTRYRHDENILESEPIVYRRIIVPHNVSKEFCTDSGLVVPSISYELHKKLLSVAEKHGLTLERRLEMTGVCASQMALTLLGGPNRLNPKNVHQRPTVALLCGPHVKGAQGISCGRHLANHDVQVILFLPNFVKMLESITNELSLFSKTQGQQVSSLKDLPTSPVDLVINCLDCPENVFLRDQPWYKAAVAWANQNRAPVLSIDPPVHEVEQGIDAKWSLALGLPLPLGEHAGRIYLCDIGIPQQVFQEVGINYHSPFGCKFVIPLHSA

SEQ ID NO: 5364 - protein, 384 aa, Homo sapiens
MGRWCQTVARGQRAASAPSRAGALLLLLLLLRSAGCWGAGEAPGALSTADPADQSVQCVPKATCPSSRPRLLWQTPTTQTLPSTTMETQFPVSEGKVDPYRSCGFSYEQDPTLRDPEAVARRWPWMVSVRANGTHICAGTIIASQWVLTVAHCLIWRDVIYSVRVGSPWIDQMTQTASDVPVLQVIMHSRYRAQRFWSWVGQANDIGLLKLKQELKYSNYVRPICLPGTDYVLKDHSRCTVTGWGLSKADGMWPQFRTIQEKEVIILNNKECDNFYHNFTKIPTLVQIIKSQMMCAEDTHREKFCYELTGEPLVCSMEGTWYLVGLVSWGAGCQKSEAPPIYLQVSSYQHWIWDCLNGQALALPAPSRTLLLALPLPLSLLAAL

SEQ ID NO: 5365 - protein, 249 aa, Homo sapiens
MVDRLANSEANTRRISIVENCFGAAGQPLTIPGRVLIGEGVLTKLCRKKPKARQFFLFNDILVYGNIVIQKKKYNKQHIIPLENVTIDSIKDEGDLRNGWLIKTPTKSFAVYAATATEKSEWMNHINKCVTDLLSKSGKTPSNEHAAVWVPDSEATVCMRCQKAKFTPVNRRHHCRKCGFVVCGPCSEKRFLLPSQSSKPVRICDFCYDLLSAGDMATCQPARSDSYSQSLKSPLNDMSDDDDDDDSSD

SEQ ID NO: 5366 - protein, 914 aa, Homo sapiens
MGDSRDLCPHLDSIGEVTKEDLLLKSKGTCQSCGVTGPNLWACLQVACPYVGCGESFADHSTIHAQAKKHNLTVNLTTFRLWCYACEKEVFLEQRLAAPLLGSSSKFSEQDSPPPSHPLKAVPIAVADEGESESEDDDLKPRGLTGMKNLGNSCYMNAALQALSNCPPLTQFFLECGGLVRTDKKPALCKSYQKLVSEVWHKKRPSYVVPTSLSHGIKLVNPMFRGYAQQDTQEFLRCLMDQLHEELKEPVVATVALTEARDSDSSDTDEKREGDRSPSEDEFLSCDSSSDRGEGDGQGRGGGSSQAETELLIPDEAGRAISEKERMKDRKFSWGQQRTNSEQVDEDADVDTAMAALDDQPAEAQPPSPRSSSPCRTPEPDNDAHLRSSSRPCSPVHHHEGHAKLSSSPPRASPVRMAPSYVLKKAQVLSAGSRRRKEQRYRSVISDIFDGSILSLVQCLTCDRVSTTVETFQDLSLPIPGKEDLAKLHSAIYQNVPAKPGACGDSYAAQGWLAFIVEYIRRFVVSCTPSWFWGPVVTLEDCLAAFFAADELKGDNMYSCERCKKLRNGVKYCKVLRLPEILCIHLKRFRHEVMYSFKINSHVSFPLEGLDLRPFLAKECTSQITTYDLLSVICHHGTAGSGHYIAYCQNVINGQWYEFDDQYVTEVHETVVQNAEGYVLFYRKSSEEAMRERQQVVSLAAMREPSLLRFYVSREWLNKFNTFAEPGPITNQTFLCSHGGIPPHKYHYIDDLVVILPQNVWEHLYNRFGGGPAVNHLYVCSICQVEIEALAKRRRIEIDTFIKLNKAFQAEESPGVIYCISMQWFREWEAFVKGKDNEPPGPIDNSRIAQVKGSGHVQLKQGADYGQISEETWTYLNSLYGGGPEIAIRQSVAQPLGPENLHGEQKIEAETRAV

SEQ ID NO: 5367 - protein, 445 aa, Homo sapiens
MRAARRGLHCAGAERPRRRGRLWDSSGVPQRQKRPGPWRTQTQEQMSRDVCIHTWPCTYYLEPKRRWVTGQLSLTSLSLRFMTDSTGEILVSFPLSSIVEIKKEASHFIFSSITILEKGHAKHWFSSLRPSRNVVFSIIEHFWRELLLSQPGAVADASVAARGEELTGLMAGSQKRLEDTARVLHHQGQQLDSVMRGLDKMESDLEVADRLLTELESPAWWPFSSKLWKTPPETKPREDVSMTSCEPFGKEGILIKIPAVISHRTESHVKPGRLTVLVSGLEIHDSSSLLMHRFEREDVDDIKVHSPYEISIRQRFIGKPDMAYRLISAKMPEVIPILEVQFSKKMELLEDALVLRSARTSSPAEKSCSVWHAASGLMGRTLHREPPAGDQEGTALHLQTSLPALSEADTQELTQGFRPMSLSTQTVLVMLCSESAGALWRQRLS

SEQ ID NO: 5368 - protein, 631 aa, Homo sapiens
MAIVQTLPVPLEPAPEAATAPQAPVMGSVSSLISGRPCPGGPAPPRHHGPPGPTFFRQQDGLLRGGYEAQEPLCPAVPPRKAVPVTSFTYINEDFRTESPPSPSSDVEDAREQRAHNAHLRGPPPKLIPVSGKLEKNMEKILIRPTAFKPVLPKPRGAPSLPSFMGPRATGLSGSQGSLTQLFGGPASSSSSSSSSSAADKPLAFSGWASGCPSGTLSDSGRNSLSSLPTYSTGGAEPTTSSPGGHLPSHGSGRGALPGPARGVPTGPSHSDSGRSSSSKSTGSLGGRVAGGLLGSGTRASPDSSSCGERSPPPPPPPPSDEALLHCVLEGKLRDREAELQQLRDSLDENEATMCQAYEERQRHWQREREALREDCAAQAQRAQRAQQLLQLQVFQLQQEKRQLQDDFAQLLQEREQLERRCATLEREQRELGPRLEETKWEVCQKSGEISLLKQQLKESQAELVQKGSELVALRVALREARATLRVSEGRARGLQEAARARELELEACSQELQRHRQEAEQLREKAGQLDAEAAGLREPPVPPATADPFLLAESDEASATANPVHRRFQPTPARGAGKKKGLPPLHIPPDPKARESQMAPAAPDVPAHIGGQGRAWARFPGLSSAASLLE

SEQ ID NO: 5369 - protein, 490 aa, Homo sapiens
MNGALDHSDQPDPDAIKMFVGQIPRSWSEKELKELFEPYGAVYQINVLRDRSQNPPQSKGCCFVTFYTRKAALEAQNALHNIKTLPGMHHPIQMKPADSEKSNAVEDRKLFIGMVSKKCNENDIRVMFSPFGQIEECRILRGPDGLSRGCAFVTFSTRAMAQNAIKAMHQSQTMEGCSSPIVVKFADTQKDKEQRRLQQQLAQQMQQLNTATWGNLTGLGGLTPQYLALLQQATSSSNLGAFSGIQQMAGMNALQLQNLATLAAAAAAAQTSATSTNANPLSTTSSALGALTSPVAASTPNSTAGAAMNSLTSLGTLQGLAGATVGLNNINALAVAQMLSGMAALNGGLGATGLTNGTAGTMDALTQAYSGIQQYAAAALPTLYSQSLLQQQSAAGSQKEGPEGANLFIYHLPQEFGDQDILQMFMPFGNVISAKVFIDKQTNLSKCFGFVSYDNPVSAQAAIQAMNGFQIGMKRLKVQLKRSKNDSKPY

SEQ ID NO: 5370 - protein, 208 aa, Homo sapiens
MAASVEQREGTIQVQGQALFFREALPGSGQARFSVLLLHGIRFSSETWQNLGTLHRLAQAGYRAVAIDLPGLKGEPPAQEPLLSQSRASFLAAVVDALELGPPVVISPSLSGMYSLPFLTAPGSQLPGFVPVAPICTDKINAANYASVKTPALIVYGDQDPMGQTSFEHLKQLPNHRVLIMKGAGHPCYLDKPEEWHTGLLDFLQGLQ

SEQ ID NO: 5371 - protein, 181 aa, Homo sapiens
MESRSVAQAGVQWCDLGSLQPPPPGFKQFSYFSLQSSWDYRYVPPCPANFVFLVEMGFLHVDQAGLKLLTSGIDFATRKIAKLLKPQKVIEQNGDSFTIHTNSSLRNYFVKFKVGEEFDEDNRGLDNRKCKSLVIWDNDRLTCIQKGEKKNRGWTHWIEGDKLHLEMFCEGQVCKQTFQRA

SEQ ID NO: 5372 - protein, 548 aa, Homo sapiens
MSASLNYKSFSKEQQTMDNLEKQLICPICLEMFTKPVVILPCQHNLCRKCASDIFQASNPYLPTRGGTTMASGGRFRCPSCRHEVVLDRHGVYGLQRNLLVENIIDIYKQESTRPEKKSDQPMCEEHEEERINIYCLNCEVPTCSLCKVFGAHKDCQVAPLTHVFQRQKSELSDGIAILVGSNDRVQGVISQLEDTCKTIEECCRKQKQELCEKFDYLYGILEERKNEMTQVITRTQEEKLEHVRALIKKYSDHLENVSKLVESGIQFMDEPEMAVFLQNAKTLLKKISEASKAFQMEKIEHGYENMNHFTVNLNREEKIIREIDFYREDEDEEEEEGGEGEKEGEGEVGGEAVEVEEVENVQTEFPGEDENPEKASELSQVELQAAPGALPVSSPEPPPALPPAADAPVTQGEVVPTGSEQTTESETPVPAAAETADPLFYPSWYKGQTRKATTNPPCTPGSEGLGQIGPPGSEDSNVRKAEVAAAAASERAAVSGKETSAPAATSQIGFEAPPLQGQAAAPASGSGADSEPARHIFSFSWLNSLNE

SEQ ID NO: 5373 - protein, 456 aa, Homo sapiens
MFPKFSLRSMFHGAGGGNDIQWCFSQVKGAVDDDVAEADIISTVEFNHSGELLATGDKGGRVVIFQQEQENKIQSHSRGEYNVYSTFQSHEPEFDYLKSLEIEEKINKIRWLPQKNAAQFLLSTNDKTIKLWKISERDKRPEGYNLKEEDGRYRDPTTVTTLRVPVFRPMDLMVEASPRRIFANAHTYHINSISINSDYETYLSADDLRINLWHLEITDRSFNIVDIKPANMEELTEVITAAEFHPNSCNTFVYSSSKGTIRLCDMRASALCDRHSKLFEEPEDPSNRSFFSEIISSISDVKFSHSGRYMMTRDYLSVKIWDLNMENRPVETYQVHEYLRSKLCSLYENDCIFDKFECCWNGSDSVVMTGSYNNFFRMFDRNTKRDITLEASRENNKAAVLKPRKVCASGKRKKDEISVDSLDFNKKILHTAWHPKENIIAVATTNNLYIFQDKVN

SEQ ID NO: 5374 - protein, 245 aa, Homo sapiens
MAGLELLSDQGYRVDGRRAGELRKIQARMGVFAQADGSAYIEQGNTKALAVVYGPHEIRGSRARALPDRALVNCQYSSATFSTGERKRRPHGDRKSCEMGLQLRQTFEAAILTQLHPRSQIDIYVQVLQADGGTYAACVNAATLAVLDAGIPMRDFVCACSAGFVDGTALADLSHVEEAAGGPQLALALLPASGQIALLEMDARLHEDHLERVLEAAAQAARDVHTLLDRVVRQHVREASILLGD

SEQ ID NO: 5375 - protein, 876 aa, Homo sapiens
MMADGAAAGAGGSPSLRELRARMVAAANEIAKERRKQDVVNRVATHSSNIRSTFKPVIDGSMLKNDIKQRLARERREEKRRQQDANKETQLLEKERKTKLQYEKQMEERQRKLKERKEKEEQRRIAAEEKRHQKDEAQKEKFTAILYRTLERRRLADDYQQKRWSWGGSAMANSESKTANKRSASTEKLEQGTSALIRQMPLSSAGLQNSVAKRKTDKERSSSLNRRDSNLHSSTDKEQAERKPRVTGVTNYVMQYVTVPLRKCTSDELRAVMFPMSTMKIPPQTKVEESPLEKVETPPKASVDAPPQVNVEVFCNTSMEASPKAGVGMAPEVSTDSFPVVSVDVSPVVSTYDSEMSMDASPELSIEALPKVDLETVPKVSIVASPEASLEAPPEVSLEALPEVSVEAAPEGSLEAPPKGSAEVAPKESVKGSPKESMEASPEAMVKASPKTSLEASMEASPKAKARDAPKKSEMDKQALIPIAKKRLSSYTECYKWSSSPENACGLPSPISTNRQIQKNCPPSPLPLISKQSPQTSFPYKIMPIQHTLSVQSASSTVKKKKETVSKTTNRCEALSQRHMIYEESGNKSTAGIMNAEAATKILTELRRLAREQREKEEEERQREEMQQRVIKKSKDMAKEAVGGQAEDHLKLKDGQQQNETKKKKGWLDQEDQEAPLQKGDAKIKAQEEADKRKKEHERIMLQNLQERLERKKRIEEIMKRTRKTDVNASKVTETSSHDIYEEAEADNEESDKDSLNEMFPSAILNGTGSPTKFKMPFNNAKKMTHKLVFLEDGTSQVRKEPKTYFNGDLKNFRQKSMKDTSIQEVVSRPSSKRMTSHTTKTRKADETNTTSRSSAQTKSEGFHDILPKSSDTFRQ

SEQ ID NO: 5376 - protein, 2096 aa, Homo sapiens
MCSTPGMPAPGASLALRVSFVDVHPDVIPVQLWGLVGERRGEYLRLSREIQEAAATRGQWALGSASASPGELCLVQVGLLWHRCRVVSRQAQESRVFLLDEGRTITAGAGSLAPGRREFFNLPSEVLGCVLAGLVPAGCGAGSGEPPQHWPADAVDFLSNLQGKEVHGCVLDVLLLHRLVLLEVPDVFQQMRELGLARRVPDSLFRSLLERYLTAATASVGSGVPVLSRVPLKQKQPGLDYFYPQLQLGVTEAVVITQVCHPHRIHCQLRSVSQEIHRLSESMAQVYRGSTGTGDENSTSATWEEREESPDKPGSPCASCGLDGHWYRALLLETFRPQRCAQVLHVDYGRKELVSCSSLRYLLPEYFRMPVVTYPCALYGLWDGGRGWSRSQVGDLKTLILGKAVNAKIEFYCSFEHVYYVSLYGEDGINLNRVFGVQSCCLADRVLQSQATEEEEPETSQSQSPAEEVDEEISLPALRSIRLKMNAFYDAQVEFVKNPSEFWIRLRKHNVTFSKLMRRMCGFYSSASKLDGVVLKPEPDDLCCVKWKENGYYRAIVTKLDDKSVDVFLVDRGNSENVDWYDVRMLLPQFRQLPILAVKCTLADIWPLGKTWSQEAVSFFKKTVLHKELVIHILDKQDHQYVIEILDESRTGEENISKVIAQAGYAKYQEFETKENILVNAHSPGHVSNHFTTESNKIPFAKTGEGEQKAKRENKTTSVSKALSDTTVVTNGSTELVVQEKVKRASVYFPLMQNCLEIKPGSSSKGELEVGSTVEVRVSYVENPGYFWCQLTRNIQGLKTLMSDIQYYCKNTAAPHQRNTLACLAKRTVNRQWSRALISGIQSVEHVNVTFVDYGDREMVSVKNIYSISEEFLKVKAQAFRCSLYNLIQPVGQNPFVWDVKAIQAFNEFIDNAWQKNLELKCTIFALASINEELFNIVDLLTPFQSACHFLVEKRLARPVKLQKPLESSVQLHSYFYSTHDMKIGSEELVYITHIDDPWTFYCQLARNANILEQLSCSITQLSKVLLNLKTSPLNPGTLCLAKYTDGNWYRGIVIEKEPKKVFFVDFGNIYVVTSDDLLPIPSDAYDVLLLPMQAVRCSLSDIPDHIPEEVVVWFQETILDKSLKALVVAKDPDGTLIIELYGDNIQISASINKKLGLLSYKDRIRKKESEVLCSTTETLEEKNENMKLPCTEYLSKSVGYKLPNKEILEESYKPQINSSYKELKLLQSLTKTNLVTQYQDSVGNKNSQVFPLTTEKKEEISAETPLKTARVEATLSERKIGDSCDKDLPLKFCEFPQKTIMPGFKTTVYVSHINDLSDFYVQLIEDEAEISHLSERLNSVKTRPEYYVGPPLQRGDMICAVFPEDNLWYRAVIKEQQPNDLLSVQFIDYGNVSVVHTNKIGRLDLVNAILPGLCIHCSLQGFEVPDNKNSKKMMHYFSQRTSEAAIRCEFVKFQDRWEVILADEHGIIADDMISRYALSEKSQVELSTQVIKSASSKSVNKSDIDTSVFLNWYNPEKKMIRAYATVIDGPEYFWCQFADTEKLQCLEVEVQTAGEQVADRRNCIPCPYIGDPCIVRYREDGHYYRALITNICEDYLVSVRLVDFGNIEDCVDPKALWAIPSELLSVPMQAFPCCLSGFNISEGLCSQEGNDYFYEIITEDVLEITILEIRRDVCDIPLAIVDLKSKGKSINEKMEKYSKTGIKSALPYENIDSEIKQTLGSYNLDVGLKKLSNKAVQNKIYMEQQTDELAEITEKDVNIIGTKPSNFRDPKTDNICEGFENPCKDKIDTEELEGELECHLVDKAEFDDKYLITGFNTLLPHANETKEILELNSLEVPLSPDDESKEFLELESIELQNSLVVDEEKGELSPVPPNVPLSQECVTKGAMELFTLQLPLSCEAEKQPELELPTAQLPLDDKMDPLSLGVSQKAQESMCTEDMRKSSCVESFDDQRRMSLHLHGADCDPKTQNEMNICEEEFVEYKNRDAISALMPLFSEEESSDGSKHNNGLPDHISAQLQNTYTLKAFTVGSKCVVWSSLRNTWSKCEILETAEEGTRVLNLSNGMEEIVNPENVWNGIPKLDKSPPEKRGLEVMEI

SEQ ID NO: 5377 - protein, 229 aa, Homo sapiens
MGKSCKVVVCGQASVGKTSILEQLLYGNHVVGSEMIETQEDIYVGSIETDRGVREQVRFYDTRGLRDGAELPRHCFSCTDGYVLVYSTDSRESFQRVELLKKEIDKSKDKKEGLTLPPRLECSGMITAHCSLNLPRLRWSSCLSPLLRLQVTIVVLGNKCDLQEQRRVDPDVAQHWAKSEKVKLWEVSVADRRSLLEPFVYLASKMTQPQSKSAFPLSRKNKGSGSLDG

SEQ ID NO: 5378 - protein, 803 aa, Homo sapiens
MESGPRAELGAGAPPAVVARTPPEPRPSPEGDPSPPPPPMSALVPDTPPDTPPAMKNATSSKQLPLEPESPSGQVGPRPAPPQEESPSSEAKSRGPTPPAMGPRDARPPRRSSQPSPTAVPASDSPPTKQEVKKAGERHKLAKERREERAKYLAAKKAVWLEKEEKAKALREKQLQERRRRLEEQRLKAEQRRAALEERQRQKLEKNKERYEAAIQRSVKKTWAEIRQQRWSWAGALHHSSPGHKTNRSLQLSAWESSIVDRLMTPTLSFLARSRSAVTLPRNGRDQGRGCDPGRGPTWGRAGASLARGPQPDRTHPSAAVPVCPRSASASPLTPCSVTRSVHRCAPAGERGERRKPNAGGSPAPVRRRPEASPVQKKEKKDKERENEKEKSALARERSLKKRQSLPASPRARLSASTASELSPKSKARPSSPSTSWHRPASPCPSPGPGHTLPPKPPSPRGTTASPKGRVRRKEEAKESPSAAGPEDKSQSKRRASNEKESAAPASPAPSPAPSPTPAPPQKEQPPAETPTDAAVLTSPPAPAPPVTPSKPMAGTTDREEATRLLAEKRRQAREQREREEQERRLQAERDKRMREEQLAREAEARAEREAEARRREEQEAREKAQAEQEEQERLQKQKEEAEARSREEAERQRLEREKHFQQQEQERQERRKRLEEIMKRTRKSEVSETKKQDSKEANANGSSPEPVKAVEARSPGLQKEAVQKEEPIPQEPQWSLPSKELPASLVNGLQPLPAHQENGFSTNGPSGDKSLSRTPETLLPFAEAEAFLKKAVVQSPQVTEVL

SEQ ID NO: 5379 - protein, 374 aa, Homo sapiens
MRAPMLQKQQAPRMDTPPPEERLEKQNEKLNNQEEETEFKELDGLREALANLRGLSEEERSEKAMLRSRIEEQSQLICILKRRSDEALERCQILELLNAELEEKMMQEAEKLKAQGEYSRKLEERFMTLAANHELMLRFKDEYKSENIKLREENEKLRLENSSLFSQALKDEEAKVLQLTVRCEALTGELETLKERCAQDACQAQAREKELLELQSQQACTHTKETEQLRSQLQTLKQQHQQAVEQIAKAEETHSSLSQELQARLQTVTREKEELLQLSIERGKVLQNKQAEICQLEEKLEIANEDRKHALERFEQEAVAVDSNLRVRELQRKVDGIQKAYDELRLQSEAFKKHSLDLLSKERELNGKLRHLSP

SEQ ID NO: 5380 - protein, 194 aa, Homo sapiens
MEDGLLEIMTKDGGDMPAPLEVSTVPAVGDVISGEYNGGMKELMEHLKAQLQALFEDVRAMRGALDEQASHIQVLSDDVCANQRAIVSMCQIMTTAPRQGGLGVVGGKGSFQSDPQEPETPSPGIGDSGLLGRDPEDEEEEEEEKEMPSPATPSSHCERPESPCAGLLGGDGPLVEPLDMPDITLLQLEGEASL

SEQ ID NO: 5381 - protein, 426 aa, Homo sapiens
MAHLRGFANQHSRVDPEELFTKLDRIGKGSFGEVYKGIDNHTKEVVAIKIIDLEEAEDEIEDIQQEITVLSQCDSPYITRYFGSYLKSTKLWIIMEYLGGGSALDLLKPGPLEETYIATILREILKGLDYLHSERKIHRDIKAANVLLSEQGDVKLADFGVAGQLTDTQIKRNTFVGTPFWMAPEVIKQSAYDFKADIWSLGITAIELAKGEPPNSDLHPMRVLFLIPKNSPPTLEGQHSKPFKEFVEACLNKDPRFRPTAKELLKHKFITRYTKKTSFLTELIDRYKRWKSEGHGEESSSEDSDIDGEAEDGEQGPIWTFPPTIRPSPHSKLHKGTALHSSQKPAEPVKRQPRSQCLSTLVRPVFGELKEKHKQSGGSVGALEELENAFSLAEESCPGISDKLMVHLVERVQRFSHNRNHLTSTR

SEQ ID NO: 5382 - protein, 449 aa, Homo sapiens
MMLSTEGREGFVVKVRGLPWSCSADEVMRFFSDCKIQNGTSGIRFIYTREGRPSGEAFVELESEEEVKLALKKDRETMGHRYVEVFKSNSVEMDWVLKHTGPNSPDTANDGFVRLRGLPFGCSKEEIVQFFSGLEIVPNGMTLPVDFQGRSTGEAFVQFASQEIAEKALKKHKERIGHRYIEIFKSSRAEVRTHYDPPRKLMAMQRPGPYDRPGAGRGYNSIGRGAGFERMRRGAYGGGYGGYDDYGGYNDGYGFGSDRFGRDLNYCFSGMSDHRYGDGGSSFQSTTGHCVHMRGLPYRATENDIYNFFSPLNPMRVHIEIGPDGRVTGEADVEFATHEDAVAAMAKDKANMQHRYVELFLNSTAGTSGGAYDHSYVELFLNSTAGASGGAYGSQMMGGMGLSNQSSYGGPASQQLSGGYGGGYGGQSSMSGYDQVLQENSSDYQSNLA

SEQ ID NO: 5383 - protein, 438 aa, Homo sapiens
MCPKNASYYGNRAATLMMLGRFREALGDAQQSVRLDDSFVRGHLREGKCHLSLGNAMAACRSFQRALELDHKNAQAQQEFKNANAVMEYEKIAETDFEKRDFRKVVFCMDRALEFAPACHRFKILKAECLAMLGRYPEAQSVASDILRMDSTNADALYVRGLCLYYEDCIEKAVQFFVQALRMAPDHEKACIACRNAKALKAKKEDGNKAFKEGNYKLAYELYTEALGIDPNNIKTNAKLYCNRGTVNSKLRKLDDAIEDCTNAVKLDDTYIKAYLRRAQCYMDTEQYEEAVRDYEKVYQTEKTKEHKQLLKNAQLELKKSKRKDYYKILGVDKNASEDEIKKAYRKRALMHHPDRHSGASAEVQKEEEKKFKEVGEAFTILSDPKKKTRYDSGQDLDEEGMNMGDFDPNNIFKAFFGGPGGFSFEASGPGNFFFQFG

SEQ ID NO: 5384 - protein, 54 aa, Homo sapiens
MPGKKARKNAQPSPARAPAELEVECATQLRRFGDKLNFRQKLLNLISKLFCSGT

SEQ ID NO: 5385 - protein, 467 aa, Homo sapiens
MASVAAARAVPVGSGLRGLQRTLPLVVILGATGTGKSTLALQLGQRLGGEIVSADSMQVYEGLDIITNKVSAQEQRICRHHMISFVDPLVTNYTVVDFRNRATALIEDIFARDKIPIVVGGTNYYIESLLWKVLVNTKPQEMGTEKVIDRKVELEKEDGLVLHKRLSQVDPEMAAKLHPHDKRKVARSLQVFEETGISHSEFLHRQHTEEGGGPLGGPLKFSNPCILWLHADQAVLDERLDKRVDDMLAAGLLEELRDFHRRYNQKNVSENSQDYQHGIFQSIGFKEFHEYLITEGKCTLETSNQLLKKGIEALKQVTKRYARKQNRWVKNRFLSRPGPIVPPVYGLEVSDVSKWEESVLEPALEIVQSFIQGHKPTATPIKMPYNEAENKRSYHLCDLCDRIIIGDREWAAHIKSKSHLNQLKKRRRLDSDAVNTIESQSVSPDHNKEPKEKGSPGQNDQELKCSV

SEQ ID NO: 5386 - protein, 185 aa, Homo sapiens
MGVNLTRSNKETVKHSDVLFLAVKPHIIPFILDEIGADVQARHIVVSCAAGVTISSVEKKLMAFQPAPKVIRCMTNTPVVVQEGATVYATGTHALVEDGQLLEQLMSSVGFCTEVEEDLIDAVTGLSGSGPAYQSMADQEKISPAALKKTLLDRVKLESPTVSTLTPSSPGKLLTRSLALGGKKD

SEQ ID NO: 5387 - protein, 319 aa, Homo sapiens [sequence omitted]

SEQ ID NO: 5388 - protein, 235 aa, Homo sapiens
MLSATRRACQLLLLHSLFPVPRMGNSASNIVSPQEALPGRKEQTPVAAKHHVNGNRTVEPFPEGTQMAVFGMGCFWGAERKFWVLKGVYSTQVGFAGGYTSNPTYKEVCSEKTGHAEVVRVVYQPEHMSFEELLKVFWENHDPTQGMRQGNDHGTQYRSAIYPTSAKQMEAALSSKENYQKVLSEHGFGPITTDIREGQTFYYAEDYHQQYLSKNPNGYCGLGGTGVSCPVGIKK

SEQ ID NO: 5389 - protein, 1290 aa, Homo sapiens
MSGPLEGADGGGDPRPGESFCPGGVPSPGPPQHRPCPGPSLADDTDANSNGSSGNESNGHESRGASQRSSHSSSSGNGKDSALLETTESSKSTNSQSPSPPSSSIAYSLLSASSEQDNPSTSGCSSEQSARARTQKELMTALRELKLRLPPERRGKGRSGTLATLQYALACVKQVQANQEYYQQWSLEEGEPCSMDMSTYTLEELEHITSEYTLQNQDTFSVAVSFLTGRIVYISEQAAVLLRCKRDVFRGTRFSELLAPQDVGVFYGSTAPSRLPTWGTGASAGSGLRDFTQEKSVFCRIRGGPDRDPGPRYQPFRLTPYVTKIRVSDGAPAQPCCLLIAERIHSGYEAPRIPPDKRIFTTRHTPSCLFQDVDERAAPLLGYLPQDLLGAPVLLFLHPEDRPLMLAIHKKILQLAGQPFDHSPIRFCARNGEYVTMDTSWAGFVHPWSRKVAFVLGRHKVRTAPLNEDVFTPPAPSPAPSLDTDIQELSEQIHRLLLQPVHSPSPTGLCGVGAVTSPGPLHSPGSSSDSNGGDAEGPGPPAPVTFQQICKDVHLVKHQGQQLFIESRARPQSRPRLPATGTFKAKALPCQSPDPELEAGSAPVQAPLALVPEEAERKEASSCSYQQINCLDSILRYLESCNLPSTTKRKCASSSSYTTSSASDDDRQRTGPVSVGTKKDPPSAALSGEGATPRKEPVVGGTLSPLALANKAESVVSVTSQCSFSSTIVHVGDKKPPESDIIMMEDLPGLAPGPAPSPAPSPTVAPDPAPDAYRPVGLTKAVLSLHTQKEEQAFLSRFRDLGRLRGLDSSSTAPSALGERGCHHGPAPPSRRHHCRSKAKRSRHHQNPRAEAPCYVSHPSPVPPSTPWPTPPATTPFPAVVQPYPLPVFSPRGGPQPLPPAPTSVPPAAFPAPLVTPMVALVLPNYLFPTPSSYPYGALQTPAEGPPTPASHSPSPSLPALAPSPPHRPDSPLFNSRCSSPLQLNLLQLEELPRAEGAAVAGGPGSSAGPPPPSAEAAEPEARLAEVTESSNQDALSGSSDLLELLLQEDSRSGTGSAASGSLGSGLGSGSGSGSHEGGSTSASITRSSQSSHTSKYFGSIDSSEAEAGAARGGAEPGDQVIKYVLQDPIWLLMANADQRVMMTYQVPSRDMTSVLKQDRERLRAMQKQQPRFSEDQRRELGAVHSWVRKGQLPRALDVMACVDCGSSTQDPGHPDDPLFSELDGLGLEPMEEGGGEQGSSGGGSGEGEGCEEAQGGAKASSSQDLAMEEEEEGRSSSSPALPTAGNCTS

SEQ ID NO: 5390 - protein, 673 aa, Homo sapiens
MEKAVNDGSHSEELFCHLKTISEKEDLPRCTSESHLSCLKQDILNEKTELEATLKEAELVTHSVELLLPLFKDTIEKINFENANLSALNLKISEQKEILIKELDTFKSVKLALEHLLRKRDYKQTGDNLSSMLLENLTDNESENTNLKKKVFEKEAHIQELSCLFQSEKANTLKANRFSQSVKVVHERLQIQIHKREAENDKLKEYVKSLETKIAKWNLQSRMNKNEAIVMKEASRQKTVALKKASKVYKQRLDHFTGAIEKLTSQIRDQEAKLSETISASNAWKSHYEKIVIEKTELEVQIETMKKQIINLLEDLKKMEDHGKNSCEEILRKVHSIEYENETLNLENTKLKLRFPCRITESKNMNILIVLDMLCYISSEKTTLAALKDEVVSVENELSELQEVEKKQKTLIEMYKTQVQKLQEAAEIVKSRCENLLHKNNQITKTKNKNVEKMRGQMESHLKELERVCDSLTAAERRLHECQESLQCCKGKCADQEHTIRELQGQVDGNHNLLTKLSLEEENCLIQLKCENLQQKLEQMDAENKELEKKLANQEECLKHSNLKFKEKSAEYTALARQLEAALEEGRQKVAEEIEKMSSRESALQIKILDLETELRKKNEEQNQLVCKMNSKAQHQEVCLKEVQNSLEKSENQNESIKNYLQFLKTSYVTMFE

SEQ ID NO: 5391 - protein, 265 aa, Homo sapiens
MDDKASVGKISVSSDSVSTLNSEDFVLVSRQGDETPSTNNGSDDEKTGLKIVGNGSEQQLQKELADVLMDPPMDDQPGEKELVKRSQLDGEGDGPLSNQLSASSTINPVPLVGLQKPEMSLPVKPGQGDSEASSPFTPVADEDSVVFSKLTYLGCASVNAPRSEVEALRMMSILRSQCQISLDVTLSVPNVSEGIVRLLDPQTNTEIANYPIYKILFCVRGHDGTPESDCFAFTESHYNAELFRIHVFRCEIQEAVSPQEKTLCK

SEQ ID NO: 5392 - protein, 211 aa, Homo sapiens
MWASLSLDHPSAKENQALRLIEMREENGNVPKTEQAGSLKPLRDTGKSNLKEKKANSKLKQIEKEYTQKLAKSSQIIAELQTTISSLKEENSQQQLAAERRLQDVRQKFEDEKKQLIRDNDQAIKVLQDELENRSNQVRCAEKKLQHKELESQEQITYIRQEYETKLKGLMPASLRQELEDTISSLKSQVNFLQKRASILQEELTTYQGRR

SEQ ID NO: 5393 - protein, 288 aa, Homo sapiens
MSSSMWYIMQSIQSKYSLSERLIRTIAAIRSFPHDNVEDLIRGGADVNCTHGTLKPLHCACMVSDADCVELLLEKGAEVNALDGYNRTALHYAAEKDEACVEVLLEYGANPNALDGNRDTPLHWAAFKNNAECVRALLESGASVNALDYNNDTPLSWAAMKGNLESVSILLDYGAEVRVINLIGQTPISRLVALLVRGLGTEKEDSCFELLHRAVGHFELRKNGTMPREVARDPQLCEKLTVLCSAPGTLKTLARYAVRRSLGLQYLPDAVKGLPLPASLKEYLLLLE

SEQ ID NO: 5394 - protein, 446 aa, Homo sapiens
MREIVHIQAGQCGNQIGTKFWEVISDEHGIDPAGGYVGDSALQLERINVYYNESSSQKYVPRAALVDLEPGTMDSVRSGPFGQLFRPDNFIFGQTGAGNNWAKGHYTEGAELVDAVLDVVRKECEHCDCLQGFQLTHSLGGGTGSGMGTLLISKIREEFPDRIMNTFSVMPSPKVSDTVVEPYNATLSVHQLVENTDETYCIDNEALYDICFRTLKLTTPTYGDLNHLVSATMSGVTTSLRFPGQLNADLRKLAVNMVPFPRLHFFMPGFAPLTSRGSQQYRALTVPELTQQMFDARNMMAACDPRHGRYLTVATVFRGPMSMKEVDEQMLAIQSKNSSYFVEWIPNNVKVAVCDIPPRGLKMASTFIGNSTAIQELFKRISEQFSAMFRRKAFLHWFTGEGMDEMEFTEAESNMNDLVSEYQQYQDATANDGEEAFEDEEEEIDG

SEQ ID NO: 5395 - protein, 263 aa, Homo sapiens
MLSSKGLTVVDVYQGWCGPCKPVVSLFQKMRIEVGLDLLHFALAEADRLDVLEKYRGKCEPTFLFYAIKDEALSDEDECVSHGKNNGEDEDMVSSERTCTLAIIKPDAVAHGKTDEIIMKIQEAGFEILTNEERTMTEAEVRLFYQHKAGEEAFEKLVHHMCSGPSHLLILTRTEGFEDVVTTWRTVMGPRDPNVARREQPESLRAQYGTEMPFNAVHGSRDREDADRELALLFPSLKFSDKDTEAPQGESSTQPRLKITDLD

SEQ ID NO: 5396 - protein, 362 aa, Homo sapiens
MLKNKGHSSKKDNLAVNAVALQDHILHDLQLRNLSVADHSKTQVQKKENKSLKRDTKAIIDTGLKKTTQCPKLEDSEKEYVLDPKPPPLTLAQKLGLIGPPPPPLSSDEWEKVKQRSLLQGDSVQPCPICKEEFELRPQVLLSCSHVFHKACLQAFEKFTNKKTCPLCRKNQYQTRVIHDGARLFRIKCVTRIQAYWRGCVVRKWYRNLRKTVPPTDAKLRKKFFEKKFTEISHRILCSYNTNIEELFAEIDQCLAINRSVLQQLEEKCGHEITEEEWEKIQVQALRRETHECSICLAPLSAAGGQRVGAGRRSREMALLSCSHVFHHACLLALEEFSVGDRPPFHACPLCRSCYQKKILEC

SEQ ID NO: 5397 - protein, 96 aa, Homo sapiens
MIEKMQGSRMDEQRCSFPPPLKTEEDYIPYPSVHEVLGREGPFPLILLPQFGGYWIEGTNHEITSIPETEPLQSPTTKVKLECNPTARIYRKHFLG

SEQ ID NO: 5398 - protein, 152 aa, Homo sapiens
MAGLPRRIIKETQRLLAEPVPGIKAEPDESNARYFHVVIAGPQDSPFEGGTFKLELFLPEEYPMAAPKVRFMTKIYHPNVDKLGRICLDILKDKWSPALQIRTVLLSIQALLSAPNPDDPLANDVAEQWKTNEAQAIETARAWTRLYAMNNI

SEQ ID NO: 5399 - protein, 1117 aa, Homo sapiens
MYRSSARSSVSSHRPKDDGGGGPRSGRSSGSSSGPARRSSPPPPPSGSSSRTPARRPRSPSGHRGRRASPSPPRGRRVSPSPPRARRGSPSPPRGRRLFPPGPAGFRGSSRGESRADYARDGRGDHPGDSGSRRRSPGLCSDSLEKSLRITVGNDHFCVSTPERRRLSDRLGSPVDNLEDMDRDDLTDDSVFTRSSQCSRGLERYISQEEGPLSPFLGQLDEDYRTKETFLHRSDYSPHISCHDELLRGTERNREKLKGYSIRSEERSREAKRPRYDDTVKINSMGGDHPSFTSGTRNYRQRRRSPSPRFLDPEFRELDLARRKREEEEERSRSLSQELVGVDGGGTGCSIPGLSGVLTASEPGYSLHRPEEVSVMPKKSILKKRIEVDIMEPSMQLESFSSSTSSSQDHPLYSGHPSLPLSGAIAAFASEIENKGTMVETALKEPQGNLYQWGPLPGIPKDNSPLREKFGSFLCHKDNLDLKAEGPERHTDFLLPHERASQDGSGFSRILSMLADSTSTQEKRRRSFPDIEDEEKFLYGDEEEDLKAESVPKPLGSSESEVMRQKASSLPSSAPAVKLESLEETNPEYAKIHDLLKTIGLDIGVAEISQLAARTQERLHGKKPSLRSSADRRSSVDRYFSADHCSSVDHRFSADRCSSVDHCFSADRRSSDPHRLESREAHHSNTHSPEVSHPHPPSPVDPYLLTKNSPPFLKSDHPVGHISGPEVVGSGFQSSVAVRCMLPSAPSAPIRLPHTAALSQFHMPRASQFAAARIPPNYQGPAIPPASFDAYRHYMAYAASRWPMYPTSQPSNHPVPEPHRIMPITKQATRSRPNLRVIPTVTPDKPKQKESLRGSIPAAQVPVQVSIPSLIRYNPEKISDEKNRASQKQKVIEEREKLKNDREARQKKMYYLRTELERLHKQQGEMLRKKRREKDGHKDPLLVEVSRLQDNIMKDIAELRQEAEEAEKKQSELDKVAQILGINIFDKSQKSLSDSREPTEKPGKAEKSKSPEKVSSFSNSSSNKESKVNNEKFRTKSPKPAESPQSATKQLDQPTAAYEYYDAGNHWCKDCNTICGTMFDFFTHMHNKKHTQGQFQKSSDFQKEGLQQTFLPPERQG

SEQ ID NO: 5400 - protein, 191 aa, Homo sapiens
MYVCLCVSVAKVTMADRAAAERACKDPNPIIDGRKANVNLAYLGAKPRIMQPGFAFGVQQLHPALIQRPFGIPAHYVYPQAFVQPGVVIPHVQPTAAAASTTPYIDYTGAAYAQYSAAAAAAAAAAAYDQYPYAASPAAAGYVTAGGYGYAVQQPITAAAPGTAAAAAAAAAAAAAFGQYQPQQLQTDRMQ

SEQ ID NO: 5401 - protein, 109 aa, Homo sapiens
MAGAPTVSLPELRSLLASGRARLFDVRSREEAAAGTIPGALNIPVSELESALQMEPAAFQALYSAEKPKLEDEHLVFFCQMGKRGLQATQLARSLGYTGYGEVWLLAGR

SEQ ID NO: 5402 - protein, 209 aa, Homo sapiens
MALLAEHLLKPLPADKQIETGPFLEAVSHLPPFFDCLGSPVFTPIKADISGNITKIKAVYDTNPAKFRTLQNILEVEKEMYGAEWPKVGATLALMWLKRGLRFIQVFLQSICDGERDENHPNLIRVNATKAYEMALKKYHGWIVQKIFQAALYAAPYKSDFLKALSKGQNVTEEECLEKIRLFLVNYTATIDVIYEMYTQMNAELNYKV

SEQ ID NO: 5403 - protein, 157 aa, Homo sapiens
MEEAQRKRTQLREAFEQLQAKKQMAMEKRRAVQNQWQLQQEKHLQHLAEVSAEVRERKTGTQQELDRVFQKLGNLKQQAEQERDKLQRYQTFLQLLYTLQGKLLFPEAEAEAENLPDDKPQQPTRPQEQSTGDTMGRDPGVSFKAVGLQPAGDVNLP

SEQ ID NO: 5404 - protein, 212 aa, Homo sapiens
MEVLRRSSVFAAEIMDAFDRSPTDKELVAQAKALGREYVHARLLRAGLSWSAPERAAPVPGRLAEVCAVLLRLGDELEMIRPSVYRNVARQLHISLQSEPVVTDAFLAVAGHIFSAGITWGKVVSLYAVAAGLAVDCVRQAQPAMVHALVDCLGEFVRKTLATWLRRRGGWTDVLKCVVSTDPGLRSHWLVAALCSFGRFLKAAFFVLLPER

SEQ ID NO: 5405 - protein, 715 aa, Homo sapiens
MSQSGAVSCCPGATNGSLGRSDGVAKMSPKDLFEQRKKYSNSNVIMHETSQYHVQHLATFIMDKSEAITSVDDAIRKLVQLSSKEKIWTQEMLLQVNDQSLRLLDIESQEELEDFPLPTVQRSQTVLNQLRYPSVLLLVCQDSEQSKPDVHFFHCDEVEAELVHEDIESALADCRLGKKMRPQTLKGHQEKIRQRQSILPPPQGPAPIPFQHRGGDSPEAKNRVGPQVPLSEPGFRRRESQEEPRAVLAQKIEKETQILNCALDDIEWFVARLQKAAEAFKQLNQRKKGKKKGKKAPAEGVLTLRARPPSEGEFIDCFQKIKLAINLLAKLQKHIQNPSAAELVHFLFGPLDLIVNTCSGPDIARSVSCPLLSRDAVDFLRGHLVPKEMSLWESLGESWMRPRSEWPREPQVPLYVPKFHSGWEPPVDVLQEAPWEVEGLASAPIEEVSPVSRQSIRNSQKHSPTSEPTPPGDALPPVSSPHTHRGYQPTPAMAKYVKILYDFTARNANELSVLKDEVLEVLEDGRQWWKLRSRSGQAGYVPCNILGEARPEDAGAPFEQAGQKYWGPASPTHKLPPSFPGNKDELMQHMDEVNDELIRKISNIRAQPQRHFRVERSQPVSQPLTYESGPDEVRAWLEAKAFSPRIVENLGILTGPQLFSLNKEELKKVCGEEGVRVYSQLTMQKAFLEKQQSGSELEELMNKFHSMNQRRGEDS

SEQ ID NO: 5406 - protein, 199 aa, Homo sapiens
MAWPCISRLCCLARRWNQLDRSDVAVPLTLHGYSDLDSEEPGTGGAASRRGQPPAGARDSGRDVPLTQYQRDFGLWTTPAGPKDPPPGRGPGAGGRRGKSSAQSSAPPAPGARGVYVLPIGDADAAAAVTTSYRQEFQAWTGVKPSRSTKTKPARVITTHTSGWDSSPGAGFQVPEVRKKFTPNPSAIFQASAPRILNV

SEQ ID NO: 5407 - protein, 1703 aa, Homo sapiens
MGNSDSQYTLQGSKNHSNTITGAKQIPCSLKIRGIHAKEEKSLHGWGHGSNGAGYKSRSLARSCLSHFKSNQPYASRLGGPTCKVSRGVAYSTHRTNAPGKDFQGISAAFSTENGFHSVGHELADNHITSRDCNGHLLNCYGRNESIASTPPGEDRKSPRVLIKTLGKLDGCLRVEFHNGGNPSKVPAEDCSEPVQLLRYSPTLASETSPVPEARRGSSADSLPSHRPSPTDSRLRSSKGSSLSSESSWYDSPWGNAGELSEAEGSFLAPGMPDPSLHASFPPGDAKKPFNQSSSLSSLRELYKDANLGSLSPSGIRLSDEYMGTHASLSNRVSFASDIDVPSRVAHGDPIQYSSFTLPCRKPKAFVEDTAKKDSLKARMRRISDWTGSLSRKKRKLQEPRSKEGSDYFDSRSDGLNTDVQGSSQASAFLWSGGSTQILSQRSESTHAIGSDPLRQNIYENFMRELEMSRTNTENIETSTETAESSSESLSSLEQLDLLFEKEQGVVRKAGWLFFKPLVTVQKERKLELVARRKWKQYWVTLKGCTLLFYETYGKNSMDQSSAPRCALFAEDSIVQSVPEHPKKENVFCLSNSFGDVYLFQATSQTDLENWVTAVHSACASLFAKKHGKEDTLRLLKNQTKNLLQKIDMDSKMKKMAELQLSVVSDPKNRKAIENQIQQWEQNLEKFHMDLFRMRCYLASLQGGELPNPKSLLAAASRPSKLALGRLGILSVSSFHALVCSRDDSALRKRTLSLTQRGRNKKGIFSSLKGLDTLARKGKEKRPSITQVDELLHIYGSTVDGVPRDNAWEIQTYVHFQDNHGVTVGIKPEHRVEDILTLACKMRQLEPSHYGLQLRKLVDDNVEYCIPAPYEYMQQQVYDEIEVFPLNVYDVQLTKTGSVCDFGFAVTAQVDERQHLSRIFISDVLPDGLAYGEGLRKGNEIMTLNGEAVSDLDLKQMEALFSEKSVGLTLIARPPDTKATLCTSWSDSDLFSRDQKSLLPPPNQSQLLEEFLDNFKKNTANDFSNVPDITTGLKRSQTDGTLDQVSHREKMEQTFRSAEQITALCRSFNDSQANGMEGPRENQDPPPRSLARHLSDADRLRKVIQELVDTEKSYVKDLSCLFELYLEPLQNETFLTQDEMESLFGSLPEMLEFQKVFLETLEDGISASSDFNTLETPSQFRKLLFSLGGSFLYYADHFKLYSGFCANHIKVQKVLERAKTDKAFKAFLDARNPTKQHSSTLESYLIKPVQRVLKYPLLLKELVSLTDQESEEHYHLTEALKAMEKVASHINEMQKIYEDYGTVFDQLVAEQSGTEKEVTELSMGELLMHSTVSWLNPFLSLGKAARGSDLELTVFVFKRAVILVYKENCKLKKKLPSNSRPAHNSTDLDPFKFRWLIPISALQVRLGNPAGTENNSIWELIHTKSEIEGRPETIFQLCCSDSESKTNIVKVIRSILRENFRRHIKCELPLEKTCKDRLVPLKNRVPVSAKLASSRSLKVLKNSSSNEWTGETGKGTLLDSDEGSLSSGTQSSGCPTAEGRQDSKSTSPGKYPHPGLADFADNLIKESDILSDEDDDHRQTVKQGSPTKDIEIQFQRLRISEDPDVHPEAEQQPGPESGEGQKGGEQPKLVRGHFCPIKRKANSTKRDRGTLLKAQIRHQSLDSQSENATIDLNSVLEREFSVQSLTSVVSEECFYETESHGKS

SEQ ID NO: 5408 - protein, 1058 aa, Homo sapiens
MDLGPLNICEEMTILHGGFLLAEQLFHPKALAELTKSDWERVGRPIVEALREISSAAAHSQPFAWKKKALIIIWAKVLQPHPVTPSDTETRWQEDLFFSVGNMIPTINHTILFELLKSLEASGLFIQLLMALPTTICHAELERFLEHVTVDTSAEDVAFFLDVWWEVMKHKGHPQDPLLSQFSAMAHKYLPALDEFPHPPKRLRSDPDACPTMPLLAMLLRGLTQIQSRILGPGRKCCALANLADMLTVFALTEDDPQEVSATVYLDKLATVISVWNSDTQNPYHQQALAEKVKEAERDVSLTSLAKLPSETIFVGCEFLHHLLREWGEELQAVLRSSQGTSYDSYRLCDSLTSFSQNATLYLNRTSLSKEDRQVVSELAECVRDFLRKTSTVLKNRALEDITASIAMAVIQQKMDRHMEVCYIFASEKKWAFSDEWVACLGSNRALFRQPDLVLRLLETVIDVSTADRAIPESQIRQVIHLILECYADLSLPGKNKVLAGILRSWGRKGLSEKLLAYVEGFQEDLNTTFNQLTQSASEQGLAKAVASVARLVIVHPEVTVKKMCSLAVVNLGTHKFLAQILTAFPALRFVEEQGPNSSATFMVSCLKETVWMKFSTPKEEKQFLELLNCLMSPVKPQGIPVAALLEPDEVLKEFVLPFLRLDVEEVDLSLRIFIQTLEANACREEYWLQTCSPFPLLFSLCQLLDRFSKYWQLPKEKRCLSLDRKDLAIHILELLCEIVSANAETFSPDVWIKSLSWLHRKLEQLDWTVGLRLKSFFEGHFKCEVPATLFEICKLSEDEWTSQAHPGYGAGTGLLAWMECCCVSSGISERMLSLLVVDVGNPEEVRLFSKGFLVALVQVMPWCSPQEWQRLHQLTRRLLEKQLLHVPYSLEYIQFVPLLNLKPFAQELQLSVLFLRTFQFLCSHSCRDWLPLEGWNHVVKLLCGSLTRLLDSVRAIQAAGPWVQGPEQDLTQEALFVYTQVFCHALHIMAMLHPEVCEPLYVLALETLTCYETLSKTNPSVSSLLQRAHEQRFLKSIAEGIGPEERRQTLLQKMSSF

SEQ ID NO: 5409 - protein, 88 aa, Homo sapiens
MSGLRVYSTSVTGSREIKSQQSEVTRILDGKRIQYQLVDISQDNALRDEMRALAGNPKATPPQIVNGDQYCGVWAGGRGGGGSVGRGL

SEQ ID NO: 5410 - protein, 310 aa, Homo sapiens
MDGSFVQHSVRVLQELNKQREKGQYCDATLDVGGLVFKAHWSVLACCSHFFQSLYGDGSGGSVVLPAGFAEIFGLLLDFFYTGHLALTSGNRDQVLLAARELRVPEAVELCQSFKPKTSVGQAAGGQSGLGPPASQNVNSHVKEPAGLEEEEVSRTLGLVPRDQEPRGSHSPQRPQLHSPAQSEGPSSLCGKLKQALKPCPLEDKKPEDCKVPPRPLEAEGAQLQGGSNEWEVVVQVEDDGDGDYMSEPEAVLTRRKSNVIRKPCAAEPALSAGSLAAEPAENRKGTAVPVECPTCHKKFLSKYYLKVHN

SEQ ID NO: 5411 - protein, 199 aa, Homo sapiens; identical to SEQ ID NO: 4921

SEQ ID NO: 5412 - protein, 170 aa, Homo sapiens
MSVAGGEIRGDTGGEDTAAPGRFSFSPEPTLEDIRRLHAEFAAERDWEQFHQPRNLLLALVGEVGELAELFQWKTDGEPGPQGWSPRERAALQEELSDVLIYLVALAARCRVDLPLAVLSKMDINRRRYPAHLARSSSRKYTELPHGAISEDQAVGPADIPCDSTGQTST

SEQ ID NO: 5413 - protein, 233 aa, Homo sapiens
MSAKRAELKKTHLSKNYKAVCLELKPEPTKTFDYKAVKQEGRFTKAGVTQDLKNELREVREELKEKMEEIKQIKDLMDKDFDKLHEFVEIMKEMQKDMDEKMDILINTQKNYKLPLRRAPKEQQELRLMGKTHREPQLRPKKMDGASGVNGAPCALHKKTMAPQKTKQGSLDPLHHCGTCCEKCLLCALKNNYNRGNIPSEASGLYKGGEEPVTTQPSVGHAVPAPKSQTEGR

SEQ ID NO: 5414 - protein, 731 aa, Homo sapiens
MSVTLTSVKRVQSSPNLLAAGRDSQSPDSAWRSYNDGNQETLNGDATYSSLAAKGFRSVRPNLQDKRSPTQSQITVNGNSGGAVSPMSYYQRPFSPSAYSLPASLNSSIVMQHGTSLDSTDTYPQHAQSLDGTTSSSIPLYRSSEEEKRVTVIKAPHYPGIGPVDESGIPTAIRTTVDRPKDWYKTMFKQIHMVHKPDDDTDMYNTPYTYNAGLYNPPYSAQSHPAAKTQTYRPLSKSHSDNSPNAFKDASSPVPPPHVPPPVPPLRPRDRSSTEKHDWDPPDRKVDTRKFRSEPRSIFEYEPGKSSILQHERPPPLPTTPTPVPREPGRKPLSSSRLGEVTGSPSPPPRSGAPTPSSRAPALSPTRPPKKPLDYVQDHSSGVFNEASLYQSSIDRSLERPMSSASMASDFRKRRKSEPAVGPPRGLGDQSASRTSPGRVDLPGSSTTLTKSFTSSSPSSPSRAKDRESPRSYSSTLTDMGRSAPRERRGTPEKEKLPAKAVYDFKAQTSKELSFKKGDTVYILRKIDQNWYEGEHHGRVGIFPISYVEKLTPPEKAQPARPPPPAQPGEIGEAIAKYNFNADTNVELSLRKGDRVILLKRVDQNWYEGKIPGTNRQGIFPVSYVEVVKKNTKGAEDYPDPPIPHSYSSDRIHSLSSNKPQRPVFTHENIQGGGEPFQALYNYTPRNEDELELRESDVIDVMEKCDDGWFVGTSRRTKFFGTFPGNYVKRL

SEQ ID NO: 5415 - protein, 322 aa, Homo sapiens
MTLEAIRYSRGSLQILDQLLLPKQSRYEAVGSVHQAWEAIRAMKVRGAPAIALVGCLSLAVELQAGAGGPGLAALVAFVRDKLSFLVTARPTAVNMARAARDLADVAAREAEREGATEEAVRERRETELCEHWEEHTRQRELPLRGPLGGTVLETRPYNQGARLTAFELVYEQIPATLITDSMVAAAMAHRGVSAVVVGADRVVANGDTANKVGTYQLAIVAKHHGIPFYVAAPSSSCDLRLETGKEIIIEERPGQELTDVNGVRIAAPGIGVWNPAFDVTPHDLITGGIITELGVFAPEELRTALTTTISSRDGTLDGPQM

SEQ ID NO: 5416 - protein, 1724 aa, Homo sapiens
MGNQDGKLKRSAGDALHEGGGGAEDALGPRDVEATKKGSGGKKALGKHGKGGGGGGGGGESGKKKSKSDSRASVFSNLRIRKNLSKGKGAGGSREDVLDSQALQTGELDSAHSLLTKTPDLSLSADEAGLSDTECADPFEVTGPGGPGPAEARVGGRPIAEDVETAAGAQDGQRTSSGSDTDIYSFHSATEQEDLLSDIQQAIRLQQQQQQQLQLQLQQQQQQQQLQGAEEPAAPPTAVSPQPGAFLGLDRFLLGPSGGAGEAPGSPDTEQALSALSDLPESLAAEPREPQQPPSPGGLPVSEAPSLPAAQPAAKDSPSSTAFPFPEAGPGEEAAGAPVRGAGDTDEEGEEDAFEDAPRGSPGEEWAPEVGEDAPQRLGEEPEEEAQGPDAPAAASLPGSPAPSQRCFKPYPLITPCYIKTTTRQLSSPNHSPSQSPNQSPRIKRRPEPSLSRGSRTALASVAAPAKKHRADGGLAAGLSRSADWTEELGARTPRVGGSAHLLERGVASDSGGGVSPALAAKASGAPAAADGFQNVFTGRTLLEKLFSQQENGPPEEAEKFCSRIIAMGLLLPFSDCFREPCNQNAQTNAASFDQDQLYTWAAVSQPTHSLDYSEGQFPRRVPSMGPPSKPPDEEHRLEDAETESQSAVSETPQKRSDAVQKEVVDMKSEGQATVIQQLEQTIEDLRTKIAELERQYPALDTEVASGHQGLENGVTASGDVCLEALRLEEKEVRHHRILEAKSIQTSPTEEGGVLTLPPVDGLPGRPPCPPGAESGPQTKFCSEISLIVSPRRISVQLDSHQPTQSISQPPPPPSLLWSAGQGQPGSQPPHSISTEFQTSHEHSVSSAFKNSCNIPSPPPLPCTESSSSMPGLGMVPPPPPPLPGMTVPTLPSTAIPQPPPLQGTEMLPPPPPPLPGAGIPPPPPLPGAGILPLPPLPGAGIPPPPPLPGAAIPPPPPLPGAGIPLPPPLPGAGIPPPPPLPGAGIPPPPPLPGAGIPPPPPLPGAGIPPPPPLPGAGIPPPPPLPGAGIPPPPPLPGAGIPPPPPLPGAGIPPPPPLPGAGIPPPPPLPGAGIPPPPPLPGAGIPPPPPLPGAGIPPPPPLPGVGIPPPPPLPGAGIPPPPPLPGAGIPPPPPLPGAGIPPPPPLPRVGIPPPPPLPGAGIPPPPPLPGAGIPPPPPLPGVGIPPPPPLPGVGIPPPPPLPGAGIPPPPPLPGMGIPPAPAPPLPPPGTGIPPPPLLPVSGPPLLPQVGSSTLPTPQVCGFLPPPLPSGLFGLGMNQDKGSRKQPIEPCRPMKPLYWTRIQLHSKRDSSTSLIWEKIEEPSIDCHEFEELFSKTAVKEARGSKPISDTISKTKAKQVVKLLSNKRSQAVGILMSSLHLDMKDIQHAVVNLDNSVVDLETLQALYENRAQSDELEKIEKHGRSSKDKENAKSLDKPEQFLYELSLIPNFSERVFCILFQSTFSESICSIRRKLELLQKLCETLKNGPGVMQVLGLVLAFGNYMNGGNKTRGQADGFGLDILPKLKDVKSSDNSRSLLSYIVSYYLRNFDEDAGKEQCLFPLPEPQDLFQASQMKFEDFQKDLRKLKKDLKACEVEAGKVYQVSSKEHMQPFKENMEQFIIQAKIDQEAEENSLTETHKCFLETTAYFFMKPKLGEKEVSPNAFFSIWHEFSSDFKDFWKKENKLLLQERVKEAEEVCRQKKGKSLYKIKPRHDSGIKAKISMKT

SEQ ID NO: 5417 - protein, 1015 aa, Homo sapiens
MTVSQKGGPQPTPSPAGPGTQLGPITGEMDEADSAFLKFKQTADDSLSLTSPNTESIFVEDPYTASLRSEIESDGHEFEAESWSLAVDAAYAKKQKREVVKRQDVLYELMQTEVHHVRTLKIMLKVYSRALQEELQFSSKAIGRLFPCADDLLETHSHFLARLKERRQESLEEGSDRNYVIQKIGDLLVQQFSGENGERMKEKYGVFCSGHNEAVSHYKLLLQQNKKFQNLIKKIGNFSIVRRLGVQECILLVTQRITKYPVLVERIIQNTEAGTEDYEDLTQALNLIKDIISQVDAKVSECEKGQRLREIAGKMDLKSSSKLKNGLTFRKEDMLQRQLHLEGMLCWKTTSGRLKDILAILLTDVLLLLQEKDQKYVFASVDSKPPVISLQKLIVREVANEEKAMFLISASLQGPEMYEIYTSSKEDRNAWMAHIQRAVESCPDEEEGPFSLPEEERKVVEARATRLRDFQERLSMKDQLIAQSLLEKQQIYLEMAEMGGLEDLPQPRGLFRGGDPSETLQGELILKSAMSEIEGIQSLICRQLGSANGQAEDGGSSTGPPRRAETFAGYDCTNSPTKNGSFKKKVSSTDPRPRDWRGPPNSPDLKLSDSDIPGSSEESPQVVEAPGTESDPRLPTVLESELVQRIQTLSQLLLNLQAVIAHQDSYVETQRAAIQEREKQFRLQSTRGNLLLEQERQRNFEKQREERAALEKLQSQLRHEQQRWERERQWQHQELERAGARLQEREGEARQLRERLEQERAELERQRQAYQHDLERLREAQRAVERERERLELLRRLKKQNTAPGALPPDTLAEAQPPSHPPSFNGEGLEGPRVSMLPSGVGPEYAERPEVARRDSAPTENRLAKSDVPIQLLSATNQFQRQAAVQQQIPTKLAASTKGGKDKGGKSRGSQRWESSASFDLKQQLLLNKLMGKDESTSRNRRSLSPILPGRHSPAPPPDPGFPAPSPPPADSPSEGFSLKAGGTALLPGPPAPSPLPATPLSAKEDASKEDVIFF

SEQ ID NO: 5418 - protein, 846 aa, Homo sapiens
MEALGPGGDRASPASSTSSLDLWHLSMRADSAYSSFSAASGGPEAAQSPGTDLLPYLDWDYVRVVWGGPGPAPPDAALCTSPRPRPAVAARSGPQPTEVPGTPGPLNRQATPLLYALAAEAEAAAQAAEPPSPPASRAAYRQRLQGAQRRVLRETSFQRKELRMSLPARLRPTVPARPPATHPRSASLSHPGGEGEPARSRAPAPGTAGRGPLANQQRKWCFSEPGKLDRVGRGGGPARECLGEACSSSGLPGPEPLEFQHPALAKFEDHEVGWLPETQPQGSMNLDSGSLKLGDAFRPASRSRSASGEVLGSWGGSGGTIPIVQAVPQGAETPRPLFQTKLSRFLPQKEAAVMYPAELPQSSPADSEQRVSETCIVPAWLPSLPDEVFLEEAPLVRMRSPPDPHASQGPPASVHASDQPYGTGLGQRTGQVTVPTEYPLHECPGTAGADDCWQGVNGSVGISRPTSHTPTGTANDNIPTIDPTGLTTNPPTAAESDLLKPVPADALGLSGNDTPGPSHNTALARGTGQPGSRPTWPSQCLEELVQELARLDPSLCDPLASQPSPEPPLGLLDGLIPLAEVRAAMRPACGEAGEEAASTFEPGSYQFSFTQLLPAPREETRLENPATHPVLDQPCGQGLPAPNNSIQGKKVELAARLQKMLQDLHTEQERLQGEAQAWARRQAALEAAVRQACAPQELERFSRFMADLERVLGLLLLLGSRLARVRRALARAASDSDPDEQRLRLLQRQEEDAKELKEHVARRERAVREVLVRALPVEELRVYCALLAGKAAVLAQQRNLDERIRLLQDQLDAIRDDLGHHAPSPSPARPPGTCPPVQPPFPLLLT

SEQ ID NO: 5419 - protein, 833 aa, Homo sapiens
MKFTNTKVQMMQNVHLAPETDEDDLYSGYNDYNPIYDIEELENDAAFQQAVRTSHGRRPPITAKISSTAVTRPIATGYGSKTSLASSIGRPMTGAIQDGVTRPMTAVRAAGFTKAALRGSAFDPLSQSRGPASPLEAKKKDSPEEKIKQLEKEVNELVEESCIANSCGDLKLALEKAKDAGRKERVLVRQREQVTTPENINLDLTYSVLFNLASQYSVNEMYAEALNTYQVIVKNKMFSNAGILKMNMGNIYLKQRNYSKAIKFYRMALDQVPSVNKQMRIKIMQNIGVTFIQAGQYSDAINSYEHIMSMAPNLKAGYNLTICYFAIGDREKMKKAFQKLITVPLEIDEDKYISPSDDPHTNLVTEAIKNDHLRQMERERKAMAEKYIMTSAKLIAPVIETSFAAGYDWCVEVVKASQYVELANDLEINKAVTYLRQKDYNQAVEILKVLEKKDSRVKSAAATNLSALYYMGKDFAQASSYADIAVNSDRYNPAALTNKGNTVFANGDYEKAAEFYKEALRNDSSCTEALYNIGLTYEKLNRLDEALDCFLKLHAILRNSAEVLYQIANIYELMENPSQAIEWLMQVVSVIPTDPQVLSKLGELYDREGDKSQAFQYYYESYRYFPCNIEVIEWLGAYYIDTQFWEKAIQYFERASLIQPTQVKWQLMVASCFRRSGNYQKALDTYKDTHRKFPENVECLRFLVRLCTDLGLKDAQEYARKLKRLEKMKEIREQRIKSGRDGSGGSRGKREGSASGDSGQNYSASSKGERLSARLRALPGTNEPYESSSNKEIDASYVDPLGPQIERPKTAAKKRIDEDDFADEELGDDLLPE

SEQ ID NO: 5420 - protein, 305 aa, Homo sapiens; identical to SEQ ID NO: 5213

SEQ ID NO: 5421 - protein, 372 aa, Homo sapiens
MDVLSPLSFIKVSHVRMQGILLLVFAKYQHLPYIQILSTKSTPTGLFGYWGNKGGVNICLKLYGYYVSIINCHLPPHISNNYQRLEHFDRILEMQNCEGRDIPNILDHDLIIWFGDMNFRIEDFGLHFVRESIKNRCYGGLWEKDQLSIAKKHDPLLREFQEGRLLFPPTYKFDRNSNDYDTSEKKRKPAWTDRILWRLKRQPCAGPDTPIPPASHFSLSLRGYSSHMTYGISDHKPVSGTFDLELKPLVSAPLIVLMPEDLWTVENDMMVSYSSTSDFPSSPWDWIGLYKVGLRDVNDYVSYAWVGDSKVSCSDNLNQVYIDISNIPTTEDEFLLCYYSNSLRSVVGISRPFQIPPGSLREDPLGEAQPQI

SEQ ID NO: 5422 - protein, 563 aa, Homo sapiens
MRLDLASLMSAPKSLGSAFKSWRLDKAPSPQHTFPSTSIPGMAFALLASVPPVFGLYTSFFPVLIYSLLGTGRHLSTGTFAILSLMTGSAVERLVPEPLVGNLSGIEKEQLDAQRVGVAAAVAFGSGALMLGMFVLQLGVLSTFLSEPVVKALTSGAALHVLLSQLPSLLGLSLPRQIGCFSLFKTLASLLTALPRSSPAELTISALSLALLVPVKELNVRFRDRLPTPIPGEVVLVLLASVLCFTSSVDTRYQVQIVGLLPGGFPQPLLPNLAELPRILADSLPIALVSFAVSASLASIHADKYSYTIDSNQEFLAHGASNLISSLFSCFPNSATLATTNLLVDAGGKTQLAGLFSCTVVLSVLLWLGPFFYYLPKAVLACINISSMRQVFCQMQELPQLWHISRVDFLLQVPGLCILSYPTPLYFGTRGQFRCNLEWHLGLGEGEKETSKPDGPMVAVAEPVRVVVLDFSGVTFADAAGAREVVQVRERLASRCRDARIRLLLAQCNALVQGTLTRVGLLDRVTPDQLFVSVQDAAAYALGSLLRGSSTRSGSQEALGCGK

SEQ ID NO: 5423 - protein, 963 aa, Homo sapiens
MAERGGAGGGPGGAGGGSGQRGSGVAQSPQQPPPQQQQQQPPQQPTPPKLAQATSSSSSTSAAAASSSSSSTSTSMAVAVASGSAPPGGPGPGRTPAPVQMNLYATWEVDRSSSSCVPRLFSLTLKKLVMLKEMDKDLNSVVIAVKLQGSKRILRSNEIVLPASGLVETELQLTFSLQYPHFLKRDANKLQIMLQRRKRYKNRTILGYKTLAVGLINMAEVMQHPNEGALVLGLHSNVKDVSVPVAEIKIYSLSSQPIDHEGIKSKLSDRSPDIDNYSEEEEESFSSEQEGSDDPLHGQDLFYEDEDLRKVKKTRRKLTSTSAITRQPNIKQKFVALLKRFKVSDEVGFGLEHVSREQIREVEEDLDELYDSLEMYNPSDSGPEMEETESILSTPKPKLKPFFEGMSQSSSQTEIGSLNSKGSLGKDTTSPMELAALEKIKSTWIKNQDDSLTETDTLEITDQDMFGDASTSLVVPEKVKTPMKSSKTDLQGSASPSKVEGVHTPRQKRSTPLKERQLSKPLSERTNSSDSERSPDLGHSTQIPRKVVYDQLNQILVSDAALPENVILVNTTDWQGQYVAELLQDQRKPVVCTCSTVEVQAVLSALLTRIQRYCNCNSSMPRPVKVAAVGGQSYLSSILRFFVKSLANKTSDWLGYMRFLIIPLGSHPVAKYLGSVDSKYSSSFLDSGWRDLFSRSEPPVSEQLDVAGRVMQYVNGAATTHQLPVAEAMLTCRHKFPDEDSYQKFIPFIGVVKVGLVEDSPSTAGDGDDSPVVSLTVPSTSPPSSSGLSRDATATPPSSPSMSSALAIVGSPNSPYGDVIGLQVDYWLGHPGERRREGDKRDASSKNTLKSVFRSVQVSRLPHSGEAQLSGTMAMTVVTKEKNKKVPTIFLSKKPREKEVDSKSQVIEGISRLICSAKQQQTMLRVSIDGVEWSDIKFFQLAAQWPTHVKHFPVGLFSGSKAT

SEQ ID NO: 5424 - protein, 181 aa, Homo sapiens
MEEIPAQEAAGSPRVQFQSLETQSECLSPEPQFVQDTDMEQGLTGAPPVPQVPALPREGSPGDQAAALLTARYQEFVTFEDVAVHLTREEWGYLDPVQRDLYREVMLENYGNVVSLGILLRLPTTRIHSVNSCPALSHTQASAFSGETLAVLTAGISKRWPKYRLPIDIARPCSETPFPRL

SEQ ID NO: 5425 - protein, 468 aa, Homo sapiens
MVLEGNPEVGSAASDLQHRGNKGSCVLSSPGEDAQPGEEPIKYGELIVLGCCEEGGEETEAQRGEVTGPRAHSCYNGCLASGDKGRRRSRLALSRRSHANGVKPDVMHHISTPLVSKALSNRGQHSISYTLSRSHSVIVEYTHDSDTDMFQIGRSTENMIDFVVTDTSPGGGAAEGPSAQSTISRYACRILCDRRPPYTARIYAAGFDASSNIFLGERAAKWRTPDGLMDGLTTNGVLVMHPAGGFSEDSAPGVWREISVCGNVYTLRDSRSAQQRGKLVENESNVLQDGSLIDLCGATLLWRTPAGLLRAPTLKQLEAQRQEANAARPQCPVGLSTLAFPSPARGRTAPDKQQPWVYVRCGHVHGYHGWGCRRERGPQERECPLCRLVGPYVPLWLGQEAGLCLDPGPPSHAFAPCGHVCSEKTARYWAQTPLPHGTHAFHAACPFCGAWLTGEHGCVRLIFQGPLD

SEQ ID NO: 5426 - protein, 1103 aa, Homo sapiens
MAGASVKVAVRVRPFNARETSQDAKCVVSMQGNTTSIINPKQSKDAPKSFTFDYSYWSHTSTEDPQFASQQQVYRDIGEEMLLHAFEGYNVCIFAYGQTGAGKSYTMMGRQEPGQQGIVPQLCEDLFSRVSENQSAQLSYSVEVSYMEIYCERVRDLLNPKSRGSLRVREHPILGPYVQDLSKLAVTSYADIADLMDCGNKARTVAATNMNETSSRSHAVFTIVFTQRCHDQLTGLDSEKVSKISLVDLAGSERADSSGARGMRLKEGANINKSLTTLGKVISALADMQSKKRKSDFIPYRDSVLTWLLKENLGGNSRTAMIAALSPADINYEETLSTLRYADRTKQIRCNAIINEDPNARLIRELQEEVARLRELLMAQGLSASALEGLKTEEGSVRGALPAVSSPPAPVSPSSPTTHNGELEPSFSPNTESQIGPEEAMERLQETEKIIAELNETWEEKLRKTEALRMEREALLAEMGVAVREDGGTVGVFSPKKTPHLVNLNEDPLMSECLLYHIKDGVTRVGQVDMDIKLTGQFIREQHCLFRSIPQPDGEVVVTLEPCEGAETYVNGKLVTEPLVLKSGNRIVMGKNHVFRFNHPEQARLERERGVPPPPGPPSEPVDWNFAQKELLEQQGIDIKLEMEKRLQDLENQYRKEKEEADLLLEQQRLYADSDSGDDSDKRSCEESWRLISSLREQLPPTTVQTIVKRCGLPSSGKRRAPRRVYQIPQRRRLQGKDPRWATMADLKMQAVKEICYEVALADFRHGRAEIEALAALKMRELCRTYGKPDGPGDAWRAVARDVWDTVGEEEGGGAGSGGGSEEGARGAEVEDLRAHIDKLTGILQEVKLQNSSKDRELQALRDRMLRMERVIPLAQDHEDENEEGGEVPWAPPEGSEAAEEAAPSDRMPSARPPSPPLSSWERVSRLMEEDPAFRRGRLRWLKQEQLRLQGLQGSGGRGGGLRRPPARFVPPHDCKLRFPFKSNPQHRESWPGMGSGEAPTPLQPPEEVTPHPATPARRPPSPRRSHHPRRNSLDGGGRSRGAGSAQPEPQHFQPKKHNSYPQPPQPYPAQRPPGPRYPPYTTPPRMRRQRSAPDLKESGAAV

SEQ ID NO: 5427 - protein, 417 aa, Homo sapiens
MAEPVGKRGRWSGGSGAGRGGRGGWGGRGRRPRAQRSPSRGTLDVVSVDLVTDSDEEILEVATARGAADEVEVEPPEPPGPVASRDNSNSDSEGEDRRPAGPPREPVRRRRRLVLDPGEAPLVPVYSGKVKSSLRLIPDDLSLLKLYPPGDEEEAELADSSGLYHEGSPSPGSPWKTKLRTKDKEEKKKTEFLDLDNSPLSPPSAAKSRTHTRALKKLSEVNKRLQDLRSCLSPKPPQGQEQQGQEDEVVLVEGPTLPETPRLFPLKIRCRADLVRLPLRMSEPLQSVVDHMATHLGVSPSRILLLFGETELSPTATAALKLGVADIIDCVVLTSSPEATETSQQLQLRVQGKEKHQTLEVSLSRDSPLKTLMSHYEEAMGLSGRKLSFFFDGTKLSGRELPADLGMESGDLIEVWG

SEQ ID NO: 5428 - protein, 127 aa, Homo sapiens
MRPLDIVELAEPEEVEVLEPEEDFEQFLLPVINEMREDIASLTREHGRAYLRNRSKLWEMDNMLIQIKTQVEASEESALNHLQNPGDAAEGRAAKRCEKAEEKAKEIAKMAEMLVELVRRIEKSESS

SEQ ID NO: 5429 - protein, 420 aa, Homo sapiens
MPLQVSDYSWQQTKTAVFLSLPLKGVCVRDTDVFCTENYLKVNFPPFLFEAFLYAPIDDESSKAKIGNDTIVFTLYKKEAAMWETLSVTGVDKEMMQRIREKSILQAQERAKEATEAKAAAKREDQKYALSVMMKIEEEERKKIEDMKENERIKATKALEAWKEYQRKAEEQKKIQREEKLCQKEKQIKEERKKIKYKSLTRNLASRNLAPKGRNSENIFTEKLKEDSIPAPRSVGSIKINFTPRVFPTALRESQVAEEEEWLHKQAEARRAMNTDIAELCDLKEEEKNPEWLKDKGNKLFATENYLAAINAYNLAIRLNNKMPLLYLNRAACHLKLKNLHKAIEDSSKALELLMPPVTDNANARMKAHVRRGTAFCQLELYVEGLQDYEAALKIDPSNKIVQIDAEKIRNVIQGTELKS

SEQ ID NO: 5430 - protein, 115 aa, Homo sapiens
MRYVASYLLAALGGNSSPSAKDIKKILDSVGIEADDDRLNKVISELNGKNIEDVIAQGIGKLASVPAGGAVAVSAAPGSAAPAAGSAPAAAEEKKDEKKEESEESDDDMGFGLFD

SEQ ID NO: 5431 - protein, 410 aa, Homo sapiens
LNRACFCVTGVPELEVICGLQQAEWPRLGLSHLGAVGGGWGGLPTSTWVSLHTQEVDLASEVALEVVRTAEPGVWLEAQAPVALVAQPEPLPATAGVKRESVGMEVAVLTDDPLPVVDQQQVLARLQLLEQQVVGGEQAKNKDLKEKHKRRKRYADERRKQLVAALQNSDEDSGDWVLLNVYDSIQEEVRAKSKLLEKMQRKLRAAEVEIKDLQSEFQLEKIDYLATIRRQERDSMLLQQLLEQVQPLIRRDCNYSNLEKILRESCWDEDNGFWKIPHPVITKTSLPVAVSTGPQNKPARKTSAADNGEPNMEDDRYRLMLSRSNSENIASNYFRSKRASQILSTDARKSLTHHNSPPGLSCPLSNNSAIPPTQAPEMPQPRPFRLESLDIPFTKAKRKKSKSNFGSEPL

SEQ ID NO: 5432 - protein, 450 aa, Homo sapiens
MRECISIHVGQAGVQIGNACWELYCLEHGIQPDGQMPSDKTIGGGDDSFNTFFSETGAGKHVPRAVFVDLEPTVVDEVRTGTYRQLFHPEQLITGKEDAANNYARGHYTIGKEIVDLVLDRIRKLADLCTGLQGFLIFHSFGGGTGSGFASLLMERLSVDYGKKSKLEFAIYPAPQVSTAVVEPYNSILTTHTTLEHSDCAFMVDNEAIYDICRRNLDIERPTYTNLNRLIGQIVSSITASLRFDGALNVDLTEFQTNLVPYPRIHFPLATYAPVISAEKAYHEQLSVAEITNACFEPANQMVKCDPRHGKYMACCMLYRGDVVPKDVNAAIATIKTKRTIQFVDWCPTGFKVGINYQPPTVVPGGDLAKVQRAVCMLSNTTAIAEAWARLDHKFDLMYAKRAFVHWYVGEGMEEGEFSEAREDLAALEKDYEEVGVDSVEAEAEEGEEY

SEQ ID NO: 5433 - protein, 156 aa, Homo sapiens
MSGGLLKALRSDSYVELSQYRDQHFRGDNEEQEKLLKKSCTLYVGNLSFYTTEEQIYELFSKSGDIKKIIMGLDKMKKTACGFCFVEYYSRADAENAMRYINGTRLDDRIIRTDWDAGFKEGRQYGRGRSGGQVRDEYRQDYDAGRGGYGKLAQNQ

SEQ ID NO: 5434 - protein, 331 aa, Homo sapiens
MGGEQEEERFDGMLLAMAQQHEGGVQELVNTFFSFLRRKTDFFIGGEEGMAEKLITQTFSHHNQLAQKTRREKRARQEAERREKAERAARLAKEAKSETSGPQIKELTDEEAERLQLEIDQKKDAENHEAQLKNGSLDSPGKQDTEEDEEEDEKDKGKLKPNLGNGADLPNYRWTQTLSELDLAVPFCVNFRLKGKDMVVDIQRRHLRVGLKGQPAIIDGELYNEVKVEESSWLIEDGKVVTVHLEKINKMEWWSRLVSSDPEINTKKINPENSKLSDLDSETRSMVEKMMYDQRQKSMGLPTSDEQKKQEILKKFMDQHPEMDFSKAKFN

SEQ ID NO: 5435 - protein, 619 aa, Homo sapiens
MAGPGVPGAPAARWKRHIVRQLRLRDRTQKALFLELVPAYNHLLEKAELLDKFSKKLQPEPNSVTPTTHQGPWEESELDSDQVPSLVALRVKWQEEEEGLRLVCGEMAYQVVEKGAALGTLESELQQRQSRLAALEARVAQLREARAQQAQQVEEWRAQNAVQRAAYEALRAHVGLREAALRRLQEEARDLLERLVQRKARAAAERNLRNERRERAKQARVSQELKKAAKRTVSISEGPDTLGDGMRERRETLALAPEPEPLEKEACEKWKRPFRSASATSLTLSHCVDVVKGLLDFKKRRGHSIGGAPEQRYQIIPVCVAARLPTRAQDVLDAHLSEVNAVRFGPNSSLLATGGADRLIHLWNVVGSRLEANQTLEGAGGSITSVDFDPSGYQVLAATYNQAAQLWKVGEAQSKETLSGHKDKVTAAKFKLTRHQAVTGSRDRTVKEWDLGRAYCSRTINVLSYCNDVVCGDHIIISGHNDQKIRFWDSRGPHCTQVIPVQGRVTSLSLSHDQLHLLSCSRDNTLKVIDLRVSNIRQVFRADGFKCGSDWTKAVFSPDRSYALAGSCDGALYIWDVDTGKLESRLQGPHCAAVNAVAWCYSGSHMVSVDQGRKVVLWQ

SEQ ID NO: 5436 - protein, 1682 aa, Homo sapiens
MEGNGTENSCSRTRGWLQQDNDAKPWLWKFSNCFSRPEQTLPHSPQTKEYMENKKVAVELKDVPSPLHAGSKLFPAVPLPDIRSLQQPKIQLSSVPKVSCCAHCPNEPSTSPMRFGGGGGGSGGTSSLIHPGALLDSQSTRTITCQVGSGFAFQSASSLQNASARNNLAGIASDFPSMCLESNLSSCKHLPCCGKLHFQSCHGNVHKLHQFPSLQGCTSAGYFPCSDFTSGAPGHLEEHISQSELTPHLCTNSLHLNVVPPVCLKGSLYCEDCLNKPARNSIIDAAKVWPNIPPPNTQPAPLAVPLCNGCGTKGTGKETTLLLATSLGKAASKFGSPEVAVAGQVLENLPPIGVFWDIENCSVPSGRSATAVVQRIREKFFKGHREAEFICVCDISKENKEVIQELNNCQVTVAHINATAKNAADDKLRQSLRRFANTHTAPATVVLVSTDVNFALELSDLRHRHGFHIILVHKNQASEALLHHANELIRFEEFISDLPPRLPLKMPQCHTLLYVYNLPANKDGKSVSNRLRRLSDNCGGKVLSITGCSAILRFINQDSAERAQKRMENEDVFGNRIIVSFTPKNRELCETKSSNAIADKVKSPKKLKNPKLCLIKDASEQSSSAKATPGKGSQANSGSATKNTNVKSLQELCRMESKTGHRNSEHQQGHLRLVVPTHGNSSAAVSTPKNSGVAEPVYKTSQKKENLSARSVTSSPVEKKDKEETVFQVSYPSAFSKLVASRQVSPLLASQSWSSRSMSPNLLNRASPLAFNIANSSSEADCPDPFANGADVQVSNIDYRLSRKELQQLLQEAFARHGKVKSVELSPHTDYQLKAVVQMENLQDAIGAVNSLHRYKIGSKKILVSLATGAASKSLSLLSAETMSVLQDAPACCLPLFKFTDIYEKKFGHKLNVSDLYKLTDTVAIREQGNGRLVCLLPSSQARQSPLGSSQSHDGSSTNCSPIIFEELEYHEPVCRQHCSNKDFSEHEFDPDSYKIPFVILSLKTFAPQVHSLLQTHEGTVPLLDPWLLRSKSPVGNPQLIQFSREVIDLLKSQPSCVIPISHFIPSYHHHFAKQCRVSDYGYSKLIELLEAVPHVLQILGMGSKRLLTLTHRAQVKRFTQDLLKLLKSQASKQVIVREFSQAYHWCFSKDWDVTEYGVCELIDIVSEIPDTTICLSQQDNEMVICIPKRERTQDEIERTKQFSKDVVDLLRHQPHFRMPFNKFIPSYHHHFGRQCKLAYYGFTKLLELFEAIPDTLQVLECGEEKILTLTEVERFKALAAQFVKLLRSQKDNCLMMTDLLTEYAKTFGYTFRLQDYDVSSISALTQKLCHVVKVADIESGRQIQLINRKSLRSLTAQLLVLLMSWEGTTHLSVEELKRHYESTHNTPLNPCEYGFMTLTELLKSLPYLVEVFTNDKMEECVKLTSLYLFAKNVRSLLHTYHYQQIFLHEFSMAYTKYVGETLQPKTYGHSSVEELLGAIPQVVWIKGHGHKRIVVLKNDMKSRLSSLSLSPANHENQPSEGERILEVPESHTASELKLGADGSGPSHTEQELLRLTDDSPVDLLCAPVPSCLPSPQLRPDPVILQSADLIQFEERPQEPSEIMILNQEEKMEIPIPGKSKTLTSDSSSSCISAAVPVPPCPSSETSESLLSKDPVESPAKKQPKNRVKLAANFSLAPITKL

SEQ ID NO: 5437 - protein, 244 aa, Homo sapiens
GGGYDLNLFASPPDSNFVCSVCHGVLKRPARLPCSHIFCKKCILRWLARQKTCPCCRKEVKRKKVVHMNKLRKTIGRLEVKCKNADAGCIVTCPLAHRKGHQDSCPFELTACPNEGCTSQVPRGTLAEHRQHCQQGSQQRCPLGCGATLDPAERARHNCYRELHNAWSVRQERRRPLLLSLLRRVRWLDQATSVVRRELAELSNFLEEDTALLEGAPQEEAEAAPEGNVGAEVVGEPRANIPCK

SEQ ID NO: 5438 - protein, 234 aa, Homo sapiens
LPCKRCRPSVYSLSYIKRGKTRNYLYPIWSPYAYYLYCYKYRITLREKMLPRCYKSITYKEEEDLTLQPRSCLQCESLVGLQEGKSTEQGNHDQLKELYSAGNLTVLATDPLLHQDPVQLDFHFRLTSQTSAHWHGLLCDRRLFLDIPYQALDQGNRESLTATLEYVEEKTNVDSVFVNFQNDRNDRGALLRAFSYMGFEVVRPDHPALPPLDNVIFMVYPLERDVGHLPSEPP

SEQ ID NO: 5439 - protein, 799 aa, Homo sapiens
MAAAASVTGRVTWAASPMRSLGLGRRLSLPGPRLDAVTAAVNPSLSDHGNGLGRGTRGSGCSGGSLVADWGGGAAAAAAVALALAPALSTMRRGSSESELAARWEAEAVAAAKAAAKAEAEATAETVAEQVRVDAGAAGEPECKAGEEQPKVLAPAPAQPSAAEEGNTQVLQRPPPTLPPSKPKPVQGLCPHGKPRDKGRSCKRSSGHGSGENGSQRPVTVDSSKARTSLDALKISIRQLKWKEFPFGRRLPCDIYWHGVSFHDNDIFSGQVNKFPGMTEMVRKITLSRAVRTMQNLFPEEYNFYPRSWILPDEFQLFVAQVQMVKDDDPSWKPTFIVKPDGGCQGDGIYLIKDPSDIRLAGTLQSRPAVVQEYICKPLLIDKLKFDIRLYVLLKSLDPLEIYIAKDGLSRFCTEPYQEPTPKNLHRIFMHLTNYSLNIHSGNFIHSDSASTGSKRTFSSILCRLSSKGVDIKKVWSDIISVVIKTVIALTPELKVFYQSDIPTGRPGPTCFQILGFDILLMKNLKPILLEVNANPSMRIEHEHELSPGVFENVPSLVDEEVKVAVIRDTLRLMDPLKKKRENQSQQLEKPFAGKEDALDGELTSAPDCNANPEAHLPSICLKQVFPKYAKQFNYLRLVDRMANLFIRFLGIKGTMKLGPTGFRTFIRSCKLSSSSLSMAAVDILYIDITRRWNSMTLDQRDSGMCLQAFVEAFFFLAQRKFKMLPLHEQVASLIDLCEYHLSLLDEKRLVCGRGVPSGGRPPHRGPPQEPSPSAQPAGDNPPAASCANKLSHPRHTLS

SEQ ID NO: 5440 - protein, 326 aa, Homo sapiens
MRECISIHVGQAGVQIGNACWELYCLEHGIQPDGQMPSDKTIGGGDDSFNTFFSETGAGKHVPRAVFVDLEPTVIDEVRTGTYRQLFHPEQLITGKEDAANNYARGHYTIGKEIIDLVLDRIRKLKSFFATKPRIHFPLATYAPVISAEKAYHEQLTVAEITNACFEPANQMVKCDPRHGKYMACCLLYRGDVVPKDVNAAIATIKTKRTIQFVDWCPTGFKVGINYQPPTVVPGGDLAKVQRAVCMLSNTTAVAEAWARLDHKFDLMPLRRIMRRLEQIVLTERMRVKSINLCAVLLHSFVLELSYFCSVNVYCRKLLIKLKFPF

SEQ ID NO: 5441 - protein, 334 aa, Homo sapiens
MVGREKELSIHFVPGSCRLVEEEVNIPNRRVLVTGATGLLGRAVHKEFQQNNWHAVGCGFRRARPKFEQVNLLDSNAVHHIIHDFQPHVIVHCAAERRPDVVENQPDAASQLNVDASGNLAKEAAAVGAFLIYISSDYVFDGTNPPYREEDIPAPLNLYGKTKLDGEKAVLENNLGAAVLRIPILYGEVEKLEESAVTVMFDKVQFSNKSANMDHWQQRFPTHVKDVATVCRQLAEKRMLDPSIKGTFHWSGNEQMTKYEMACAIADAFNLPSSHLRPITDSPVLGAQRPRNAQLDCSKLETLGIGQRTPFRIGIKESLWPFLIDKRWRQTVFH

SEQ ID NO: 5442 - protein, 170 aa, Homo sapiens
MASEAEKTFHRFAAFGESSSSGTEMNNKNFSKLCKDCGIMDGKTVTSTDVDIVFSKVKAKNARTITFQQFKEAVKELGQKRFKGKSPDEVLENIYGLMEGKDPATTGATKATTVGAVDRLTDTSKYTGTHKERFDESGKGKGIAGREEMTDNTGYVSGYKGSGTYDKKTK

SEQ ID NO: 5443 - protein, 1195 aa, Homo sapiens
MWRVKKLSLSLSPSPQTGKPSMRTPLRELTLQPGALTNSGKRSPACSSLTPSLCKLGLQEGSNNSSPVDFVNNKRTDLSSEHFSHSSKWLETCQHESDEQPLDPIPQISSTPKTSEEAVDPLGNYMVKTIVLVPSPLGQQQDMIFEARLDTMAETNSISLNGPLRTDDLVREEVAPCMGDRFSEVAAVSEKPIFQESPSHLLEESPPNPCSEQLHCSKESLSSRTEAVREDLVPSESNAFLPSSVLWLSPSTALAADFRVNHVDPEEEIVEHGAMEEREMRFPTHPKESETEDQALVSSVEDILSTCLTPNLVEMESQEAPGPAVEDVGRILGSDTESWMSPLAWLEKGVNTSVMLENLRQSLSLPSMLRDAAIGTTPFSTCSVGTWFTPSAPQEKSTNTSQTGLVGTKHSTSETEQLLCGRPPDLTALSRHDLEDNLLSSLVILEVLSRQLRDWKSQLAVPHPETQDSSTQTDTSHSGITNKLQHLKESHEMGQALQQARNVMQSWVLISKELISLLHLSLLHLEEDKTTVSQESRRAETLVCCCFDLLKKLRAKLQSLKAEREEARHREEMALRGKDAAEIVLEAFCAHASQRISQLEQDLASMREFRGLLKDAQTQLVGLHAKQEELVQQTVSLTSTLQQDWRSMQLDYTTWTALLSRSRQLTEKLTVKSQQALQERDVAIEEKQEVSRVLEQVSAQLEECKGQTEQLELENSRLATDLRAQLQILANMDSQLKELQSQHTHCAQDLAMKDELLCQLTQSNEEQAAQWQKEEMALKHMQAELQQQQAVLAKEVRDLKETLEFADQENQVAHLELGQVECQLKTTLEVLRERSLQCENLKDTVENLTAKLASTIADNQEQDLEKTRQYSQKLGLLTEQLQSLTLFLQTKLKEKTEQETLLLSTACPPTQEHPLPNDRTFLGSILTAVADEEPESTPVPLLGSDKSAFTRVASMVSLQPAETPGMEESLAEMSIMTTELQSLCSLLQESKEEAIRTLQARGSICELQARLQAQEEQHQEVQKAKEADIEKLNQALCLRYKNEKELQEVIQQQNEKILEQIDKSGELISLREEVTHLTRSLRRAETETKVLQEALAGQLDSNCQPMATNWIQEKVWLSQEVDKLRVMFLEMKNEKEKLMIKFQSHRNILEENLRRSDKELEKLDDIVQHIYKTLLSIPEVVRGCKELQGLLEFLS

SEQ ID NO: 5444 - protein, 3051 aa, Homo sapiens
MRGRRGRPPKQPAAPAAERCAPAPPPPPPPPTSGPIGGLRSRHRGSSRGRWAAAQAEVAPKTRLSSPRGGSSSRRKPPPPPPAPPSTSAPGRGGRGGGGGRTGGGGGGGHLARTTAARRAVNKVVYDDHESEEEEEEEDMVSEEEEEEDGDAEETQDSEDDEEDEMEEDDDDSDYPEEMEDDDDDASYCTESSFRSHSTYSSTPGRRKPRVHRPRSPILEEKDIPPLEFPKSSEDLMVPNEHIMNVIAIYEVLRNFGTVLRLSPFRFEDFCAALVSQEQCTLMAEMHVVLLKAVLREEDTSNTTFGPADLKDSVNSTLYFIDGMTWPEVLRVYCESDKEYHHVLPYQEAEDYPYGPVENKIKVLQFLVDQFLTTNIAREELMSEGVIQYDDHCRVCHKLGDLLCCETCSAVYHLECVKPPLEEVPEDEWQCEVCVAHKVPGVTDCVAEIQKNKPYIRHEPIGYDRSRRKYWFLNRRLIIEEDTENENEKKIWYYSTKVQLAELIDCLDKDYWEAELCKILEEMREEIHRHMDITEDLTNKARGSNKSFLAAANEEILESIRAKKGDIDNVKSPEETEKDKNETENDSKDAEKNREEFEDQSLEKDSDDKTPDDDPEQGKSEEPTEVGDKGNSVSANLGDNTTNATSEETSPSEGRSPVGCLSETPDSSNMAEKKVASELPQDVPEEPNKTCESSNTSATTTSIQPNLENSNSSSELNSSQSESAKAADDPENGERESHTPVSIQEEIVGDFKSEKSNGELSESPGAGKGASGSTRIITRLRNPDSKLSQLKSQQVAAAAHEANKLFKEGKEVLVVNSQGEISRLSTKKEVIMKGNINNYFKLGQEGKYRVYHNQYSTNSFALNKHQHREDHDKRRHLAHKFCLTPAGEFKWNGSVHGSKVLTISTLRLTITQLENNIPSSFLHPNWASHRANWIKAVQMCSKPREFALALAILECAVKPVVMLPIWRESLGHTRLHRMTSIEREEKEKVKKKEKKQEEEETMQQATWVKYTFPVKHQVWKQKGEEYRVTGYGGWSWISKTHVYRFVPKLPGNTNVNYRKSLEGTKNNMDENMDESDKRKCSRSPKKIKIEPDSEKDEVKGSDAAKGADQNEMDISKITEKKDQDVKELLDSDSDKPCKEEPMEVDDDMKTESHVNCQESSQVDVVNVSEGFHLRTSYKKKTKSSKLDGLLERRIKQFTLEEKQRLEKIKLEGGIKGIGKTSTNSSKNLSESPVITKAKEGCQSDSMRQEQSPNANNDQPEDLIQGCSESDSSVLRMSDPSHTTNKLYPKDRVLDDVSIRSPETKCPKQNSIENDIEEKVSDLASRGQEPSKSKTKGNDFFIDDSKLASADDIGTLICKNKKPLIQEESDTIVSSSKSALHSSVPKSTNDRDATPLSRAMDFEGKLGCDSESNSTLENSSDTVSIQDSSEEDMIVQNSNESISEQFRTREQDVEVLEPLKCELVSGESTGNCEDRLPVKGTEANGKKPSQQKKLEERPVNKCSDQIKLKNTTDKKNNENRESEKKGQRTSTFQINGKDNKPKIYLKGECLKEISESRVVSGNVEPKVNNINKIIPENDIKSLTVKESAIRPFINGDVIMEDFNERNSSETKSHLLSSSDAEGNYRDSLETLPSTKESDSTQTTTPSASCPESNSVNQVEDMEIETSEVKKVTSSPITSEEESNLSNDFIDENGLPINKNENVNGESKRKTVITEVTTMTSTVATESKTVIKVEKGDKQTVVSSTENCAKSTVTTTTTTVTKLSTPSTGGSVDIISVKEQSKTVVTTTVTDSLTTTGGTLVTSMTVSKEYSTRDKVKLMKFSRPKKTRSGTALPSYARGSFVTKSSKKSIFVLPNDDLKKLARKGGIREVPYFNYNAKPALDIWPYPSPRPTFGITWRYRLQTVKSLAGVSLMLRLLWASLRWDDMAAKAPPGGGTTRTETSETEITTTEIIKRRDVGPYGIRSEYCIARGSIICPIGVPETPKETPTPQARGSGLRSSALRPKRPETPKQTGPVIIETWVAEEELELWEIRAFAERVEKEKAQAVEQQAKKRLEQQKPTVIATSTTSPTSSTTSTISPAQKVMVAPISGSVTTGTKMVLTTKVGSPATVTFQQNKNFHQTFATWVKQGQSNSGVVQVQQKVLGIIPSSTGTSQQTFTSFQAAATVTIRPNTSGSGGTTSNSQVITGPQIRPGMTVIRTPLQQSTLGKAIIRTPVMVQPGAPQQVMTQIIRGQPVSTAVSAPNTVSSTPGQKSLTSATSTSNIQSSASQPPRPQQGQVKLTMAQLTQLTQGHGGNQGLTVVIQGQGQTTGQLQLIPQGVTVLPGPGQQLMQAAMPNGTVQRFLFTPLATTATTASTTTTTVSTTAAGTGEQRQSKLSPQMQVHQDKTLPPAQSSSVGPAEAQPQTAQPSAQPQPQTQPQSPAQPEVQTQPEVQTQTTVSSHVPSEAQPTHAQSSKPQVAAQSQPQSNVQGQSPVRVQSPSQTRIRPSTPSQLSPGQQSQVQTTTSQPIPIQPHTSLQIPSQGQPQSQPQVQSSTQTLSSGQTLNQVTVSSPSRPQLQIQQPQPQVIAVPQLQQQVQVLSQIQSQVVAQIQAQQSGVPQQIKLQLPIQIQQSSAVQTHQIQNVVTVQAASVQEQLQRVQQLRDQQQKKKQQQIEIKREHTLQASNQSEIIQKQVVMKHNAVIEHLKQKKSMTPAEREENQRMIVCNQVMKYILDKIDKEEKQAAKKRKREESVEQKRSKQNATKLSALLFKHKEQLRAEILKKRALLDKDLQIEVQEELKRDLKIKKEKDLMQLAQATAVAAPCPPVTPAPPAPPAPPPSPPPPPAVQHTGLLSTPTLPAASQKRKREEEKDSSSKSKKKKMISTTSKETKKDTKLYCICKTPYDESKFYIGCDRCQNWYHGRCVGILQSEAELIDEYVCPQCQSTEDAMTVLTPLTEKDYEGLKRVLRSLQAHKMAWPFLEPVDPNDAPDYYGVIKEPMDLATMEERVQRRYYEKLTEFVADMTKIFDNCRYYNPSDSPFYQCAEVLESFFVQKLKGFKASRSHNNKLQSTAS

SEQ ID NO: 5445 - protein, 308 aa, Homo sapiens
MASSNTVLMRLVASAYSIAQKAGMIVRRVIAEGDLGIVEKTCATDLQTKADRLAQMSICSSLARKFPKLTIIGEEDLPSEEVDQELIEDSQWEEILKQPCPSQYSAIKEEDLVVWVDPLDGTKEYTEGLLDNVTVLIGIAYEGKAIAGVINQPYYNYEAGPDAVLGRTIWGVLGLGAFGFQLKEVPAGKHIITTTRSHSNKLVTDCVAAMNPDAVLRVGGAGNKIIQLIEGKASAYVFASPGCKKWDTCAPEVILHAVGGKLTDIHGNVLQYHKDVKHMNSAGVLATLRNYDYYASRVPESIKNALVP

SEQ ID NO: 5446 - protein, 403 aa, Homo sapiens
MSGSDGGLEEEPELSITLTLRMLMHGKEVGSIIGKKGETVKRIREQSSARITISEGSCPERITTITGSTAAVFHAVSMIAFKLDEDLCAAPANGGNVSRPPVTLRLVIPASQCGSLIGKAGTKIKEIRETTGAQVQVAGDLLPNSTERAVTVSGVPDAIILCVRQICAVILESPPKGATIPYHPSLSLGTVLLSANQGFSVQGQYGAVTPAEVTKLQQLSSHAVPFATPSVVPGLDPGTQTSSQEFLVPNDLIGCVIGRQGSKISEIRQMSGAHIKIGNQAEGAGERHVTITGSPVSIALAQYLITACLETAKSTSGGTPSSAPADLPAPFSPPLTALPTAPPGLLGTPYAISLSNFIGLKPMPFLALPPASPGPPPGLAAYTAKMAAANGSKKAERQKFSPY

SEQ ID NO: 5447 - protein, 217 aa, Homo sapiens
MSSKVSRDTLYEAVREVLHGNQRKRRKFLETVELQISLKNYDPQKDKRFSGTVRLKSTPRPKFSVCVLGDQQHCDEAKAVDIPHMDIEALKKLNKNKKLVKKLAKKYDAFLASESLIKQIPRILGPGLNKAGKFPSLLTHNENMVAKVDEVKSTIKFQMKKVLCLAVAVGHVKMTDDELVYNIHLAVNFLVSLLKKNWQNVRALYIKSTMGKPQRLY

SEQ ID NO: 5448 - protein, 1052 aa, Homo sapiens
MEGSEPVAAHQGEEASCSSWGTGSTNKNLPIMSTASVEIDDALYSRQRYVLGDTAMQKMAKSHVFLSGMGGLGLEIAKNLVLAGIKAVTIHDTEKCQAWDLGTNFFLSEDDVVNKRNRAEAVLKHIAELNPYVHVTSSSVPFNETTDLSFLDKYQCVVLTEMKLPLQKKINDFCRSQCPPIKFISADVHGIWSRLFCDFGDEFEVLDTTGEEPKEIFISNITQANPGIVTCLENHPHKLETGQFLTFREINGMTGLNGSIQQITVISPFSFSIGDTTELEPYLHGGIAVQVKTPKTVFFESLERQLKHPKCLIVDFSNPEAPLEIHTAMLALDQFQEKYSRKPNVGCQQDSEELLKLATSISETLEEKPDVNADIVHWLSWTAQGFLSPLAAAVGGVASQEVLKAVTGKFSPLCQWLYLEAADIVESLGKPECEEFLPRGDRYDALRACIGDTLCQKLQNLNIFLVGCGAIGCEMLKNFALLGVGTSKEKGMITVTDPDLIEKSNLNRQFLFRPHHIQKPKSYTAADATLKINSQIKIDAHLNKVCPTTETIYNDEFYTKQDVIITALDNVEARRYVDSRCLANLRPLLDSGTMGTKGHTEVIVPHLTESYNSHRDPPEEEIPFCTLKSFPAAIEHTIQWARDKFESSFSHKPSLFNKFWQTYSSAEEVLQKIQSGHSLEGCFQVIKLLSRRPRNWSQCVELARLKFEKYFNHKALQLLHCFPLDIRLKDGSLFWQSPKRPPSPIKFDLNEPLHLSFLQNAAKLYATVYCIPFAEEDLSADALLNILSEVKIQEFKPSNKVVQTDETARKPDHVPISSEDERNAIFQLEKAILSNEATKSDLQMAVLSFEKDDDHNGHIDFITAASNLRAKMYSIEPADRFKTKRIAGKIIPAIATTTATVSGLVALEMIKVTGGYPFEAYKNCFLNLAIPIVVFTETTEVRKTKIRNGISFTIWDRWTVHGKEDFTLLDFINAVKEKYGIEPTMVVQGVKMLYVPVMPGHAKRLKLTMHKLVKPTTEKKYVDLTVSFAPDIDGDEDLPGPPVRYYFSHDTD

SEQ ID NO: 5449 - protein, 377 aa, Homo sapiens
MLRLVPTGARAIVDMSYARHFLDFQGSAIPQAMQKLVVTRLSPNFREAVTLSRDCPVPLPGDGDLLVRNRFVGVNASDINYSAGRYDPSVKPPFDIGFEGIGEVVALGLSASARYTVGQAVAYMAPGSFAEYTVVPASIATPVPSVKPEYLTLLVSGTTAYISLKELGGLSEGKKVLVTAAAGGTGQFAMQLSKKAKCHVIGTCSSDEKSAFLKSLGCDRPINYKTEPVGTVLKQEYPEGVDVVYESVGGAMFDLAVDALATKGRLIVIGFISGYQTPTGLSPVKAGTLPAKLLKKSASVQGFFLNHYLSKYQAAMSHLLEMCVSGDLVCEVDLGDLSPEGRFTGLESIFRAVNYMYMGKNTGKIVVELPHSVNSKL

SEQ ID NO: 5450 - protein, 845 aa, Homo sapiens
MSNSRPRSRRDAGGGAGAAGRDELVSRSLQSAEHCLGVQDFGTAYAHYLLVLSLAPELKHDVKETFQYTLFRWAEELDALSRIQDLLGCYEQALELFPDDEVICNSMGEHLFRMGFRDEAAGYFHKAVKLNPDFSDAKENFYRVANWLVERWHFIMLNDTKRNTIYNAAIQKAVCLGSKSVLDIGAGTGILSMFAKKAGAHSVYACELSKTMYELACDVVAANKMEAGIKLLHTKSLDIEIPKHIPERVSLVVTETVDAGLFGEGIVESLIHAWEHLLLQPKTKGESANCEKYGKVIPASAVIFGMAVECAEIRRHHRVGIKDIAGIHLPTNVKFQSPAYSSVDTEETIEPYTTEKMSRVPGGYLALTECFEIMTVDFNNLQELKSLATKKPDKIGIPVIKEGILDAIMVWFVLQLDDEHSLSTSPSEETCWEQAVYPVQDLADYWIKPGDHVMMEVSCQDCYLRIQSISVLGLECEMDVAKSFTQNKDLLSLGNEAELCSALANLQTSKPDAVEQTCILESTEIALLNNIPYHEGFKMAMSKVLSSLTPEKLYQTMDTHCQNEMSSGTGQSNTVQNILEPFYVLDVSEGFSVLPVIAGTLGQVKPYSSVEKDQHRIALDLISEANHFPKETLEFWLRHVEDESAMLQRPKSDKLWSIIILDVIEPSGLIQQEIMEKAAISRCLLQSGGKIFPQYVLMFGLLVESQTLLEENAVQGTERTLGLNIAPFINQFQVPIRVFLDLSSLPCIPLSKPVELLRLDLMTPYLNTSNREVKVYVCKSGRLTAIPFWYHMYLDEEIRLDTSSEASHWKQAAVVLDNPIQVEMGEELVLSIQHHKSNVSITVKQ

SEQ ID NO: 5451 - protein, 251 aa, Homo sapiens
MADLTSVLTSVMFSPSSKMFIGGLSWQTSPDSLRDYFSKFGEIRECMVMRDPTTKRSRGFGFVTFADPASVDKVLGQPHHELDSKTIDPKVAFPRRAQPKMVTRTKKIFVGGLSANTVVEDVKQYFEQFGKVEDAMLMFDKTTNRHRGFGFVTFENEDVVEKVCEIHFHEINNKMVECKKAQPKEVMFPPGTRGRARGLPYTMDAFMLGMGMLGYPNFVATYGRGYPGFAPSYGYQFPDYLPVSQDIIFIN

SEQ ID NO: 5452 - protein, 169 aa, Homo sapiens
MAPKRAKRRTVEGGSSSVFSMFDQTQIQEFKEAFTVIDQNRDGIIDKEDLRDTFAAMGRLNVKNEELDAMMKEASGPINFTVFLTMFGEKLKGADPEDVITGAFKVLDPEGKGTIKKKFLEELLTTQCDRFSQEEIKNMWAAFPPDVGGNVDYKNICYVITHGDAKDQE

SEQ ID NO: 5453 - protein, 181 aa, Homo sapiens
MATEPEAAEPVVPSLVDRYFTRWYKPDVKGKFCEDHCILQHSNRICVITLAESHPVLQSGKTIKSISYQISTNCSRLQNKVSGKFKRGAQFLTELAPLCKIYCSDGEEYTVSSCVRGRLMEVNENILHKPSILQEKPSTEGYIAVVLPKFEESKSITEGLLTQKQYEEVMVKRINATTATS

SEQ ID NO: 5454 - protein, 717 aa, Homo sapiens
MELRCGGLLFSSRFDSGNLAHVEKVESLSSDGEGVGGGASALTSGIASSPDYEFNVWTRPDCAETEFENGNRSWFYFSVRGGMPGKLIKINIMNMNKQSKLYSQGMAPFVRTLPTRPRWERIRDRPTFEMTETQFVLSFVHRFVEGRGATTFFAFCYPFSYSDCQELLNQLDQRFPENHPTHSSPLDTIYYHRELLCYSLDGLRVDLLTITSCHGLREDREPRLEQLFPDTSTPRPFRFAGKRIFFLSSRVHPGETPSSFVFNGFLDFILRPDDPRAQTLRRLFVFKLIPMLNPDGVVRGHYRTDSRGVNLNRQYLKPDAVLHPAIYGAKAVLLYHHVHSRLNSQSSSEHQPSSCLPPDAPVSDLEKANNLQNEAQCGHSADRHNAEAWKQTEPAEQKLNSVWIMPQQSAGLEESAPDTIPPKESGVAYYVDLHGHASKRGCFMYGNSFSDESTQVENMLYPKLISLNSAHFDFQGCNFSEKNMYARDRRDGQSKEGSGRVAIYKASGIIHSYTLECNYNTGRSVNSIPAACHDNGRASPPPPPAFPSRYTVELFEQVGRAMAIAALDMAECNPWPRIVLSEHSSLTNLRAWMLKHVRNSRGLSSTLNVGVNKKRGLRTPPKSHNGLPVSCSENTLSRARSFSTGTSAGGSSSSQQNSPQMKNSPSFPFHGSRPAGLPGLGSSTQKVTHRVLGPVRGKPVWEPLQHVFGCLGHCWGK

SEQ ID NO: 5455 - protein, 225 aa, Homo sapiens
MVMAEGTAVLRRNRPGTKAQDFYNWPDESFDEMDSTLAVQQYIQQNIRADCSNIDKILEPPEGQDEGVWKYEHLRQFCLELNGLAVKLQSECHPDTCTQMTATEQWIFLCAAHKTPKECPAIDYTRHTLDGAACLLNSNKYFPSRVSIKESSVAKLGSVCRRIYRIFSHAYFHHRQIFDEYENETFLCHRFTKFVMKYNLMSKDNLIVPILEEEVQNSVSGESEA

SEQ ID NO: 5456 - protein, 390 aa, Homo sapiens
MAAQKDLWDAIVIGAGIQGCFTAYHLAKHRKRILLLEQFFLPHSRGSSHGQSRIIRKAYLEDFYTRMMHECYQIWAQLEHEAGTQLHRQTGLLLLGMKENQELKTIQANLSRQRVEHQCLSSEELKQRFPNIRLPRGEVGLLDNSGGVIYAYKALRALQDAIRQLGGIVRDGEKVVEINPGLLVTVKTTSRSYQAKSLVITAGPWTNQLLRPLGIEMPLQTLRINVCYWREMVPGSYGVSQAFPCFLWLGLCPHHIYGLPTGEYPGLMKVSYHHGNHADPEERDCPTARTDIGDVQILSSFVRDHLPDLKPEPAVIESCMYTNTPDEQFILDRHPKYDNIVIGAGFSGHGFKLAPVVGKILYELSMKLTPSYDLAPFRISRFPSLGKAHL

SEQ ID NO: 5457 - protein, 44 aa, Homo sapiens
MSDKPDMAEIEKFDKSKLKKTEMQEKNPLPSKETIEQEKQASES

SEQ ID NO: 5458 - protein, 440 aa, Homo sapiens
MPIPPPPPPPPGPPPPPTFHQANTEQPKLSRDEQRGRGALLQDICKGTKLKKVTNINDRSAPILEKPKGSSGGYGSGGAALQPKGGLFQGGVLKLRPVGAKDGSENLAGKPALQIPSSRAAAPRPPVSAASGRPQDDTDSSRASLPELPRMQRPSLPDLSRPNTTSSTGMKHSSSAPPPPPPGRRANAPPTPLPMHSSKAPAYNREKPLPPTPGQRLHPGREGPPAPPPVKPPPSPVNIRTGPSGQSLAPPPPPYRQPPGVPNGPSSPTNESAPELPQRHNSLHRKTPGPVRGLAPPPPTSASPSLLSNRPPPPARDPPSRGAAPPPPPPVIRNGARDAPPPPPPYRMHGSEPPSRGKPPPPPSRTPAGPPPPPPPPLRNGHRDSITTVRSFLDDFESKYSFHPVEDFPAPEEYKHFQRIYPSKTNRAARGAPPLPPILR

SEQ ID NO: 5459 - protein, 900 aa, Homo sapiens
MNYPGRGSPRSPEHNGRGGGGGAWELGSDARPAFGGGVCCFEHLPGGDPDDGDVPLALLRGEPGLHLAPGTDDHNHHLALDPCLSDENYDFSSAESGSSLRYYSEGESGGGGSSLSLHPPQQPPLVPTNSGGGGATGGSPGERKRTRLGGPAARHRYEVVTELGPEEVRWFYKEDKKTWKPFIGYDSLRIELAFRTLLQTTGARPQGGDRDGDHVCSPTGPASSSGEDDDEDRACGFCQSTTGHEPEMVELVNIEPVCVRGGLYEVDVTQGECYPVYWNQADKIPVMRGQWFIDGTWQPLEEEESNLIEQEHLNCFRGQQMQENFDIEVSKSIDGKDAVHSFKLSRNHVDWHSVDEVYLYSDATTSKIARTVTQKLGFSKASSSGTRLHRGYVEEATLEDKPSQTTHIVFVVHGIGQKMDQGRIIKNTAMMREAARKIEERHFSNHATHVEFLPVEWRSKLTLDGDTVDSITPDKVRGLRDMLNSSAMDIMYYTSPLYRDELVKGLQQELNRLYSLFCSRNPDFEEKGGKVSIVSHSLGCVITYDIMTGWNPVRLYEQLLQKEEELPDERWMSYEERHLLDELYITKRRLKEIEERLHGLKASSMTQTPALKFKVENFFCMGSPLAVFLALRGIRPGNTGSQDHILPREICNRLLNIFHPTDPVAYRLEPLILKHYSNISPVQIHWYNTSNPLPYEHMKPSFLNPAKEPTSVSENEGISTIPSPVTSPVLSRRHYGESITNIGKASILGAASIGKGLGGMLFSRFGRSSTTQSSETSKDSMEDEKKPVASPSATTVGTQTLPHSSSGFLDSAYFRLQESFFNLPQLLFPENVMQNKDNALVELDHRIDFELREGLVESRYWSAVTSHTAYWSSLDVALFLLTFMYKHEHDDDAKPNLDPI

SEQ ID NO: 5460 - protein, 425 aa, Homo sapiens
MNKMPAGEQECEYNKEGKYYSKGVKLVRKKKKIPGYRWGDIKINIIGEKDDLPIHFCDKCDLPIKIYGRIIPCKHAFCYHCANLYDKVGYKVCPRCRYPVLRIEAHKRGSVFMCSIVQQCKRTYLSQKSLQAHIKRRHKRARKQVTSASLEKVRPHIAPPQTEISDIPKRLQDRDHLSYIPPEQHTMVSLPSVQHMLQEQHNQPHKDIQAPPPELSLSLPFPIQWETVSIFTRKHGNLTVDHIQNNSDSGAKKPTPPDYYPECQSQPAVSSPHHIIPQKQHYAPPPSPSSPVNHQMPYPPQDVVTPNSVRSQVPALTTTYDPSSGYIIVKVPPDMNSPPLRAPQSQNGNPSASEFASHHYNLNILPQFTENQETLSPQFTQTDAMDHRRWPAWKRLSPCPPTRSPPPSTLHGRSHHSHQRRHRRY

SEQ ID NO: 5461 - protein, 641 aa, Homo sapiens
MGPPLKLFKNQKYQELKQECIKDSRLFCDPTFLPENDSLFYNRLLPGKVVWKRPQDICDDPHLIVGNISNHQLTQGRLGHKPMVSAFSCLAVQESHWTKTIPNHKEQEWDPQKTEKYAGIFHFRFWHFGEWTEVVIDDLLPTINGDLVFSFSTSMNEFWNALLEKAYAKLLGCYEALDGLTITDIIVDFTGTLAETVDMQKGRYTELVEEKYKLFGELYKTFTKGGLICCSIESPNQEEQEVETDWGLLKGHTYTMTDIRKIRLGERLVEVFSAEKVYMVRLRNPLGRQEWSGPWSEISEEWQQLTASDRKNLGLVMSDDGEFWMSLEDFCRNFHKLNVCRNVNNPIFGRKELESVLGCWTVDDDPLMNRSGGCYNNRDTFLQNPQYIFTVPEDGHKVIMSLQQKDLRTYRRMGRPDNYIIGFELFKVEMNRKFRLHHLYIQERAGTSTYIDTRTVFLSKYLKKGNYVLVPTMFQHGRTSEFLLRIFSEVPVQLRELTLDMPKMSCWNLARGYPKVVTQITVHSAEDLEKKYANETVNPYLVIKCGKEEVRSPVQKNTVHAIFDTQAIFYRRTTDIPIIVQVWNSRKFCDQFLGQVTLDADPSDCRDLKSLYLRKKGGPTAKVKQGHISFKVISSDDLTEL

SEQ ID NO: 5462 - protein, 1058 aa, Homo sapiens
MAAVAGSGAAAAPSSLLLVVGSEFGSPGLLTYVLEELERGIRSWDVDPGVCNLDEQLKVFVSRHSATFSSIVKGQRSLHHRGDNLETLVLLNPSDKSLYDELRNLLLDPASHKLLVLAGPCLEETGELLLQTGGFSPHHFLQVLKDREIRDILATTPPPVQPPILTITCPTFGDWAQLAPAVPGLQGALRLQLRLNPPAQLPNSEGLCEFLEYVAESLEPPSPFELLEPPTSGGFLRLGRPCCYIFPGGLGDAAFFAVNGFTVLVNGGSNPKSSFWKLVRHLDRVDAVLVTHPGADSLPGLNSLLRRKLAERSEVAAGGGSWDDRLRRLISPNLGVVFFNACEAASRLARGEDEAELALSLLAQLGITPLPLSRGPVPAKPTVLFEKMGVGRLDMYVLHPPSAGAERTLASVCALLVWHPAGPGEKVVRVLFPGCTPPACLLDGLVRLQHLRFLREPVVTPQDLEGPGRAESKESVGSRDSSKREGLLATHPRPGQERPGVARKEPARAEAPRKTEKEAKTPRELKKDPKPSVSRTQPREVRRAASSVPNLKKTNAQAAPKPRKAPSTSHSGFPPVANGPRSPPSLRCGEASPPSAACGSPASQLVATPSLELGPIPAGEEKALELPLAASSIPRAAPSPESHRSPAEGSERLSLSPLRGGEAGPDASPTVTTPTVTTPSLPAEVGSPHSTEVDESLSVSFEQVLPPSAPTSEAGLSLPLRGPRARRSASPHDVDLCLVSPCEFEHRKAVPMAPAPASPGSSNDSSARSQERAGGLGAEETPPTSVSESLPTLSDSDPVPLAPGAADSDEDTEGFGVPRHDPLPDPLKVPPPLPDPSSICMVDPEMLPPKTARQTENVSRTRKPLARPNSRAAAPKATPVAAAKTKGLAGGDRASRPLSARSEPSEKGGRAPLSRKSSTPKTATRGPSGSASSRPGVSATPPKSPVYLDLAYLPSGSSAHLVDEEFFQRVRALCYVISGQDQRKEEGMRAVLDALLASKQHWDRDLQVTLIPTFDSVAMHTWYAETHARHQALGITVLGSNSMVSMQDDAFPACKVEF

SEQ ID NO: 5463 - protein, 1579 aa, Homo sapiens
MEAGSVVRAIFDFCPSVSEELPLFVGDIIEVLAVVDEFWLLGKKEDVTGQFPSSFVEIVTIPSLKEGERLFVCICEFTSQELDNLPLHRGDLVILDGIPTAGWLQGRSCWGARGFFPSSCVRELCLSSQSRQWHSQSALFQIPEYSMGQARALMGLSAQLDEELDFREGDVITIIGVPEPGWFEGELEGRRGIFPEGFVELLGPLRTVDESVSSGNQDDCIVNGEVDTPVGEEEIGPDEDEEEPGTYGVALYRFQALEPNELDFEVGDKIRILATLEDGWLEGSLKGRTGIFPYRFVKLCPDTRVEETMALPQEGSLARIPETSLDCLENTLGVEEQRHETSDHEAEEPDCIISEAPTSPLGHLTSEYDTDRNSYQDEDTAGGPPRSPGVEWEMPLATDSPTSDPTEVVNGISSQPQVPFHPNLQKSQYYSTVGGSHPHSEQYPDLLPLEARTRDYASLPPKRMYSQLKTLQKPVLPLYRGSSVSASRVVKPRQSSPQLHNLASYTKKHHTSSVYSISERLEMKPGPQAQGLVMEAATHSQGDGSTDLDSKLTQQLIEFEKSLAGPGTEPDKILRHFSIMDFNSEKDIVRGSSKLITEQELPERRKALRPPPPRPCTPVSTSPHLLVDQNLKPAPPLVVRPSRPAPLPPSAQQRTNAVSPKLLSRHRPTCETLEKEGPGHMGRSLDQTSPCPLVLVRIEEMERDLDMYSRAQEELNLMLEEKQDESSRAETLEDLKFCESNIESLNMELQQLREMTLLSSQSSSLVAPSGSVSAENPEQRMLEKRAKVIEELLQTERDYIRDLEMCIERIMVPMQQAQVPNIDFEGLFGNMQMVIKVSKQLLAALEISDAVGPVFLGHRDELEGTYKIYCQNHDEAIALLEIYEKDEKIQKHLQDSLADLKSLYNEWGCTNYINLGSFLIKPVQRVMRYPLLLMELLNSTPESHPDKVPLTNAVLAVKEINVNINEYKRRKDLVLKYRKGDEDSLMEKISKLNIHSIIKKSNRVSSHLKHLTGFAPQIKDEVFEETEKNFRMQERLIKSFIRDLSLYLQHIRESACVKVVAAVSMWDVCMERGHRDLEQFERVHRYISDQLFTNFKERTERLVISPLNQLLSMFTGPHKLVQKRFDKLLDFYNCTERAEKLKDKKTLEELQSARNNYEALNAQLLDELPKFHQYAQGLFTNCVHGYAEAHCDFVHQALEQLKPLLSLLKVAGREGNLIAIFHEEHSRVLQQLQVFTFFPESLPATKKPFERKTIDRQSAARGSPLLGLPSYMLQSEELRASLLARYPPEKLFQAERNFNAAQDLDVSLLEGDLVGVIKKKDPMGSQNRWLIDNGVTKGFVYSSFLKPYNPRRSHSDASVGSHSSTESEHGSSSPRFPRQNSGSTLTFNPSSMAVSFTSGSCQKQPQDASPPPKECDQGTLSASLNPSNSESSPSRCPSDPDSTSQPRSGDSADVARDVKQPTATPRSYRNFRHPEIVGYSVPGRNGQSQDLVKGCARTAQAPEDRSTEPDGSEAEGNQVYFAVYTFKARNPNELSVSANQKLKILEFKDVTGNTEWWLAEVNGKKGYVPSNYIRKTEYT

SEQ ID NO: 5464 - protein, 1060 aa, Homo sapiens
MLRTAGRDGLCRLSTYLEELEAVELKKFKLYLGTATELGEGKIPWGSMEKAGPLEMAQLLITHFGPEEAWRLALSTFERINRKDLWERGQREDLVRDTPPGGPSSLGNQSTCLLEVSLVTPRKDPQETYRDYVRRKFRLMEDRNARLGECVNLSHRYTRLLLVKEHSNPMQVQQQLLDTGRGHARTVGHQASPIKIETLFEPDEERPEPAAVVMQGAAGIGKSMLAHKVMLDWADGKLFQGRFDYLFYINCREMNQSATECSMQDLIFSCWPEPSAPLQELIRVPERLLFIIDGFDELKPSFHDPQGPWCLCWEEKRPTELLLNSLIRKKLLPELSLLITTRPTALEKLHRLLEHPRHVEILGFSEAERKEYFYKYFHNAEQAGQVFNYVRDNEPLFTMCFVPLVCWVVCTCLQQQLEGGGLLRQTSRTTTAVYMLYLLSLMQPKPGAPRLQPPPNQRGLCSLAADGLWNQKILFEEQDLRKHGLDGEDVSAFLNMNIFQKDINCERYYSFIHLSFQEFFAAMYYILDEGEGGAGPDQDVTRLLTEYAFSERSFLALTSRFLFGLLNEETRSHLEKSLCWKVSPHIKMDLLQWIQSKAQSDGSTLQQGSLEFFSCLYEIQEEEFIQQALSHFQVIVVSNIASKMEHMVSSFCLKRCRSAQVLHLYGATYSADGEDRARCSAGAHTLLVQLPERTVLLDAYSEHLAAALCTNPNLIELSLYRNALGSRGVKLLCQGLRHPNCKLQNLRLKRCRISSSACEDLSAALIANKNLTRMDLSGNGVGFPGMMLLCEGLRHPQCRLQMIQLRKCQLESGACQEMASVLGTNPHLVELDLTGNALEDLGLRLLCQGLRHPVCRLRTLWLKICRLTAAACDELASTLSVNQSLRELDLSLNELGDLGVLLLCEGLRHPTCKLQTLRLGICRLGSAACEGLSVVLQANHNLRELDLSFNDLGDWGLWLLAEGLQHPACRLQKLWLDSCGLTAKACENLYFTLGINQTLTDLYLTNNALGDTGVRLLCKRLSHPGCKLRVLWLFGMDLNKMTHSRLAALRVTKPYLDIGC

SEQ ID NO: 5465 - protein, 1322 aa, Homo sapiens
MANDSPAKSLVDIDLSSLRDPAGIFELVEVVGNGTYGQVYKGRHVKTGQLAAIKVMDVTEDEEEEIKLEINMLKKYSHHRNIATYYGAFIKKSPPGHDDQLWLVMEFCGAGSITDLVKNTKGNTLKEDWIAYISREILRGLAHLHIHHVIHRDIKGQNVLLTENAEVKLVDFGVSAQLDRTVGRRNTFIGTPYWMAPEVIACDENPDATYDYRSDLWSCGITAIEMAEGAPPLCDMHPMRALFLIPRNPPPRLKSKKWSKKFFSFIEGCLVKNYMQRPSTEQLLKHPFIRDQPNERQVRIQLKDHIDRTRKKRGEKDETEYEYSGSEEEEEEVPEQEGEPSSIVNVPGESTLRRDFLRLQQENKERSEALRRQQLLQEQQLREQEEYKRQLLAERQKRIEQQKEQRRRLEEQQRREREARRQQEREQRRREQEEKRRLEELERRRKEEEERRRAEEEKRRVEREQEYIRRQLEEEQRHLEVLQQQLLQEQAMLLECRWREMEEHRQAERLQRQLQQEQAYLLSLQHDHRRPHPQHSQQPPPPQQERSKPSFHAPEPKAHYEPADRAREVEDRFRKTNHSSPEAQSKQTGRVLEPPVPSRSESFSNGNSESVHPALQRPAEPQVQWSHLASLKNNVSPVSRSHSFSDPSPKFAHHHLRSQDPCPPSRSEVLSQSSDSKSEAPDPTQKAWSRSDSDEVPPRVPVRTTSRSPVLSRRDSPLQGSGQQNSQAGQRNSTSSIEPRLLWERVEKLVPRPGSGSSSGSSNSGSQPGSHPGSQSGSGERFRVRSSSKSEGSPSQRLENAVKKPEDKKEVFRPLKPAVRIDLTALAKELRAVEDVRPPHKVTDYSSSSEESGTTDEEDDDVEQEGADESTSGPEDTRAASSLNLSNGETESVKTMIVHDDVESEPAMTPSKEGTLIVRQTQSASSTLQKHKSSSSFTPFIDPRLLQISPSSGTTVTSVVGFSCDGMRPEAIRQDPTRKGSVVNVNPTNTRPQSDTPEIARGSYKKRFNSEILCAALWGVNLLVGTESGLMLLDRSGQGKVYPLINRRRFQQMDVLEGLNVLVTISGKKDKLRVYYLSWLRNKILHNDPEVEKKQGWTTVGDLEGCVHYKVVKYERIKFLVIALKSSVEVYAWAPKPYHKFMAFKSFGELVHKPLLVDLTVEEGQRLKVIYGSCAGFHAVDVDSGSVYDIYLPTHIQCSIKPHAIIILPNTDGMELLVCYEDEGVYVNTYGRITKDVVLQWGEMPTSVAYIRSNQTMGWGEKAIEIRSVETGHLDGVFMHKRAQRLKFLCERNDKVFFASVRSGGSSQVYFMTLGRTSLLSW

SEQ ID NO: 5466 - protein, 201 aa, Homo sapiens
MYTLLSGLYKYMFQKDEYCILILGLDNAGKTTFLEQSKTRFNKNYKGMSLSKITTTVGLNIGTVDVGKARLMFWDLGGQEELQSLWDKYYAECHGVIYVIDSTDEERLAESKQAFEKVVTSEALCGVPVLVLANKQDVETCLSIPDIKTAFSDCTSKIGRRDCLTQACSALTGKGVREGIEWMVKCVVRNVHRPPRQRDIT

SEQ ID NO: 5467 - protein, 442 aa, Homo sapiens
MRGAMELEPELLLQEARENVEAAQSYRRELGHRLEGLREARRQIKESASQTRDVLKQHFNDLKGTLGKLLDERLVTLLQEVDTIEQETIKPLDDCQKLIEHGVNTAEDLVREGEIAMLGGVGEENEKLWSFTKKASHIQLDSLPEVPLLVDVPCLSAQLDDSILNIVKDHIFKHGTVASRPPVQIEELIEKPGGIIVRWCKVDDDFTAQDYRLQFRKCTSNHFEDVYVGSETEFIVLHIDPNVDYQFRVCARGDGRQEWSPWSVPQIGHSTLVPHEWTAGFEGYSLSSRRNIALRNDSESSGVLYSRAPTYFCGQTLTFRVETVGQPDRRDSIGVCAEKQDGYDSLQRDQAVCISTNGAVFVNGKEMTNQLPAVTSGSTVTFDIEAVTLGTTSNNEGGHFKLRVTISSNNREVVFDWLLDQSCGSLYFGCSFFYPGWKVLVF

SEQ ID NO: 5468 - protein, 475 aa, Homo sapiens
MAALTTLFKYIDENQDRYIKKLAKWVAIQSVSAWPEKRGEIRRMMEVAAADVKQLGGSVELVDIGKQKLPDGSEIPLPPILLGRLGSDPQKKTVCIYGHLDVQPAALEDGWDSEPFTLVERDGKLYGRGSTDDKGPVAGWINALEAYQKTGQEIPVNVRFCLEGMEESGSEGLDELIFARKDTFFKDVDYVCISDNYWLGKKKPCITYGLRGICYFFIEVECSNKDLHSGVYGGSVHEAMTDLILLMGSLVDKRGNILIPGINEAVAAVTEEEHKLYDDIDFDIEEFAKDVGAQILLHSHKKDILMHRWRYPSLSLHGIEGAFSGSGAKTVIPRKVVGKFSIRLVPNMTPEVVGEQVTSYLTKKFAELRSPNEFKVYMGHGGKPWVSDFSHPHYLAGRRAMKTVFGVEPDLTREGGSIPVTLTFQEATGKNVMLLPVGSADDGAHSQNEKLNRYNYIEGTKMLAAYLYEVSQLKD

SEQ ID NO: 5469 - protein, 2098 aa, Homo sapiens
MAEVTVPRVYVVFGIHCIMAKASSDVQVSGFHRKIQHVKNELCHMLSLEEVAPVLQQTLLQDNLLGRVHFDQFKEALILILSRTLSNEEHFQEPDCSLEAQPKYVRGGKRYGRRSLPEFQESVEEFPEVTVIEPLDEEARPSHIPAGDCSEHWKTQRSEEYEAEGQLRFWNPDDLNASQSGSSPPQDWIEEKLQEVCEDLGITRDGHLNRKKLVSICEQYGLQNVDGEMLEEVFHNLDPDGTMSVEDFFYGLFKNGKSLTPSASTPYRQLKRHLSMQSFDESGRRTTTSSAMTSTIGFRVFSCLDDGMGHASVERILDTWQEEGIENSQEILKALDFSLDGNINLTELTLALENELLVTKNSIHQAALASFKAEIRHLLERVDQVVREKEKLRSDLDKAEKLKSLMASEVDDHHAAIERRNEYNLRKLDEEYKERIAALKNELRKEREQILQQAGKQRLELEQEIEKAKTEENYIRDRLALSLKENSRLENELLENAEKLAEYENLTNKLQRNLENVLAEKFGDLDPSSAEFFLQEERLTQMRNEYERQCRVLQDQVDELQSELEEYRAQGRVLRLPLKNSPSEEVEANSGGIEPEHGLGSEECNPLNMSIEAELVIEQMKEQHHRDICCLRLELEDKVRHYEKQLDETVVSCKKAQENMKQRHENETHTLEKQISDLKNEIAELQGQAAVLKEAHHEATCRHEEEKKQLQVKLEEEKTHLQEKLRLQHEMELKARLTQAQASFEREREGLQSSAWTEEKVRGLTQELEQFHQEQLTSLVEKHTLEKEELRKELLEKHQRELQEGREKMETECNRRTSQIEAQFQSDCQKVTERCESALQSLEGRYRQELKDLQEQQREEKSQWEFEKDELTQECAEAQELLKETLKREKTTSLVLTQEREMLEKTYKEHLNSMVVERQQLLQDLEDLRNVSETQQSLLSDQILELKSSHKRELREREEVLCQAGASEQLASQRLERLEMEHDQERQEMMSKLLAMENIHKATCETADRERAEMSTEISRLQSKIKEMQQATSPLSMLQSGCQVIGEEEVEGDGALSLLQQGEQLLEENGDVLLSLQRAHEQAVKENVKMATEISRLQQRLQKLEPGLVMSSCLDEPATEFFGNTAEQTEQFLQQNRTKQVEGVTRRHVLSDLEDDEVRDLGSTGTSSVQRQEVKIEESEASVEGFSELENSEETRTESWELKNQISQLQEQLMMLCADCDRASEKKQDLLFDVSVLKKKLKMLERIPEASPKYKLLYEDVSRENDCLQEELRMMETRYDEALENNKELTAEVFRLQDELKKMEEVTETFLSLEKSYDEVKIENEGLNVLVLRLQGKIEKLQESVVQRCDCCLWEASLENLEIEPDGNILQLNQTLEECVPRVRSVHHVIEECKQENQYLEGNTQLLEKVKAHEIAWLHGTIQTHQERPRVQNQVILEENTTLLGFQDKHFQHQATIAELELEKTKLQELTRKLKERVTILVKQKDVLSHGEKEEELKAMMHDLQITCSEMQQKVELLRYESEKLQQENSILRNEITTLNEEDSISNLKLGTLNGSQEEMWQKTETVKQENAAVQKMVENLKKQISELKIKNQQLDLENTELSQKNSQNQEKLQELNQRLTEMLCQKEKEPGNSALEEREQEKFNLKEELERCKVQSSTLVSSLEAELSEVKIQTHIVQQENHLLKDELEKMKQLHRCPDLSDFQQKISSVLSYNEKLLKEKEALSEELNSCVDKLAKSSLLEHRIATMKQEQKSWEHQSASLKSQLVASQEKVQNLEDTVQNVNLQMSRMKSDLRVTQQEKEALKQEVMSLHKQLQNAGGKSWAPEIATHPSGLHNQQKRLSWDKLDHLMNEEQQLLWQENERLQTMVQNTKAELTHSREKVRQLESNLLPKHQKHLNPSGTMNPTEQEKLSLKRECDQFQKEQSPANARGSVSQMNSLEQELETIHLENEGLKKKQVKLDEQLMEMQHLRSTATPSPSPHAWDLQLLQQQACPMVPREQFLQLQRQLLQAERINQHLQEELENRTSETNTPQGNQEQLVTVMEERMIEVEQKLKLVKRLLQEKVNQLKEQVSLPGHLCSPTSHSSFNSSFTSLYCH

SEQ ID NO: 5470 - protein, 391 aa, Homo sapiens
MAALTTLFKYIDENQDRYIKKLAKWVAIQSVSAWPEKRGEIRRMMEVAAADVKQLGGSVELVDIGKQKEIPVNVRFCLEGMEESGSEGLDELIFARKDTFFKDVDYVCISDNYWLGKKKPCITYGLRGICYFFIEVECSNKDLHSGVYGGSVHEAMTDLILLMGSLVDKRGNILIPGINEAVAAVTEEEHKLYDDIDFDIEEFAKDVGAQILLHSHKKDILMHRWRYPSLSLHGIEGAFSGSGAKTVIPRKVVGKFSIRLVPNMTPEVVGEQVTSYLTKKFAELRSPNEFKVYMGHGGKPWVSDFSHPHYLAGRRAMKTVFGVEPDLTREGGSIPVTLTFQEATGKNVMLLPVGSADDGAHSQNEKLNRYNYIEGTKMLAAYLYEVSQLKD

SEQ ID NO: 5471 - protein, 1989 aa, Homo sapiens
MDEVEQDQHEARLKELFDSFDTTGTGSLGQEELTDLCHMLSLEEVAPVLQQTLLQDNLLGRVHFDQFKEALILILSRTLSNEEHFQEPDCSLEAQPKYVRGGKRYGRRSLPEFQESVEEFPEVTVIEPLDEEARPSHIPAGDCSEHWKTQRSEEYEAEGQLRFWNPDDLNASQSGSSPPQDWIEEKLQEVCEDLGITRDGHLNRKKLVSICEQYGLQNVDGEMLEEVFHNLDPDGTMSVEDFFYGLFKNGKSLTPSASTPYRQLKRHLSMQSFDESGRRTTTSSAMTSTIGFRVFSCLDDGMGHASVERILDTWQEEGIENSQEILKALDFSLDGNINLTELTLALENELLVTKNSIHQAALASFKAEIRHLLERVDQVVREKEKLRSDLDKAEKLKSLMASEVDDHHAAIERRNEYNLRKLDEEYKERIAALKNELRKEREQILQQAGKQRLELEQEIEKAKTEENYIRDRLALSLKENSRLENELLENAEKLAEYENLTNKLQRNLENVLAEKFGDLDPSSAEFFLQEERLTQMRNEYERQCRVLQDQVDELQSELEEYRAQGRVLRLPLKNSPSEEVEANSGGIEPEHGLGSEECNPLNMSIEAELVIEQMKEQHHRDICCLRLELEDKVRHYEKQLDETVVSCKKAQENMKQRHENETHTLEKQISDLKNEIAELQGQAAVLKEAHHEATCRHEEEKKQLQVKLEEEKTHLQEKLRLQHEMELKARLTQAQASFEREREGLQSSAWTEEKVRGLTQELEQFHQEQLTSLVEKHTLEKEELRKELLEKHQRELQEGREKMETECNRRTSQIEAQFQSDCQKVTERCESALQSLEGRYRQELKDLQEQQREEKSQWEFEKDELTQECAEAQELLKETLKREKTTSLVLTQEREMLEKTYKEHLNSMVVERQQLLQDLEDLRNVSETQQSLLSDQILELKSSHKRELREREEVLCQAGASEQLASQRLERLEMEHDQERQEMMSKLLAMENIHKATCETADRERAEMSTEISRLQSKIKEMQQATSPLSMLQSGCQVIGEEEVEGDGALSLLQQGEQLLEENGDVLLSLQRAHEQAVKENVKMATEISRLQQRLQKLEPGLVMSSCLDEPATEFFGNTAEQTEQFLQQNRTKQVEGVTRRHVLSDLEDDEVRDLGSTGTSSVQRQEVKIEESEASVEGFSELENSEETRTESWELKNQISQLQEQLMMLCADCDRASEKKQDLLFDVSVLKKKLKMLERIPEASPKYKLLYEDVSRENDCLQEELRMMETRYDEALENNKELTAEVFRLQDELKKMEEVTETFLSLEKSYDEVKIENEGLNVLVLRLQGKIEKLQESVVQRCDCCLWEASLENLEIEPDGNILQLNQTLEECVPRVRSVHHVIEECKQENQYLEGNTQLLEKVKAHEIAWLHGTIQTHQERPRVQNQVILEENTTLLGFQDKHFQHQATIAELELEKTKLQELTRKLKERVTILVKQKDVLSHGEKEEELKAMMHDLQITCSEMQQKVELLRYESEKLQQENSILRNEITTLNEEDSISNLKLGTLNGSQEEMWQKTETVKQENAAVQKMVENLKKQISELKIKNQQLDLENTELSQKNSQNQEKLQELNQRLTEMLCQKEKEPGNSALEEREQEKFNLKEELERCKVQSSTLVSSLEAELSEVKIQTHIVQQENHLLKDELEKMKQLHRCPDLSDFQQKISSVLSYNEKLLKEKEALSEELNSCVDKLAKSSLLEHRIATMKQEQKSWEHQSASLKSQLVASQEKVQNLEDTVQNVNLQMSRMKSDLRVTQQEKEALKQEVMSLHKQLQNAGGKSWAPEIATHPSGLHNQQKRLSWDKLDHLMNEEQQLLWQENERLQTMVQNTKAELTHSREKVRQLESNLLPKHQKHLNPSGTMNPTEQEKLSLKRECDQFQKEQSPANRKVSQMNSLEQELETIHLENEGLKKKQVKLDEQLMENSVVGSSREGCSSLPEIVCEDAAPEVHCDA

SEQ ID NO: 5472 - protein, 304 aa, Homo sapiens
MGQCVTKCKNPSSTLGSKNGDREPSNKSHSRRGAGHREEQVPPCGKPGGDILVNGTKKAEAATEACQLPTSSGDAGRESKSNAEESSLQRLEELFRRYKDEREDAILEEGMERFCNDLCVDPTEFRVLLLAWKFQAATMCKFTRKEFFDGCKAISADSIDGICARFPSLLTEAKQEDKFKDLYRFTFQFGLDSEEGQRSLHREIAIALWKLVFTQNNPPVLDQWLNFLTENPSGIKGISRDTWNMFLNFTQVIGPDLSNYSEDEAWPSLFDTFVEWEMERRKREGEGRGALSSGPEGLCPEEQT

SEQ ID NO: 5473 - protein, 637 aa, Homo sapiens
MAAMAVGGAGGSRVSSGRDLNCVPEIADTLGAVAKQGFDFLCMPVFHPRFKREFIQEPAKNRPGPQTRSDLLLSGRDWNTLIVGKLSPWIRPDSKVEKIRRNSEAAMLQELNFGAYLGLPAFLLPLNQEDNTNLARVLTNHIHTGHHSSMFWMRVPLVAPEDLRDDIIENAPTTHTEEYSGEEKTWMWWHNFRTLCDYSKRIAVALEIGADLPSNHVIDRWLGEPIKAAILPTSIFLTNKKGFPVLSKMHQRLIFRLLKLEVQFIITGTNHHSEKEFCSYLQYLEYLSQNRPPPNAYELFAKGYEDYLQSPLQPLMDNLESQTYEVFEKDPIKYSQYQQAIYKCLLDRVPEEEKDTNVQVLMVLGAGRGPLVNASLRAAKQADRRIKLYAVEKNPNAVVTLENWQFEEWGSQVTVVSSDMREWVAPEKADIIVSELLGSFADNELSPECLDGAQHFLKDDGVSIPGEYTSFLAPISSSKLYNEVRACREKDRDPEAQFEMPYVVRLHNFHQLSAPQPCFTFSHPNRDPMIDNNRYCTLEFPVEVNTVLHGFAGYFETVLYQDITLSIRPETHSPGMFSWFPILFPIKQPITVREGQTICVRFWRCSNSKKVWYEWAVTAPVCSAIHNPTGRSYTIGL

SEQ ID NO: 5474 - protein, 346 aa, Homo sapiens
MAPGSVTSDISPSSTSTAGSSRSPESEKPGPSHGGVPPGGPSHSSLPVGRRHPPVLRMVLEALQAGEQRRGTSVAAIKLYILHKYPTVDVLRFKYLLKQALATGMRRGLLARPLNSKARGATGSFKLVPKHKKKIQPRKMAPATAPRRAGEAKGKGPKKPSEAKEDPPNVGKVKKAAKRPAKVQKPPPKPGAATEKARKQGGAAKDTRAQSGEARKVPPKPDKAMRAPSSAGGLSRKAKAKGSRSSQGDAEAYRKTKAESKSSKPTASKVKNGAASPTKKKVVAKAKAPKAGQGPNTKAAAPAKGSGSKVVPAHLSRKTEAPKGPRKAGLPIKASSSKVSSQRAEA

SEQ ID NO: 5475 - protein, 622 aa, Homo sapiens
MAMAPSPSLVQVYTSPAAVAVWEWQDGLGTWHPYSATVCSFIEQQFVQQKGQRFGLGSLAHSIPLGQADPSLAPYIIDLPSWTQFRQDTGTMRAVRRHLFPQHSAPGRGVVWEWLSDDGSWTAYEASVCDYLEQQVARGNQLVDLAPLGYNYTVNYTTHTQTNKTSSFCRSVRRQAGPPYPVTTIIAPPGHTGVACSCHQCLSGSRTGPVSGRYRHSMTNLPAYPVPQHPPHRTASVFGTHQAFAPYNKPSLSGARSAPRLNTTNAWGAAPPSLGSQPLYRSSLSHLGPQHLPPGSSTSGAVSASLPSGPSSSPGSVPATVPMQMPKPSRVQQALAGMTSVLMSAIGLPVCLSRAPQPTSPPASRLASKSHGSVKRLRKMSVKGATPKPEPEPEQVIKNYTEELKVPPDEDCIICMEKLSTASGYSDVTDSKAIGSLAVGHLTKCSHAFHLLCLLAMYCNGNKDGSLQCPSCKTIYGEKTGTQPQGKMEVLRFQMSLPGHEDCGTILIVYSIPHGIQGPEHPNPGKPFTARGFPRQCYLPDNAQGRKVLELLKVAWKRRLIFTVGTSSTTGETDTVVWNEIHHKTEMDRNITGHGYPDPNYLQNVLAELAAQGVTEDCLEQQ

SEQ ID NO: 5476 - protein, 261 aa, Homo sapiens
MAATAREDGASGQERGQRGCEHYDRGCLLKAPCCDKLYTCRLCHDNNEDHQLDRFKVKEVQCINCEKIQHAQQTCEECSTLFGEYYCDICHLFDKDKKQYHCENCGICRIGPKEDFFHCLKCNLCLAMNLQGRHKCIENVSRQNCPICLEDIHTSRVVAHVLPCGHLLHRTCYEEMLKEGYRCPLCMHSALDMTRYWRQLDDEVAQTPMPSEYQNMTVDILCNDCNGRSTVQFHILGMKCKICESYNTAQAGGRRISLDQQ

SEQ ID NO: 5477 - protein, 659 aa, Homo sapiens
LSLPSVTYLLLEVIPDSMRKQEVRTGREAGQGHGTGSPAEQVKALMDLLAGKGSQGSQAPQALDRTPDAPLGPCSNDSRIQRHRKALLSKVEATRGGGHPARTVALDRLFLPLSRVSVPPRVSITIGVAGMGKTTLVRHFVRLWAHGQVGKDFSLVLPLTFRDLNTHEKLCADRLICSVFPHVGEPSLAVAVPARALLILDGLDECRTPLDFSNTVACTDPKKEIPVDHLITNIIRGNLFPEVSIWITSRPSASGQIPGGLVDRMTEIRGFNEEEIKVCLEQMFPEDQALLGWMLSQVQADRALYLMCTVPAFCRLTGMALGHLWRSRTGPQDAELWPAALCELYSWYFRMALSGEGQEKGKASPRIEQVAHGGRKMVGTLGRLAFHGLLKKKYVFYEQDMKAFGVDLALLQGAPCSCFLQREETLASSVAYCFTHLSLQEFVAAAYYYGASRRAIFDLFTESGVSWPRLGFLTHFRSAAQRAMQAEDGRLDVFLRFLSGLLSPRVNALLAGSLLAQGEHQAYRTQVAELLQGCLRPDAAVCARAINVLHCLHELQHTELARSVEEAMESGALARLTGPAHRAALAYLLQVSDACAQEANLSLSLSQGVLQSLLPQLLYCRKLRWIPGQGAGAGEGAEERAEAVPSPPPSFSVSLLGLP

SEQ ID NO: 5478 - protein, 383 aa, Homo sapiens
MLSRKKTKNEVSKPAEVQGKYVKKETSPLLRNLMPSFIRHGPTIPRRTDICLPDSSPNAFSTSGDVVSRNQSFLRTPIQRTPHEIMRRESNRLSAPSYLARSLADVPREYGSSQSFVTEVSFAVENGDSGSRYYYSDNFFDGQRKRPLGDRAHEDYRYYEYNHDLFQRMPQNQGRHASGIGRVAATSLGNLTNHGSEDLPLPPGWSVDWTMRGRKYYIDHNTNTTHWSHPLEREGLPPGWERVESSEFGTYYVDHTNKKAQYRHPCAPSVPRYDQPPPVTYQPQQTERNQSLLVPANPYHTAEIPDWLQVYARAPVKYDHILKWELFQLADLDTYQGMLKLLFMKELEQIVKMYEAYRQALLTELENRKQRQQWYAQQHGKNF

SEQ ID NO: 5479 - protein, 791 aa, Homo sapiens
MSNQQEKYEAQNIVNSTEESDDAFDTVTIPVPSEEPQESDQTEEHESGIEQFSESHAIHVEEQSDQSFSSLEPDNEQLMEEVISPRQVSYTPQHHEKQYAMQRPNDDSLAFLDKIKSVKESLQESVEDSLATVKVVLIPVGQEIVIPFKVDTILKYLKDHFSHLLGIPHSVLQIRYSGKILKNNETLVQHGVKPQEIVQVEIFSTNPDLYPVRRIDGLTDVSQIITVTVQTGLDQYQQVPVEIVKSDFHKPFLGGFRHKVTGVEYHNAGTQTVPKRIPERLSIFCRDTQTVFQKKNLQQTTNTTSTQMTNIGVYVSNMTDKLVTPGKYFSAAEYHAQRLKAVIVIQTYYRQWHAKIFVENLRRQKSLRLEWETQQELRKIREKEEWIKLDYHRRHNPKTNEDFEFLYNALEFWRQEELTRINQSFTGAERKAALCELLEKETQIIASIGRHRYIAYMANQEAAIQAFLDKCSAPKIWRTPNGKTIEMDTQFTIRARELQNIYKCIMLKNISQDERLDVLLTLKHTVKEHECKLTQEILELIDREVDLMMRGVKHHNLEGLRKRIATLFFHYIKTPLFNPEVAKYLKVPQDPLKFYKKIYFCHSCQLYLPSTEFSVSSTSRRIYRCRNCINLQNEAQKRESFLKYKCLLQQLYYTEADYEDDSKIAFLMQLQDIQYLTENIWASQSVLSACDNLSDLVMVRWNKSLEWSPWNCILLTKDEAAAHLKLTSIEEGYERSFIHKIKHKHILAKNYFSQVPVLASFILDDGEIDEIRWKYHSDTTPKIIESQRPPH

SEQ ID NO: 5480 - protein, 588 aa, Homo sapiens
MSSCVSSQPSSNRAAPQDELGGRGSSSSESQKPCEALRGLSSLSIHLGMESFIVVTECEPGCAVDLGLARDRPLEADGQEVPLDTSGSQARPHLSGRKLSLQERSQGGLAAGGSLDMNGRCICPSLPYSPVSSPQSSPRLPRRPTVESHHVSITGMQDCVQLNQYTLKDEIGKGSYGVVKLAYNENDNTYYAMKVLSKKKLIRQAGFPRRPPPRGTRPAPGGCIQPRGPIEQVYQEIAILKKLDHPNVVKLVEVLDDPNEDHLYMVFELVNQGPVMEVPTLKPLSEDQARFYFQDLIKGIEYLHYQKIIHRDIKPSNLLVGEDGHIKIADFGVSNEFKGSDALLSNTVGTPAFMAPESLSETRKIFSGKALDVWAMGVTLYCFVFGQCPFMDERIMCLHSKIKSQALEFPDQPDIAEDLKDLITRMLDKNPESRIVVPEIKLHPWVTRHGAEPLPSEDENCTLVEVTEEEVENSVKHIPSLATVILVKTMIRKRSFGNPFEGSRREERSLSAPGNLLTKKPTRECESLSELKEARQRRQPPGHRPAPRGGGGSALVRGSPCVESCWAPAPGSPARMHPLRPEEAMEPE

SEQ ID NO: 5481 - protein, 683 aa, Homo sapiens
MALSKRELDELKPWIEKTVKRVLGFSEPTVVTAALNCVGKGMDKKKAADHLKPFLDDSTLRFVDKLFEAVEEGRSSRHSKSSSDRSRKRELKEVFGDDSEISKESSGVKKRRIPRFEEVEEEPEVIPGPPSESPGMLTKLQIKQMMEAATRQIEERKKQLSFISPPTPQPKTPSSSQPERLPIGNTIQPSQAATFMNDAIEKARKAAELQARIQAQLALKPGLIGNANMVGLANLHAMGIAPPKVELKDQTKPTPLILDEQGRTVDATGKEIELTHRMPTLKANIRAVKREQFKQQLKEKPSEDMESNTFFDPRVSIAPSQRQRRTFKFHDKGKFEKIAQRLRTKAQLEKLQAEISQAARKTGIHTSTRLALIAPKKELKEGDIPEIEWWDSYIIPNGFDLTEENPKREDYFGITNLVEHPAQLNPPVDNDTPVTLGVYLTKKEQKKLRRQTRREAQKELQEKVRLGLMPPPEPKVRISNLMRVLGTEAVQDPTKVEAHVRAQMAKRQKAHEEANAARKLTAEQRKVKKIKKLKEDISQGVHISVYRVRNLSNPAKKFKIEANAGQLYLTGVVVLHKDVNVVVVEGGPKAQKKFKRLMLHRIKWDEQTSNTKGDDDEESDEEAVKKTNKCVLVWEGTAKDRSFGEMKFKQCPTENMAREHFKKHGAEHYWDLALSESVLESTD

SEQ ID NO: 5482 - protein, 645 aa, Homo sapiens
MSDKSDLKAELERKKQRLAQIREEKKRKEEERKKKEADMQQKKEPVQDDSDLDRKRRETEALLQSIGISPEPPLVQPLHFLTWDTCYFHYLVPTPMSPSSKSVSTPSEAGSQDSGDLGPLTRTLQWDTDPSVLQLQSDSELGRRLHKLGVSKVTQVDFLPREVVSYSKETQTPLATHQSEEDEEDEEMVESKVGQDSELENQDKKQEVKEAPPRELTEEEKQQILHSEEFLIFFDRTIRVIERALAEDSDIFFDYSGRELEEKDGDVQAGANLSFNRQFYDEHWSKHRVVTCMDWSLQYPELMVASYNNNEDAPHEPDGVALVWNMKFKKTTPEYVFHCQSSVMSVCFARFHPNLVVGGTYSGQIVLWDNRSHRRTPVQRTPLSAAAHTHPVYCVNVVGTQNAHNLITVSTDGKMCSWSLDMLSTPQESMELVYNKSKPVAVTGMAFPTGDVNNFVVGSEEGTVYTACRHGSKAGIGEVFEGHQGPVTGINCHMAVGPIDFSHLFVTSSFDWTVKLWTTKHNKPLYSFEDNADYVYDVMWSPVHPALFACVDGMGRLDLWNLNNDTEVPTASVAIEGASALNRVRWAQAGKEVAVGDSEGRIWVYDVGELAVPHNDEWTRFARTLVEIRANRADSEEEGTVELSA

SEQ ID NO: 5483 - protein, 2604 aa, Homo sapiens
MKRKVVNTHKLRLSPNEEAFILKEDYERRRKLRLLQVREQERDIALQIREDIKQRRNQQFTRLAEELRAEWEESQTQKIQNLEKLYLASLRSMGEGHRQAKENEPDLDALAQRAAERKRKADLRHKEALKVQKNQKEILLKQKTWHIKARKEALLVEKERSAKITSLPPPPPTLFENIEVKRISAVKTNSSTYHHLHTFVNRETDTKRPDARLAAEEEAKRLEELQKQAAQERMERFEKAHVRGFQAMKKIHLAQNQEKLMKELKQLQQEDLARRRQTVAQMPPQLVELPYKRSEMKEDWQRELEFAFEDMYNADRKVKGNLILHLEPEPLPTVTNQIQDEELDLSMEQENLGAAEDLPVTEAEICSSETDVPLVMKTQQIPSKVLFKKLLNKIRSQKSLWTIKSMSEDESEMITTVSEIESKAPTVESGTIASKERTLSSGQEQVVESDTLTIESGPLASEDKPLSCGTNSGKEQEINETLPITTVAQSSVLLHPQEAAARIRMSARQKQIMEIEEQKQKQLELLEQIEQQKLRLETDCFRAQLEEEKRKKTQPTGVGIAPASCPVISDEDSHRQMIRNYQHQLLQQNRLHRQSVETARKQLLEYQTMLKGRCPSVSAPSLITDSVISVPSWKSERPTAISEHWDQGQRLKLSPNKYQPIQPIQTSKLEQDHFQVARQNHFPQRQVETTETLRASDILTNQALESQEHLRQFSQTETQQRDYKLVPKDSETLSRALSHDRQLISQDARKISETFGATTFQSLESQQLFSENSENISYHLTEPSSFVPLVPQHSFSSLPVKVESGKIQEPFSAMSKSTVSTSHSIISQMHDRPLLPSENITAQQGNMKALQEQLDLQKKVLQATQEAQEQLLLCKQKEVEQQTGLSVFLPLVTPDSSALLPSAKADLGRIQESSPTKNNIAVSSDHHVISQLQDKRLSLSQPILSQQNNFKFLQEQLNIQKDSLQARREAQEVLYVHKQSELDRRVCSEQAEPSFPFQVAQHTFTSLPSADTKSGKIQEQHSSKSEKGLVSCQSDIPISQDGSLSFLQQFLPLHDSLKLLQEQLTKQRDTLQARHEAQVELLLHRQRDLGDSKSGLVSSSSSPVVVQHSVASQASAKAEPRRIQELYLSEKENVGPSCHLIIPTFQDKSLSFPQHSLAQQENLTILQEQSQIQRVILGAKEGTQEFVHTESELEKRISSEQTGTSSSLSQVDESERFQECISIKSDSTIPLSHPKIPRCQERLLRVSQHMLPLQDNLEEHQAWLDTEKEAFHFSQKTQENTSSEQTGSSSFIPQLVQLSFTSLASAESGTILEPLFTESESKIFSSHLQIPQLQDRLLRISQLIQPQQDNLKALQEQLATQREAIILARQEAREELLLHQSEWEGRISPEQVDTSSLPLVPQHSFASLPLNESERNQEPCSINSDNIVSSGHSEIPTLPDGLLGLSHLVLPQQDNLIALEEHLHAQTDFLPSIEKTQKELVLSKPCKFEEKVSSEHFIQSHHGDLQALQQQLDTQKKAIRSIQEVQEELLLQRLSELEKRVSSEQVCSSSFVSQVPVADSERTQKSFPTKSNDTLPSSHREIPRLQDRLLSLSKPILPQQDNMTAQLDAQREVMYSYEKPQEELSLNKQARGSLNKSESAEHTIPSLFLPKETEHSFIPLPFAEAKPKSTCELYSSQNEHAAPPSNPVIPGFQDRLLSFSQSVLTQQDNLGLQKQLDLQREVLHYSQKAQEKLLVQRQTALQQQIQKHEETLKDFFKDSQISKPTVENDLKTQKMGQLRDWFPNTQDLAGNDQENIRHADRNNSDDNHLASEDTSAKQSGEHLEKDLGRRSSKPPVAKVKCGLDLNQHELSAIQEVESPAIGRTSILGKPGIYEDRDPLRVSISREQSFFGSPLAHDPFSCLQLVGQENVCGDDYDEAVKLKESVVENHAVLSYAVEEEHAYLGPTVKPDDKAKTLSYEPLSSATVSTGSLLSYENTDLSLTDPESFSEHMDDSKQESTTSKEEETNIISSIVPSTQDIYQRQNSSDVHKSLLPAVDETTCGHTHFQQMIDKYINEANLIPEKTDLQELEHIFPNLHHQLFKPLEPHPDFDLSSSSSGISPDNRDFYQRSDSSSESHCATGLSKSTVYFTALRRTSMHSSLNTSPNQQPDTNLAHVGAHSFATENIIGGSEQCFEQLQPEYSSQEESQHADLPSIFSIEARDSSQGMKNQNYPSEEHTEILQNKKKIVHFQLSIGNLSSVYSSSDEANVFDQLNVQHSTPCGSNSSECSTKHQLESARGSESMGFEELSKRGVVTMLQSQGLIEDNKNETCRVLDINPQVEETDSRLCVRTVEMGTSIQAPYSLTTQNEKYFENSAETDIPKITKKLSQLGESELFASSGSFSLQSSIPVWETETGHGIMEEPELTLISTTDTSIAEMDFANLTLEEKSENEAKCFFQVSEFLPLVSATEASDYPAVSELSIEKAAASTETPRRLTPVPGSLQEAFIKRKKSFMERSHQRQKEIRNKIHVSENSQIKTVKEKPSISSSVSRLKGVNKVRASFPEDRKTTQALRHQRGLRLYNQLAEVKQQKEEKTKQEAYAQNRARAKEFHKKTLEKLRAKNTC

SEQ ID NO: 5484 - protein, 798 aa, Homo sapiens
MAASLPGPGSRLFRTYGAADGRRQRRPGREAAQWFPPQDRRRFFNSSGSSDASIGDPSQSDDPDDPDDPDFPGSPVRRRRRRPGGRVPKDRPSLTVTPKRWKLRARPSLTVTPRRLGLRARPPQKCSTPCGPLRLPPFPSRDSGRLSPDLSVCGQPRDGDELGISASLFSSLASPCPGSPTPRDSVISIGTSACLVAASAVPSGLHLPEVSLDRASLPCSQEEATGGAKDTRMVHQTRASLRSVLFGLMNSGTPEDSEFRADGKNMRESCCKRKLVVGNGPEGPGLSSTGKRRATGQDSCQERGLQEAVRREHQEASVPKGRIVPRGIDRLERTRSSRKSKHQEATETSLLHSHRFKKGQKLGKDSFPTQDLTPLQNVCFWTKTRASFSFHKKKIVTDVSEVCSIYTTATSLSGSLLSECSNRPVMNRTSGAPSSWHSSSMYLLSPLNTLSISNKKASDAEKVYGECSQKGPVPFSHCLPTEKLQRCEKIGEGVFGEVFQTIADHTPVAIKIIAIEGPDLVNGSHQKTFEEILPEIIISKELSLLSGEVCNRTEGFIGLNSVHCVQGSYPPLLLKAWDHYNSTKGSANDRPDFFKDDQLFIVLEFEFGGIDLEQMRTKLSSLATAKSILHQLTASLAVAEASLRFEHRDLHWGNVLLKKTSLKKLHYTLNGKSSTIPSCGLQVSIIDYTLSRLERDGIVVFCDVSMDEDLFTGDGDYQFDIYRLMKKENNNRWGEYHPYSNVLWLHYLTDKMLKQMTFKTKCNTPAMKQIKRKIQEFHRTMLNFSSATDLLCQHSLFK

SEQ ID NO: 5485 - protein, 254 aa, Homo sapiens
MVREANIKQATAEKQLKEAQGKIDVLQAEVAALKTLVLSSSPTSPTQEPLPGGKTPFKKGHTRNKSTSSAMSGSHQDLSVIQPIVKDCKEADLSLYNEFRLWKDEPTMDRTCPFLDKIYQEDIFPCLTFSKSELASAVLEAVENNTLSIEPVGLQPIRFVKASAVECGGPKKCALTGQSKSCKHRIKLGDSSNYYYISPFCRYRITSVCNFFTYIRYIQQGLVKQQDVDQMFWEVMQLRKEMSLAKLGYFKEEL

SEQ ID NO: 5486 - protein, 358 aa, Homo sapiens
MYASQWFLTLFTAKFPLCMVFHIIDLLLCEGLNIIFHVALALLKTSKEDLLQADFEGALKFFRVQLPKRYRAEENARRLMEQACNIKVPTKKLKKYEKEYQTMRESQLQQEDPMDRYKRENRRLQEASMRLEQENDDLAHELVTSKIALRNDLDQAEDKADVLNKELLLTKQRLVETEEEKRKQEEETAQLKEVFRKQLEKAEYEIKKTTAIIAEYKQICSQLSTRLEKQQAASKEELEVVKGKMMACKHCSDIFSKEGALKLAATGREDQGIETDDEKDSLKKQLREMELELAQTKLQLVEAKCKIQELEHQRGALMNEIQAAKNSWFSKTLNSIKTATGTQPLQPAPVTQPPKEST

SEQ ID NO: 5487 - protein, 811 aa, Homo sapiens
MPLSSPNAAATASDMDKNSGSNSSSASSGSSKGQQPPRSASAGPAGESKPKSDGKNSSGSKRYNRKRELSYPKNESFNNQSRRSSSQKSKTFNKMPPQRGGGSSKLFSSSFNGGRRDEVAEAQRAEFSPAQFSGPKKINLNHLLNFTFEPRGQTGHFEGSGHGSWGKRNKWGHKPFNKELFLQANCQFVVSEDQDYTAHFADPDTLVNWDFVEQVRICSHEVPSCPICLYPPTAAKITRCGHIFCWACILHYLSLSEKTWSKCPICYSSVHKKDLKSVVATESHQYVVGDTITMQLMKREKGVLVALPKSKWMNVDHPIHLGDEQHSQYSKLLLASKEQVLHRVVLEEKVALEQQLAEEKHTPESCFIEAAIQELKTREEALSGLAGSRREVTGVVAALEQLVLMAPLAKESVFQPRKGVLEYLSAFDEETTEVCSLDTPSRPLALPLVEEEEAVSEPEPEGLPEACDDLELADDNLKEGTICTESSQQEPITKSGFTRLSSSPCYYFYQAEDGQHMFLHPVNVRCLVREYGSLERSPEKISATVVEIAGYSMSEDVRQRHRYLSHLPLTCEFSICELALQPPVVSKETLEMFSDDIEKRKRQRQKKAREERRRERRIEIEENKKQGKYPEVHIPLENLQQFPAFNSYTCSSDSALGPTSTEGHGALSISPLSRSPGSHADFLLTPLSPTASQGSPSFCVGSLEEDSPFPSFAQMLRVGKAKADVWPKTAPKKDENSLVPPAPVDSDGESDNSDRVPVPSFQNSFSQAIEAAFMKLDTPATSDPLSEEKGGKKRKKQKQKLLFSTSVVHTK

SEQ ID NO: 5488 - protein, 1943 aa, Homo sapiens
MKTSDLVPSFGYFIRSPEKREPIALIRKSDVSRGNLEKEMAHLNHDLYSGDLNEQSQAQLSEGSITLQVEAVESTSQVDENDVTLTADKGKTEDTFFMSNKPQRYKDKLPDSGDSMLRISTIASAIAEASVNTDPSQLAAMIKALSNKTRDKTFQEDEKQKDYSHVRHFLPNDLEKSNGSNALDMEKYLKKTEVSRYESALENFSRASMSDTWDLSLPKEQTTQDIHPVDLSATSVSVRAPEENTAAIVYVENGESENQESFRTINSSNSVTNRENNSAVVDVKTCSIDNKLQDVGNDEKATSISTPSDSYSSVRNPRITSLCLLKDCEEIRDNRENQRQNECVSEISNSEKHVTFENHRIVSPKNSDLKNTSPEHGGRGSEDEQESFRPSTSPLSHSSPSEISGTSSSGCALESFGSAAQQQQPPCEQELSPLVCSPAGVSRLTYVSEPESSYPTTATDDALEDRKSDITSELSTTIIQGSPAALEERAMEKLREKVPFQNRGKGTLSSIIQNNSDTRKATETTSLSSKPEYVKPDFRWSKDPSSKSGNLLETSEVGWTSNPEELDPIRLALLGKSGLSCQVGSATSHPVSCQEPIDEDQRISPKDKSTAGREFSGQVSHQTTSENQCTPIPSSTVHSSVADMQNMPAAVHALLTQPSLSAAPFAQRYLGTLPSTGSTTLPQCHAGNATVCGFSGGLPYPAVAGEPVQNSVAVGICLGSNIGSGWMGTSSLCNPYSNTLNQNLLSTTKPFPVPSVGTNCGIEPWDSGVTSGLGSVRVPEELKLPHACCVGIASQTLLSVLNPTDRWLQVSIGVLSISVNGEKVDLSTYRCLVFKNKAIIRPHATEEIKVLFIPSSPGVFRCTFSVASWPCSTDAETIVQAEALASTVTLTAIAESPVIEVETEKKDVLDFGDLTYGGWKALPLKLINRTHATVPIRLIINANAVAWRCFTFSKESVRAPVEVAPCADVVTRLAGPSVVNHMMPASYDGQDPEFLMIWVLFHSPKKQISSSDILDSAEEFSAKVDIEVDSPNPTPVLRSVSLRARAGIARIHAPRDLQTMHFLAKVASSARGSQHLPLKNAGNIEVYLDIKVPEQGSHFSVDPKNLLLKPGEEHEVIVSFTPKDPEACEERILKIFVQPFGPQYEVVLKGEVISSGSKPLSPGPCLDIPSILSNKQFLAWGGVPLGRTQLQKLALRNNSASTTQHLRLLIRGQDQDCFQLQNTFGSEQRLTSNCEIRIHPKEDIFISVLFAPTRLSCMLARLEIKQLGNRSQPGIKFTIPLSGYGGTSNLILEGVKKLSDSYMVTVNGLVPGKESKIVFSVRNTGSRAAFVKAVGFKDSQKKVLLDPKVLRIFPDKFVLKERTQENVTLIYNPSDRGINNKTATELSTVYLFGGDEISRQQYRRALLHKPEMIKQILPEHSVLQNINFVEAFQDELLVTEVYDLPQRPNDVQLFYGSMCKIILSVIGEFRDCISSREFLQPSSKASLESTSDLGASGKHGGNVSLDVLPVKGPQGSPLLSRAARPPLDQLASEEPWTVLPEHLILVAPSPCDMAKTGRFQIVNNSVRLLRFELCWPAHCLTVTPQHGCVAPESKLQILVSPNSSLSTKQSMFPWSGLIYIHCDDGQKKIVKVQIREDLTQVELLTRLTSKPFGILSPVSEPSVSHLVKPMTKPPSTKVEIRNKSITFPTTEPGETSESCLELENHGTTDVKWHLSSLAPPYVKGVDESGDVFRATYAAFRCSPISGLLESHGIQKVSITFLPRGRGDYAQFWDVECHPLKEPHMKHTLRFQLSGQSIEAENEPENACLSTDSLIKIDHLVKPRRQAVSEASARIPEQLDVTARGVYAPEDVYRFRPTSVGESRTLKVNLRNNSFITHSLKFLSPREPFYVKHSKYSLRAQHYINMPVQFKPKSAGKFEALLVIQTDEGKSIAIRLIGEALGKN

SEQ ID NO: 5489 - protein, 1390 aa, Homo sapiens
MAPGCKTELRSVTNGQSNQPSNEGDAIKVFVRIRPPAERSGSADGEQNLCLSVLSSTSLRLHSNPEPKTFTFDHVADVDTTQESVFATVAKSIVESCMSGYNGTIFAYGQTGSGKTFTMMGPSESDNFSHNLRGVIPRSFEYLFSLIDREKEKAGAGKSFLCKCSFIEIYNEQIYDLLDSASAGLYLREHIKKGVFVVGAVEQVVTSAAEAYQVLSGGWRNRRVASTSMNRESSRSHAVFTITIESMEKSNEIVNIRTSLLNLVDLAGSERQKDTHAEGMRLKEAGNINRSLSCLGQVITALVDVGNGKQRHVCYRDSKLTFLLRDSLGGNAKTAIIANVHPGSRCFGETLSTLNFAQRAKLIKNKAVVNEDTQGNVSQLQAEVKRLKEQLAELASGQTPPESFLTRDKKKTNYMEYFQEAMLFFKKSEQEKKSLIEKVTQLEDLTLKKEKFIQSNKMIVKFREDQIIRLEKLHKESRGGFLPEEQDRLLSELRNEIQTLREQIEHHPRVAKYAMENHSLREENRRLRLLEPVKRAQEMDAQTIAKLEKAFSEISGMEKSDKNQQGFSPKAQKEPCLFANTEKLKAQLLQIQTELNNSKQEYEEFKELTRKRQLELESELQSLQKANLNLENLLEATKACKRQEVSQLNKIHAETLKIITTPTKAYQLHSRPVPKLSPEMGSFGSLYTQNSSILDNDILNEPVPPEMNEQAFEAISEELRTVQEQMSALQAKLDEEEHKNLKLQQHVDKLEHHSTQMQELFSSERIDWTKQQEELLSQLNVLEKQLQETQTKNDFLKSEVHDLRVVLHSADKELSSVKLEYSSFKTNQEKEFNKLSERHMHVQLQLDNLRLENEKLLESKACLQDSYDNLQEIMKFEIDQLSRNLQNFKKENETLKSDLNNLMELLEAEKERNNKLSLQFEEDKENSSKEILKVLEAVRQEKQKETAKCEQQMAKVQKLEESLLATEKVISSLEKSRDSDKKVVADLMNQIQELRTSVCEKTETIDTLKQELKDINCKYNSALVDREESRVLIKKQEVDILDLKETLRLRILSEDIERDMLCEDLAHATEQLNMLTEASKKHSGLLQSAQEELTKKEALIQELQHKLNQKKEEVEQKKNEYNFKMRQLEHVMDSAAEDPQSPKTPPHFQTHLAKLLETQEQEIEDGRASKTSLEHLVTKLNEDREVKNAEILRMKEQLREMENLRLESQQLIEKNWLLQGQLDDIKRQKENSDQNHPDNQQLKNEQEESIKERLAKSKIVEEMLKMKADLEEVQSALYNKEMECLRMTDEVERTQTLESKAFQEKEQLRSKLEEMYEERERTSQEMEMLARGSQVECLAEENGKLVGHQNLHQKIQYVVRLKKENVRLAEETEKLRAENVFLKEKKRSES

SEQ ID NO: 5490 - protein, 1588 aa, Homo sapiens
MLPPKHLSATKPKKSWAPNLYELDSDLTKEPDVIIGEGPTDSEFFHQRFRNLIYVEFVGPRKTLIKLRNLCLDWLQPETRTKEEIIELLVLEQYLTIIPEKLKPWVRAKKPENCEKLVTLLENYKEMYQPEDDNNSDVTSDDDMTRNRRESSPPHSVHSFSDRDWDRRGRSRDMEPRDRWSHTRNPRSRMPPRDLSLPVVAKTSFEMDREDDRDSRAYESRSQDAESYQNVVDLAEDRKPHNTIQDNMENYRKLLSLVQLAEDDGHSHMTQGHSSRSKRSAYPSTSRGLKTMPEAKKSTHRRGICEDESSHGVIMEKFIKDVSRSSKSGRARESSDRSQRFPRMSDDNWKDISLNKRESVIQQRVYEGNAFRGGFRFNSTLVSRKRVLERKRRYHFDTDGKGSIHDQKGCPRKKPFECGSEMRKAMSVSSLSSLSSPSFTESQPIDFGAMPYVCDECGRSFSVISEFVEHQIMHTRENLYEYGESFIHSVAVSEVQKSQVGGKRFECKDCGETFNKSAALAEHRKIHARGYLVECKNQECEEAFMPSPTFSELQKIYGKDKFYECRVCKETFLHSSALIEHQKIHFGDDKDNEREHERERERERGETFRPSPALNEFQKMYGKEKMYECKVCGETFLHSSSLKEHQKIHTRGNPFENKGKVCEETFIPGQSLKRRQKTYNKEKLCDFTDGRDAFMQSSELSEHQKIHSRKNLFEGRGYEKSVIHSGPFTESQKSHTITRPLESDEDEKAFTISSNPYENQKIPTKENVYEAKSYERSVIHSLASVEAQKSHSVAGPSKPKVMAESTIQSFDAINHQRVRAGGNTSEGREYSRSVIHSLVASKPPRSHNGNELVESNEKGESSIYISDLNDKRQKIPARENPCEGGSKNRNYEDSVIQSVFRAKPQKSVPGEGSGEFKKDGEFSVPSSNVREYQKARAKKKYIEHRSNETSVIHSLPFGEQTFRPRGMLYECQECGECFAHSSDLTEHQKIHDREKPSGSRNYEWSVIRSLAPTDPQTSYAQEQYAKEQARNKCKDFRQFFATSEDLNTNQKIYDQEKSHGEESQGENTDGEETHSEETHGQETIEDPVIQGSDMEDPQKDDPDDKIYECEDCGLGFVDLTDLTDHQKVHSRKCLVDSREYTHSVIHTHSISEYQRDYTGEQLYECPKCGESFIHSSFLFEHQRIHEQDQLYSMKGCDDGFIALLPMKPRRNRAAERNPALAGSAIRCLLCGQGFIHSSALNEHMRLHREDDLLEQSQMAEEAIIPGLALTEFQRSQTEERLFECAVCGESFVNPAELADHVTVHKNEPYEYGSSYTHTSFLTEPLKGAIPFYECKDCGKSFIHSTVLTKHKELHLEEEEEDEAAAAAAAAAQEVEANVHVPQVVLRIQGLNVEAAEPEVEAAEPEVEAAEPEVEAAEPNGEAEGPDGEAAEPIGEAGQPNGEAEQPNGDADEPDGAGIEDPEERAEEPEGKAEEPEGDADEPDGVGIEDPEEGEDQEIQVEEPYYDCHECTETFTSSTAFSEHLKTHASMIIFEPANAFGECSGYIERASTSTGGANQADEKYFKCDVCGQLFNDRLSLARHQNTHTG

SEQ ID NO: 5491 - protein, 835 aa, Homo sapiens
MGNYKSRPTQTCTDEWKKKVSESYVITIERLEDDLQIKEKELTELRNIFGSDEAFSKVNLNYRTENGLSLLHLCCICGGKKSHIRTLMLKGLRPSRLTRNGFTALHLAVYKDNAELITSLLHSGADIQQVGYGGLTALHIATIAGHLEAADVLLQHGANVNIQDAVFFTPLHIAAYYGHEQVTRLLLKFGADVNVSGEVGDRPLHLASAKGFLNIAKLLMEEGSKADVNAQDNEDHVPLHFCSRFGHHDIVKYLLQSDLEVQPHVVNIYGDTPLHLACYNGKFEVAKEIIQISGTESLTKENIFSETAFHSACTYGKSIDLVKFLLDQNVININHQGRDGHTGLHSACYHGHIRLVQFLLDNGADMNLVACDPSRSSGEKDEQTCLMWAYEKGHDAIVTLLKHYKRPQDELPCNEYSQPGGDGSYVSVPSPLGKIKSMTKEKADILLLRAGLPSHFHLQLSEIEFHEIIGSGSFGKVYKGRCRNKIVAIKRYRANTYCSKSDVDMFCREVSILCQLNHPCVIQFVGACLNDPSQFAIVTQYISGGSLFSLLHEQKRILDLQSKLIIAVDVAKGMEYLHNLTQPIIHRDLNSHNILLYEDGHAVVADFGESRFLQSLDEDNMTKQPGNLRWMAPEVFTQCTRYTIKADVFSYALCLWEILTGEIPFAHLKPAAAAADMAYHHIRPPIGYSIPKPISSLLIRGWNACPEGRPEFSEVVMKLEECLCNIELMSPASSNSSGSLSPSSSSDCLVNRGGPGRSHVAALRSRFELEYALNARSYAALSQSAGQYSSQGLSLEEMKRSLQYTPIDKYGYVSDPMSSMHFHSCRNSSSFEDSS

SEQ ID NO: 5492 - protein, 588 aa, Homo sapiens
MNTSIPYQQNPYNPRGSSNVIQCYRCGDTCKGEVVRVHNNHFHIRCFTCQVCGCGLAQSGFFFKNQEYICTQDYQQLYGTRCDSCRDFITGEVISALGRTYHPKCFVCSLCRKPFPIGDKVTFSGKECVCQTCSQSMASSKPIKIRGPSHCAGCKEEIKHGQSLLALDKQWHVSCFKCQTCSVILTGEYISKDGVPYCESDYHAQFGIKCETCDRYISGRVLEAGGKHYHPTCARCVRCHQMFTEGEEMYLTGSEVWHPICKQAARAEKKLKHRRTSETSISPPGSSIGSPNRVICDIYENLDLRQRRASSPGYIDSPTYSRQGMSPTFSRSPHHYYRSAGDSNIYRKPPIYKRHGDLSTATKSKTSEDISQTSKYSPIYSPDPYYASESEYWTYHGSPKVPRARRFSSGGEEDDFDRSMHKLQSGIGRLILKEEMKARSSSYADPWTPPRSSTSSREALHTAGYEMSLNGSPRSHYLADSDPLISKSASLPAYRRNGLHRTPSADLFHYDSMNAVNWGMREYKIYPYELLLVTTRGRNRLPKDVDRTRLERHLSQEEFYQVFGMTISEFDRLALWKRNELKKQARLF

SEQ ID NO: 5493 - protein, 349 aa, Homo sapiens
MAIPITVLDCDLLLYGRGHRTLDRFKLDDVTDEYLMSMYGFPRQFIYYLVELLGANLSRPTQRSRAISPETQVLAALGFYTSGSFQTRMGDAIGISQASMSRCVANVTEALVERASQFIRFPADEASIQALKDEFYGLAGMPGVMGVVDCIHVAIKAPNAEDLSYVNRKGLHSLNCLMVCDIRGTLMTVETNWPGSLQDCAVLQQSSLSSQFEAGMHKDSWLLGDSSFFLRTWLMTPLHIPETPAEYRYNMAHSATHSVIEKTFRTLCSRFRCLDGSKGALQYSPEKSSHIILACCVLHNISLEHGMDVWSSPMTGPMEQPPEEEYEHMESLDLEADRIRQELMLTHFS

SEQ ID NO: 5494 - protein, 597 aa, Homo sapiens
MSSKGSSTDGRTDLANGSLSSSPEEMSGAEEGRETSSGIEVEASDLSLSLTGDDGGPNRTSTESRGTDTESSGEDKDSDSMEDTGHYSINDENRVHDRSEEEEEEEEEEEEEQPRRRVQRKRANRDQDSSDDERALEDWVSSETSALPRPRWQALPALRERELGSSARFVYEACGARVFVQRFRLQHGLEGHTGCVNTLHFNQRGTWLASGSDDLKVVVWDWVRRQPVLDFESGHKSNVFQAKFLPNSGDSTLAMCARDGQVRVAELSATQCCKNTKRVAQHKGASHKLALEPDSPCTFLSAGEDAVVFTIDLRQDRPASKLVVTKEKEKKVGLYTIYVNPANTHQFAVGGRDQFVRIYDQRKIDENENNGVLKKFCPHHLVNSESKANITCLVYSHDGTELLASYNDEDIYLFNSSHSDGAQYVKRYKGHRNNATVKGVNFYGPKSEFVVSGSDCGHIFLWEKSSCQIIQFMEGDKGGVVNCLEPHPHLPVLATSGLDHDVKIWAPTAEASTELTGLKDVIKKNKRERDEDSLHQTDLFDSHMLWFLMHHLRQRRHHRRWREPGVGATDADSDESPSSSDTSDEEEGPDRVQCMPS

SEQ ID NO: 5495 - protein, 310 aa, Homo sapiens
MSQQLKKRAKTRHQKGLGGRAPSGAKPRQGKSSQDLQAEIEPVSAVWALCDGYVCYEPGPQALGGDDFSDCYIECVIRGEFSQPILEEDSLFESLEYLKKGSEQQLSQKVFEASSLECSLEYMKKGVKKELPQKIVGENSLEYSEYMTGKKLPPGGIPGIDLSDPKQLAEFARKKPPINKEYDSLSAIACPQSGCTRKLRNRAALRKHLLIHGPRDHVCAECGKAFVESSKLKRHFLVHTGEKPFRCTFEGCGKRFSLDFNLRTHVRIHTGEKRFVCPFQGCNRRFIQSNNLKAHILTHANTNKNEQEGK

SEQ ID NO: 5496 - protein, 382 aa, Homo sapiens
MLRWTVHLEGGPRRVNHAAVAVGHRVYSFGGYCSGEDYETLRQIDVHIFNAVSLRWTKLPPVKSAIRGQAPVVPYMRYGHSTVLIDDTVLLWGGRNDTEGACNVLYAFDVNTHKWFTPRVSGTVPGARDGHSACVLGKIMYIFGGYEQQADCFSNDIHKLDTSTMTWTLICTKGSPARWRDFHSATMLGSHMYVFGGRADRFGPFHSNNEIYCNRIRVFDTRTEAWLDCPPTPVLPEGRRSHSAFGYNGELYIFGGYNARLNRHFHDLWKFNPVSFTWKKIEPKGKGPCPRRRQCCCIVGDKIVLFGGTSPSPEEGLGDEFDLIDHSDLHILDFSPSLKTLCKLAVIQYNLDQSCLPHDIRWELNAMTTNSNISRPIVSSHG

SEQ ID NO: 5497 - protein, 608 aa, Homo sapiens
MAAAAAAVGPGAGGAGSAVPGGAGPCATVSVFPGARLLTIGDANGEIQRHAEQQALRLEVRAGPDSAGIALYSHEDVCVFKCSVSRETECSRVGKQSFIITLGCNSVLIQFATPNDFCSFYNILKTCRGHTLERSVFSERTEESSAVQYFQFYGYLSQQQNMMQDYVRTGTYQRAILQNHTDFKDKIVLDVGCGSGILSFFAAQAGARKIYAVEASTMAQHAEVLVKSNNLTDRIVVIPGKVEEVSLPEQVDIIISEPMGYMLFNERMLESYLHAKKYLKPSGNMFPTIGDVHLAPFTDEQLYMEQFTKANFWYQPSFHGVDLSALRGAAVDEYFRQPVVDTFDIRILMAKSVKYTVNFLEAKEGDLHRIEIPFKFHMLHSGLVHGLAFWFDVAFIGSIMTVWLSTAPTEPLTHWYQVRCLFQSPLFAKAGDTLSGTCLLIANKRQSYDISIVAQVDQTGSKSSNLLDLKNPFFRYTGTTPSPPPGSHYTSPSENMWNTGSTYNLSSGMAVAGMPTAYDLSSVIASGSSVGHNNLIPLANTGIVNHTHSRMGSIMSTGIVQGSSGAQGSGGGSTSAHYAVNSQFTMGGPAISMASPMSIPTNTMHYGS

SEQ ID NO: 5498 - protein, 969 aa, Homo sapiens
MQSTDLGNKESGKIWHRKPSPATRDGIIVNIIHNTSDYHPKVLRFLNVAFDGTGDCLIAGDHQGNIYVFDLHGNRFNLVQRTAQACTALAFNLRRKSEFLVALADYSIKCFDTVTKELVSWMRGHESSVFSISVHASGKYAITTSSDTAQLWDLDTFQRKRKLNIRQSVGIQKVFFLPLSNTILSCFKDNSIFAWECDTLFCKYQLPAPPESSSILYKVFAVTRDGRILAAGGKSNHLHLWCLEARQLFRIIQMPTKVRAIRHLEFLPDSFDAGSNQVLGVLSQDGIMRFINMQTCKLLFEIGSLDEGISSSAISPHGRYIASIMENGSLNIYSVQALTQEINKPPPPLVKVIEDLPKNKLSSSDLKMKVTSGRVQQPAKSRESKMQTRILKQDLTGDFESKKNELPDGLNKKRLQILLKGYGEYPTKYRMFIWRSLLQLPENHTAFSTLIDKGTHVAFLNLQKKYPIKSRKLLRVLQRTLSALAHWSVIFSDTPYLPLLAFPFVKLFQNNQLICFEVIATLIINWCQHWFEYFPNPPINILSMIENVLAFHDKELLQHFIDHDITSQLYAWPLLETVFSEVLTREEWLKLFDNIFSNHPSFLLMTVVAYNICSRTPLLSCNLKDDFEFFFHHRNNLDINVVIRQVYHLMETTPTDIHPDSMLNVFVALTKGQYPVFNQYPKFIVDYQTQERERIRNDELDYLRERQTVEDMQAKVDQQRVEDEAWYQKQELLRKAEETRREMLLQEEEKMIQQRQRLAAVKRELKVKEMHLQDAARRRFLKLQQDQQEMELRRLDDEIGRKNLTENQEALAKEMRADADAYRRKVDLEEHMFHKLIEAGETQSQKTQKWKEAEGKEFRLRSAKKASALSDASRKWFLKQEINAAVEHAENPCHKEEPRFQNEQDSSCLAASQLNDSSEMDPSTQISLNRRAVEWDTTGQNLIKKVRNLRQRLTARARHRCQTPHLLAA

SEQ ID NO: 5499 - protein, 215 aa, Homo sapiens
MSCTIEKALADAKALVERLRDHDDAAESLIEQTTALNKRVEAMKQYQEEIQELNEVARHRPRSTLVMGIQQENRQIRELQQENKELRTSLEEHQSALELIMSKYREQMFRLLMASKKDDPGIIMKLKEQHSKELQAHVDQITEMAAVMRKAIEIDEQQGCKEQERIFQLEQENKGLREILQITRESFLNLRKDDASESTSLSALVTNSDLSLRKS

SEQ ID NO: 5500 - protein, 891 aa, Homo sapiens
MAVARVDAALPPGEGSVVNWSGQGLQKLGPNLPCEADIHTLILDKNQIIKLENLEKCKRLIQLSVANNRLVRMMGVAKLTLLRVLNLPHNSIGCVEGLKELVHLEWLNLAGNNLKAMEQINSCTALQHLDLSDNNISQIGDLSKLVSLKTLLLHGNIITSLRMAPAYLPRSLAILSLAENEIRDLNEISFLASLTELEQLSIMNNPCVMATPSIPGFDYRPYIVSWCLNLRVLDGYVISQKESLKAEWLYSQGKGRAYRPGQHIQLVQYLATVCPLTSTLGLQTAEDAKLEKILSKQRFHQRQLMNQSQNEELSPLVPVETRASLIPEHSSPVQDCQISQESEPVIQVNSWVGINSNDDQLFAVKNNFPASVHTTRYSRNDLHLEDIQTDEDKLNCSLLSSESTFMPVASGLSPLSPTVELRLQGINLGLEDDGVADESVKGLESQVLDKEEEQPLWAANENSVQMMRSEINTEVNEKAGLLPCPEPTIISAILKDDNHSLTFFPESTEQKQSDIKKPENTQPENKETISQATSEKLPMILTQRSVALGQDKVALQKLNDAATKLQACWRGFYARNYNPQAKDVRYEIRLRRMQEHIVCLTDEIRRLRKERDEERIKKFVQEEAFRFLWNQKWGLAILPRPVSNFWAQAVFPPQPPKVRSLQVWQQTVDQRLSSWHTDVPPISSTLVPSKHPLFTQSQESSCDQNADWFIASDVAPQEKSLPEFPDSGFHSSLTEQVHSLQHSLDFEKSSTEGSESSIMGNSIDTVRYGKESDLGDVSEEHGEWNKESSNNEQDNSLLEQYLTSVQQLEDADERTNFDTETRDSKLHIACFPVQLDTLSDGASVDESHGISPPLQGEISQTQENSKLNAEVQGQQPECDSTFQLLHVGVTV

SEQ ID NO: 5501 - protein, 275 aa, Homo sapiens
MAEPASVAAESLAGSRARAARTVLGQVVLPGEELLLPEQEDAEGPGGAVERPLSLNARACSRVRVVCGPGLRRCGDRLLVTKCGRLRHKEPGSGSGGGVYWVDSQQKRYVPVKGDHVIGIVTAKSGDIFKVDVGGSEPASLSYLSFEGATKRNRPNVQVGDLIYGQFVVANKDMEPEMVCIDSCGRANGMGVIGQDGLLFKVTLGLIRKLLAPDCEIIQEVGKLYPLEIVFGMNGRIWVKAKTIQQTLILANILEACEHMTSDQRKQIFSRLAES

SEQ ID NO: 5502 - protein, 539 aa, Homo sapiens
MATSAPLRSLEEEVTCSICLDYLRDPVTIDCGHVFCRSCTTDVRPISGSRPVCPLCKKPFKKENIRPVWQLASLVENIERLKVDKGRQPGEVTREQQDAKLCERHREKLHYYCEDDGKLLCVMCRESREHRPHTAVLMEKAAQPHREKILNHLSTLRRDRDKIQGFQAKGEADILAALKKLQDQRQYIVAEFEQGHQFLREREEHLLEQLAKLEQELTEGREKFKSRGVGELARLALVISELEGKAQQPAAELMQDTRDFLNRYPRKKFWVGKPIARVVKKKTGEFSDKLLSLQRGLREFQGKLLRDLEYKTVSVTLDPQSASGYLQLSEDWKCVTYTSLYKSAYLHPQQFDCEPGVLGSKGFTWGKVYWEVEVEREGWSEDEEEGDEEEEGEEEEEEEEAGYGDGYDDWETDEDEESLGDEEEEEEEEEEEVLESCMVGVARDSVKRKGDLSLRPEDGVWALRLSSSGIWANTSPEAELFPALRPRRVGIALDYEGGTVTFTNAESQELIYTFTATFTRRLVPFLWLKWPGTRLLLRP

SEQ ID NO: 5503 - protein, 410 aa, Homo sapiens
MFNNELMADVHFVVGPPGATRTVPAHKYVLAVGSSVFYAMFYGDLAEVKSEIHIPDVEPAAFLILLKYMYSDEIDLEADTVLATLYAAKKYIVPALAKACVNFLETSLEAKNACVLLSQSRLFEEPELTQRCWEVIDAQAEMALRSEGFCEIDRQTLEIIVTREALNTKEAVVFEAVLNWAEAECKRQGLPITPRNKRHVLGRALYLVRIPTMTLEEFANGAAQSDILTLEETHSIFLWYTATNKPRLDFPLTKRKGLAPQRCHRFQSSAYRSNQWRYRGRCDSIQFAVDRRVFIAGLGLYGSSSGKAEYSVKIELKRLGVVLAQNLTKFMSDGSSNTFPVWFEHPVQVEQDTFYTASAVLDGSELSYFGQEGMTEVQCGKVAFQFQCSSDSTNGTGVQGGQIPELIFYA

SEQ ID NO: 5504 - protein, 320 aa, Homo sapiens
MRALAALSAPPNERLLPRDPAATRDPDAARPARRSAVERLAADRAKYVRGRPGTGRGVASEGSGPGAIKCPGNDPGPPARAPAPVARRAIARKPLRPDSLIIYRQKCEFVRGSGADGPRASLVKKLFQGPGKDKAPVAAGDEGKAGNPETVPTTPGPAADPAIPETPAPAARSAAPSSVPAAPPGPEPRVVRRRGLQRSQSDLSSRYSAALAESDTFFQYCGLDPEVVEALGRENFTAGSDCVTLKVRSVSVATSGSGFSRHSGGDDEGLQEEELIEQVPSTTSVIERNARIIKWLYTCKKAKETPSQEQSRTRGSKPSR

SEQ ID NO: 5505 - protein, 314 aa, Homo sapiens
MSENAAPGLISELKLAVPWGHIAAKAWGSLQGPPVLCLHGWLDNASSFDRLIPLLPQDFYYVAMDFGGHGLSSHYSPGVPYYLQTFVSEIRRVVAALKWNRFSILGHSFGGVVGGMFFCTFPEMVDKLILLDTPLFLLESDEMENLLTYKRRAIEHVLQVEASQEPSHVFSLKQLLQRLLKSNSHLSEECGELLLQRGTTKVATGLVLNRDQRLAWAENSIDFISRELCAHSIRKLQAHVLLIKAVHGYFDSRQNYSEKESLSFMIDTMKSTLKEQFQFVEVPGNHCVHMSEPQHVASIISSFLQCTHMLPAQL

SEQ ID NO: 5506 - protein, 1314 aa, Homo sapiens
MASKGAGMSFSRKSYRLTSDAEKSRVTGIVQEKLLNDYLNRIFSSSEHAPPAATSRKPLNFQNLPEHLDQLLQVDNEEEESQGQVEGRLGPSTVVLDHTGGFEGLLLVDDDLLGVIGHSNFGTIRSTTCVYKGKWLYEVLISSQGLMQIGWCTISCRFNQEEGVGDTHNSYAYDGNRVRKWNVTTTNYGKAWAAGDIVSCLIDLDDGTLSFCLNGVSLGTAFENLSRGLGMAYFPAISLSFKESVAFNFGSRPLRYPVAGYRPLQDPPSADLVRAQRLLGCFRAVLSVELDPVEGRLLDKESSKWRLRGQPTVLLTLAHIFHHFAPLLRKVYLVEAVLMSFLLGIVEKGTPTQAQSVVHQVLDLLWLFMEDYEVQDCLKQLMMSLLRLYRFSPIVPDLGLQIHYLRLTIAILRHEKSRKFLLSNVLFDVLRSVVFFYIKSPLRVEEAGLQELIPTTWWPHCSSREGKESTEMKEETAEERLRRRAYERGCQRLRKRIEVVEELQVQILKLLLDNKDDNGGEASRYIFLTKFRKFLQENASGRGNMPMLCPPEYMVCFLHRLISALRYYWDEYKASNPHASFSEEAYIPPQVFYNGKVDYFDLQRLGGLLSHLRKTLKDDLASKANIVIDPLELQSTAMDDLDEDEEPAPAMAQRPMQALAVGGPLPLPRPGWLSSPTLGRANRFLSTAAVSLMTPRRPLSTSEKVKVRTLSVEQRTREDIEGSHWNEGLLLGRPPEEPEQPLTENSLLEVLDGAVMMYNLSVHQQLGKMVGVSDDVNEYAMALRDTEDKLRRCPKRRKDILAELTKSQKVFSEKLDHLSRRLAWVHATVYSQEKMLDIYWLLRVCLRTIEHGDRTGSLFAFMPEFYLSVAINSYSALKNYFGPVHSMEELPGYEETLTRLAAILAKHFADARIVGTDIRDSLMQALASYVCYPHSLRAVERIPEEQRIAMVRNLLAPYEQRPWAQTNWILVRLWRGCGFGYRYTRLPHLLKTKLEDANLPSLQKPCPSTLLQQHMADLLQQGPDVAPSFLNSVLNQLNWAFSEFIGMIQEIQQAAERLERNFVDSRQLKVCATCFDLSVSLLRVLEMTITLVPEIFLDWTRPTSEMLLRRLAQLLNQVLNRVTAERNLFDRVVTLRLPGLESVDHYPILVAVTGILVQLLVRGPASEREQATSVLLADPCFQLRSICYLLGQPEPPAPGTALPAPDRKRFSLQSYADYISADELAQVEQMLAHLTSASAQAAAASLPTSEEDLCPICYAHPISAVFQPCGHKSCKACINQHLMNNKDCFFCKTTIVSVEDWEKGANTSTTSSAA

SEQ ID NO: 5507 - protein, 880 aa, Homo sapiens
MAGAAPRVRYLAGFCCPLGGLAAGKPRVLCHEAEVFLSTGSELVYVYDQEGGLLTAAFRFPDQVWHLELLAPRRLLYALCARRGLYCLSLDHPGRSRSTSQDDRDSEDGDQPSPVIPVDPDACILPDAALCAFTLLDSVLVTLVQGPARWKMQLFEQPCPGEDPRPGGQIGEVELSSYTPPAGVPGKPAAPHFLPVLCSVSPSGSRVPHDLLGGSGGFTLEDALFGLLFGADATLLQSPVVLCGLPDGQLCCVILKALVTSRSAPGDPNALVKILHHLEEPVIFIGALKTEPQAAEAAENFLPDEDVHCDCLVAFGHHGRMLAIKASWDESGKLVPELREYCLPGPVLCAACGGGGRVYHSTPSDLCVVDLSRGSTPLGPEQPEEGPGGLPPMLCPASLNICSVVSLSASAAHEGGTKLLALSAKGRLMTCSLDLDSEMPGPARMTTESAGQKIKELLSGIGNISERVSFLKKAVDQRNKALTSLNEAMNVSCALLSSGTGPRPISCTTSTTWSRLQTQDVLMATCVLENSSSFSLDQGWTLCIQVLTSSCALDLDSACSAITYTIPVDQLGPGARREVTLPLGPGENGGLDLPVTVSCTLFYSLREVVGGALAPSDSEDPFLDECPSDVLPEQEGVCLPLSRHTVDMLQCLRFPGLAPPHTRAPSPLGPTRDPVATFLETCREPGSQPAGPASLRAEYLPPSVASIKVSAELLRAALKDGHSGVPLCCATLQWLLAENAAVDVVRARALSSIQGVAPDGANVHLIVREVAMTDLCPAGPIQAVEIQVESSSLADICRAHHAVVGRMQTMVTEQATQGSSAPDLRVQYLRQIHANHETLLREVQTLRDRLCTEDEASSCATAQRLLQVYRQLRHPSLILL

SEQ ID NO: 5508 - protein, 156 aa, Homo sapiens
MGDKKSPTRPKRQPKPSSDEGYWDCSVCTFRNSAEAFKCMMCDVRKGTSTRKEKKDKVEKEKSEKETTSKKNSHKKTRPRLKNVDRSSAQHLEVTVGDLTVIITDFKEKTKSPPASSAASADQHSQSGSSSDNTERGMSRSSSPRGEASSLNGESH

SEQ ID NO: 5509 - protein, 258 aa, Homo sapiens
MCALEMAVLEIQTNGDTRVTEEAIARARHSLSDPNMREFILCCLARDPARRPSAHSLLFHRVLFEVHSLKLLAAHCFIQHQYLMPENVVEEKTKAMDLHAVLAELPRPRRPPLQWRYSEVSFMELDKFLEDVRNGIYPLMNFAATRPLGLPRVLAPPPEEVQKAKTPTPEPFDSETRKVIQMQCNLERSEDKARWHLTLLLVLEDRLHRQLTYDLLPTDSAQDLASELVHYGFLHEDDRMKLAAFLESTFLKYRGTQA

SEQ ID NO: 5510 - protein, 187 aa, Homo sapiens
MLGRYREYSNGQAGAIEHLKESLEQSIDQLRSQRLLRNSGGRSISVTSLSASDLDGGTGSELHHFPPTSPLKDYGDPQGIKRMRSRTGVRFVQETDDMTQLHGFHQSLRDLSSEQIRLGDDFNRELSRRSRSDAETKRALEELTEKLNEAQKQEVFFVKSLGKVKIQCLSSAEVDNVFPINVWQCGI

SEQ ID NO: 5511 - protein, 308 aa, Homo sapiens
MMDVSGVGFPSKVPWKKMSAEELENQYCPSRWVVRLGAEEALRTYSQIGIEATTRARATRKSLLHVPYGDGEGEKVDIYFPDESSEALPFFLFFHGGYWQSGSKDESAFMVHPLTAQGVAVVIVAYGIAPKGTLDHMVDQVTRSVAFVQKRYPSNKGIYLCGHSAGAHLAAMMLLADWTKHGVTPNLRGFFLVSGVFDLEPIVYTSQNVALQLTLEDAQRNSPQLKVAQAQPVDPTCRVLVVVGQFDSPEFHRQSWEFYQVLPVQTLCQGEWKASFEELHDVDHFEIVENLTQKDNVLTQIILKTIFQ

SEQ ID NO: 5512 - protein, 486 aa, Homo sapiens
MSGSTPFQMRLVHLDLKGAPPKVSYLSEIFPLFRALGANGLLIEYEDMFPYEGPLRLLRAKYAYSPSEIKEILHLAGLNELEVIPLVQTFGHMEFVLKHTAFAHLREVGSFPCTLNPHEAESLALVGAMIDQVLELHPGAQRLHIGCDEVYYLGEGEASRRWLQQEQNSTGKLCLSHMRAVASGVKARRPSVTPLVWDDMLRDLPEDQLAASGVPQLVEPVLWDYTADLDVHGKVLLMQKYRRCGFPQLWAASAFKGATGPSQAVPPVEHHLRNHVQWLQVAGSGPTDSLQGIILTGWQRYDHYSVLCELLPAGVPSLAACLQLLLRGGFDEDVKAKVENLLGISSLEKTDPVREGAGSFPGSNILALVTQVSLHLRSSVDALLEGNRYVTGWFSPYHRQRKLIHPVMVQHIQPAALSLLAQWSTLVQELEAALQLAFYPDAVEEWLEENVHPSLQRLQALLQDLSEVSAPPLPPTSPGRDVAQDP

SEQ ID NO: 5513 - protein, 79 aa, Homo sapiens
MSSQQQQRQQQQCPPQRAQQQQVKQPCQPPPVKCQETCAPKTKDPCAPQVKKQCPPKGTIIPAQQKCPSAQQASKSKQK

SEQ ID NO: 5514 - protein, 273 aa, Homo sapiens
MGQKVTGGIKTVDMRDPTYRPLKQELQGLDYCKPTRLDLLLDMPPVSYDVQLLHSWNNNDRSLNVFVKEDDKLIFHRHPVAQSTDAIRGKVGYTRGLHVWQITWAMRQRGTHAVVGVATADAPLHSVGYTTLVGNNHESWGWDLGRNRLYHDGKNQPSKTYPAFLEPDETFIVPDSFLVALDMDDGTLSFIVDGQYMGVAFRGLKGKKLYPVVSAVWGHCEIRMRYLNGLDPEPLPLMDLCRRSVRLALGRERLGEIHTLPLPASLKAYLLYQ

SEQ ID NO: 5515 - protein, 1103 aa, Homo sapiens
MGNAAGSAEQPAGPAAPPPKQPAPPKQPMPAAGELEERFNRALNCMNLPPDKVQLLSQYDNEKKWELICDQERFQVKNPPAAYIQKLKSYVDTGGVSRKVAADWMSNLGFKRRVQESTQVLRELETSLRTNHIGWVQEFLNEENRGLDVLLEYLAFAQCSVTYDMESTDNGASNSEKNKPLEQSVEDLSKGPPSSVPKSRHLTIKLTPAHSRKALRNSRIVSQKDDVHVCIMCLRAIMNYQSGFSLVMNHPACVNEIALSLNNKNAAKALVLELLAAVCLVRGGHDIILAAFDNFKEVCGEQHRFEKLMEYFRNEDSNIDFMVACMQFINIVVHSVENMNFRVFLQYEFTHLGLDLYLERLRLTESDKLQVQIQAYLDNIFDVGALLEDTETKNAVLEHMEELQEQVALLTERLRDAENESMAKIAELEKQLSQARKELETLRERFSESTAMGPSRRPPEPEKAPPAAPTRPSALELKVEELEEKGLIRILRGPGDAVSIEILPVAVATPSGGDAPTPGVPTGSPSPDLAPAAEPAPGAAPPPPPPLPGLPSPQEAPPSAPPQAPPLPGSPEPPPAPPLPGDLPPPPPPPPPPPGTDGPVPPPPPPPPPPPGGPPDALGRRDSELGPGVKAKKPIQTKFRMPLLNWVALKPSQITGTVFTELNDEKVLQELDMSDFEEQFKTKSQGPSLDLSALKSKAAQKAPSKATLIEANRAKNLAITLRKGNLGAERICQAIEAYDLQALGLDFLELLMRFLPTEYERSLITRFEREQRPMEELSEEDRFMLCFSRIPRLPERMTTLTFLGNFPDTAQLLMPQLNAIIAASMSIKSSDKLRQILEIVLAFGNYMNSSKRGAAYGFRLQSLDALLEMKSTDRKQTLLHYLVKVIAEKYPQLTGFHSDLHFLDKAGSVSLDSVLADVRSLQRGLELTQREFVRQDDCMVLKEFLRANSPTMDKLLADSKTAQEAFESVVEYFGENPKTTSPGLFFSLFSRFIKAYKKAEQEVEQWKKEAAAQEAGADTPGKGEPPAPKSPPKARRPQMDLISELKRRQQKEPLIYESDRDGAIEDIITDLRNQPYIRADTGRRSARRRPPGPPLQVTSDLSL

SEQ ID NO: 5516 - protein, 200 aa, Homo sapiens
MEEKPSKVSLKSSDRQGSDEESVHSDTRDLWTTTTLSQAQLNMPLSEVCEGFDEEGRNISKTRGWHSPGRGSLDEGYKASHKPEELDEHALVELELHRGSSMEINLGEKDTASQIEAEKSSSMSSLNIAKHMPHRAYWAEQQSRLPLPLMELMENEALEILTKALRSYQLGIGRDHFLTKELQRYIEGLKKRRSKRLYVN

SEQ ID NO: 5517 - protein, 347 aa, Homo sapiens
MKLTSEKLPKNPFYASVSQYAAKNQKFFQWKKEKTDYTHANLVDKALQLLKERILKGDTLAYFLRGQLYFEEGWYEEALEQFEEIKEKDHQATYQLGVMYYDGLGTTLDAEKGVDYMKKILDSPCPKARHLKFAAAYNLGRAYYEGKGVKRSNEEAERLWLIAADNGNPKASVKAQSMLGLYYSTKEPKELEKAFYWHSEACGNGNLESQGALGLMYLYGQGIRQDTEAALQCLREAAERGNVYAQGNLVEYYYKMKFFTKCVAFSKRIADYDEVHDIPMIAQVTDCLPEFIGRGMAMASFYHARCLQLGLGITRDETTAKHYYSKACRLNPALADELHSLLIRQRI

SEQ ID NO: 5518 - protein, 1174 aa, Homo sapiens [sequence omitted]

SEQ ID NO: 5519 - protein, 744 aa, Homo sapiens
MAADKPADQGAEKHEGTGQSSGITDQEKELSTNAFQAFTSGNYDACLQHLACLQDINKDDYKIILNTAVAEFFKSNQTTTDNLRQTLNQLKNQVHSAVEEMDGLDDVENSMLYYNQAVILYHLRQYTEAISVGEKLYQFIEPFEEKFAQAVCFLLVDLYILTYQAEKALHLLAVLEKMISQGNNNKNGKNETGNNNNKDGSNHKAESGALIEAAKSKIHQYKVRAYIQMKSLKACKREIKSVMNTAGNSAPSLFLKSNFEYLRGNYRKAVKLLNSSNIAEHPGFMKTGECLRCMFWNNLGCIHFAMSKHNLGIFYFKKALQENDNVCAQLSAGSTDPGKKFSGRPMCTLLTNKRYELLYNCGIQLLHIGRPLAAFECLIEAVQVYHANPRLWLRLAECCIAANKGTSEQETKGLPSKKGIVQSIVGQGYHRKIVLASQSIQNTVYNDGQSSAIPVASMEFAAICLRNALLLLPEEQQDPKQENGAKNSNQLGGNTESSESSETCSSKSHDGDKFIPAPPSSPLRKQELENLKCSILACSAYVALALGDNLMALNHADKLLQQPKLSGSLKFLGHLYAAEALISLDRISDAITHLNPENVTDVSLGISSNEQDQGSDKGENEAMESSGKRAPQCYPSSVNSARTVMLFNLGSAYCLRSEYDKARKCLHQAASMIHPKEVPPEAILLAVYLELQNGNTQLALQIIKRNQLLPAVKTHSEVRKKPVFQPVHPIQPIQMPAFTTVQRK

SEQ ID NO: 5520 - protein, 120 aa, Homo sapiens
MHPPPPAAAMDFSQNSLFGYMEDLQELTIIERPVRRSLKTPEEIERLTVDEDLSDIERAVYLLSAGQDVQGTSVIANLPFLMRQNPTETLRRVLPKVRVHEDAHLFIQRVWISHMFVQRV

SEQ ID NO: 5521 - protein, 444 aa, Homo sapiens
MREIVLTQIGQCGNQIGAKFWEVISDEHAIDSAGTYHGDSHLQLERINVYYNEASGGRYVPRAVLVDLEPGTMDSVRSGPFGQVFRPDNFIFGQCGAGNNWAKGHYTEGAELMESVMDVVRKEAESCDCLQGFQLTHSLGGGTGSGMGTLLLSKIREEYPDRIINTFSILPSPKVSDTVVEPYNATLSVHQLIENADETFCIDNEALYDICSKTLKLPTPTYGDLNHLVSATMSGVTTCLRFPGQLNADLRKLAVNMVPFPRLHFFMPGFAPLTSRGSQQYRALTVAELTQQMFDAKNMMAACDPRHGRYLTAAAIFRGRMPMREVDEQMFNIQDKNSSYFADWLPNNVKTAVCDIPPRGLKMSATFIGNNTAIQELFKRVSEQFTAMFRRKAFLHWYTGEGMDEMEFTEAESNMNDLVSEYQQYQDATAEEEEDEEYAEEEVA

SEQ ID NO: 5522 - protein, 304 aa, Homo sapiens
MAKIEKNAPTMEKKPELFNIMEVDGVPTLILSKEWWEKVCNFQAKPDDLILATYPKSGTTWMHEILDMILNDGDVEKCKRAQTLDRHAFLELKFPHKEKPDLEFVLEMSSPQLIKTHLPSHLIPPSIWKENCKIVYVARNPKDCLVSYYHFHRMASFMPDPQNLEEFYEKFMSGKVVGGSWFDHVKGWWAAKDMHRILYLFYEDIKKDPKREIEKILKFLEKDISEEILNKIIYHTSFDVMKQNPMTNYTTLPTSIMDHSISPFMRKGMPGDWKNYFTVAQNEEFDKDYQKKMAGSTLTFRTEI

SEQ ID NO: 5523 - protein, 71 aa, Homo sapiens
MCGSYYGNYYGTPGYGFCGYGGLGYGYGGLGCGYGSCCGCGFRRLGCGYGYGSRSLCGYGYGCGSGSGYYY

SEQ ID NO: 5524 - protein, 697 aa, Homo sapiens
MDKKSTAEKLGKELGLQAKELSAVHSSHHEIGVNDSNLFSLEMREPLESSNTKSFHSAVEIKNRSQHELPCFQHHGIDTPTSLQKRSACCPPSLLRLEETASSSQDGDPQIWDDLPFSESLNKFLAVLESEIAVTQADVSSRKHHVDNDIDKFHADHSRLSVTPQRTTGALHTPPIALRSSQVIVKANCSKDDFLFNCKGNLSPSVEKESQPDNKVEAVSVNHNGRDMSEYFLPNPYLSALSSSSKDLETIVTLKKTIRISPHRESDHSSLNNKYLNGCGEISVSEMNEKLTTLCYRKYNDVSDLCKLENKQYCRWSKNQDDSFTICRKLTYPLETLCNSPNRSTNTLKEMPWGHINNNVTQSYSIGYEGSYDASADLFDDIAKEMDIATEITKKSQDILLKWGTSLAESHPSESDFSLRSLSEDFIQPSQKLSLQSLSDSRHSRTCSPTPHFQSDSEYNFENSQDFVPCSQSTPISGFHQTRIHGINRAFKKPVFYSDLDGNYEKIRIFPENDKQQASPSCPKNIKTPSQKIRSPIVSGVSQPDVFNHYPFAECHETDSDEWVPPTTQKIFPSDMLGFQGIGLGKCLAAYHFPDQQELPRKKLKHIRQGTNKGLIKKKLKNMLAAVVTKKKTHKYNCKSSGWISKCPDIQVLAAPQLHPILGPDSCSEVKCCLPFSEKGPPSVCETRSAWSPELFS

SEQ ID NO: 5525 - protein, 101 aa, Homo sapiens
MSNTQAERSIIGMIDMFHKYTGRDGKIEKPSLLTMMKENFPNFLSACDKKGIHYLATVFEKKDKNEDKKIDFSEFLSLLGDIAADYHKQSHGAAPCSGGSQ

SEQ ID NO: 5526 - protein, 225 aa, Homo sapiens
MAVRSLWAGRLRVQRLLAWSAAWESKGWPLPFSTATQRTAGEDCRSEDPPDELGPPLAERALRVKAVKLEKEVQDLTVRYQRAIADCENIRRRTQRCVEDAKIFGIQSFCKDLVEVADILEKTTECISEESEPEDQKLTLEKVFRGLLLLEAKLKSVFAKHGLEKLTPIGDKYDPHEHELICHVPAGVGVQPGTVALVRQDGYKLHGRTIRLARVEVAVESQRRL

SEQ ID NO: 5527 - protein, 400 aa, Homo sapiens
MTTKNLETKVTVTSSPIRGAGDGMETEEPPKSVEVTSGVQSRKHHSLQSPWKKAVPSESPGVLQLGKMLTEKAMEVKAVRILVPKAAITHDIPNKNTKVKSLGHHKGEFLGQSEGVIEPNKELSEVKNVLEKLKNSERRLLQDKEGLSNQLRVQTEVNRELKKLLVASVGDDLQYHFERLAREKNQLILENEALGRNTAQLSEQLERMSIQCDVWRSKFLASRVMADELTNSRAALQRQNRDAHGAIQDLLSEREQFRQEMIATQKLLEELLVSLQWGREQTYSPSVQPHSTAELALTNHKLAKAVNSHLLGNVGINNQKKIPSTVEFCSTPAEKMAETVLRILDPVTCKESSPDNPFFESSPTTLLATKKNIGRFHPYTRYENITFNCCNHCRGELIAL

SEQ ID NO: 5528 - protein, 244 aa, Homo sapiens
MDPGAALQRRAGGGGGLGAGSPALSGGQGRRRKQPPRPADFKLQVIIIGSRGVGKTSLMERFTDDTFCEACKSTVGVDFKIKTVELRGKKIRLQIWDTAGQERFNSITSAYYRSAKGIILVYDITKKETFDDLPKWMKMIDKYASEDAELLLVGNKLDCETDREITRQQGEKFAQQITGMRFCEASAKDNFNVDEIFLKLVDDILKKMPLDILRNELSNSILSLQPEPEIPPELPPPRPHVRCC

SEQ ID NO: 5529 - protein, 385 aa, Homo sapiens
MALPHDSNETSYLLPPNNEDWGRQTIPDFVYGQKDLMAEGIQWPRNAPGIPDALPQSPFDAALCSAWKQRVELGLFRYRLRELQTQILPGAVGFVAQLNVERGVQRRPPQTIKSVRQAFDPVQFNFNKIRPGEVLFRLHREPDLPGTLLQEDILVVINVSPLEWGHVLLVPEPARQLPQRLLPGALRAGIEAVLLSLHPGFRVGFNSLGGLASVNHLHLHGYYLAHRLPVEQAPSEPLDPGGHLHLLQDLPAPGFLFYTRGPGPDLESLISRVCRATDYLTDHEIAHNLFVTRGAPPGKTSPSSALTGVRVILWARKSSFGIKDGEAFNVALCELAGHLPVKTSQDFSSLTEAAAVALIQDCRLPPSQAEDVQAALVALMSQEEQ

SEQ ID NO: 5530 - protein, 63 aa, Homo sapiens
MLCDNFPGAVFPGCYWGSYGYPLGYSVGCGYGSTYSPVGYGFGYGYNGCGAFGYRRYSPFALY

SEQ ID NO: 5531 - protein, 360 aa, Homo sapiens
MLGSGFKAERLRVNLRLVINRLKLLEKKKTELAQKARKEIADYLAAGKDERARIRVEHIIREDYLVEAMEILELYCDLLLARFGLIQSMKELDSGLAESVSTLIWAAPRLQSEVAELKIVADQLCAKYSKEYGKLCRTNQIGTVNDRLMHKLSVEAPPKILVERYLIEIAKNYNVPYEPDSVVMAEAPPGVETDLIDVGFTDDVKKGGPGRGGSGGFTAPVGGPDGTVPMPMPMPMPMPSANTPFSYPLPKGPSDFNGLPMGTYQAFPNIHPPQIPATPPSYESMTLMLIRISLLHRLLVLDPSQKPLQSFLPDLQITMTTLSYQSCHLCQTHYQLHLLVPAPQHLKTLTLMIFPGGLKS

SEQ ID NO: 5532 - protein, 175 aa, Homo sapiens
MPKRSCPFADVAPLQLKVRVSQRELSRGVCAERYSQEVFEKTKRLLFLGAQAYLDHVWDEGCAVVHLPESPKPGPTGAPRAARGQMLIGPDGRLIRSLGQASEADPSGVASIACSSCVRAVDGKAVCGQCERALCGQCVRTCWGCGSVACTLCGLVDCSDMYEKVLCTSCAMFET

SEQ ID NO: 5533 - protein, 121 aa, Homo sapiens
MEAEVDKLELMFQKAESDLDYIQYRLEYEIKTNHPDSASEKNPVTLLKELSVIKSRYQTLYARFKPVAVEQKESKSRICATVKKTMNMIQKLQKQTDLELSPLTKEEKTAAEQFKFHMPDL

SEQ ID NO: 5534 - protein, 655 aa, Homo sapiens
MVTTLGPKMAAEWGGGVGYSGSGPGRSRWRWSGSVWVRSVLLLLGGLRASATSTPVSLGSSPPCRHHVPSDTEVINKVHLKANHVVKRDVDEHLRIKTVYDKSVEELLPEKKNLVKNKLFPQAISYLEKTFQVRRPAGTILLSRQCATNQYLRKENDPHRYCTGECAAHTKCGPVIVPEEHLQQCRVYRGGKWPHGAVGVPDQEGISDADFVLYVGALATERCSHENIISYAAYCQQEANMDRPIAGYANLCPNMISTQPQEFVGMLSTVKHEVIHALGFSAGLFAFYHDKDGNPLTSRFADGLPPFNYSLGLYQWSDKVVRKVERLWDVRDNKIVRHTVYLLVTPRVVEEARKHFDCPVLEGMELENQGGVGTELNHWEKRLLENEAMTGSHTQNRVLSRITLALMEDTGRQMLSPYCDTLRSNPLQLTCRQDQRAVAVCNLQKFPKPLPQEYQYFDELSGIPAEDLPYYGGSVEIADYCPFSQEFSWHLSGEYQRSSDCRILENQPEIFKNYGAEKYGPHSVCLIQKSAFVMEKCERKLSYPDWGSGCYQVSCSPQGLKVWVQDTSYLCSRAGQVLPVSIQMNGWIHDGNLLCPSCWDFCELCPPETDPPATNLTRALPLDLCSCSSSLVVTLWLLLGNLFPLLAGFLLCIWH

SEQ ID NO: 5535 - protein, 135 aa, Homo sapiens [sequence omitted]

SEQ ID NO: 5536 - protein, 372 aa, Homo sapiens
MNHCQLPVVIDNGSGMIKAGVAGCREPQFIYPNIIGRAKGQSRAAQGGLELCVGDQAQDWRSSLFISYPVERGLITSWEDMEIMWKHIYDYNLKLKPCDGPVLITEPALNPLANRQQITEMFFEHLGVPAFYMSIQAVLALFAAGFTTGLVLNSGAGVTQSVPIFEGYCLPHGVQQLDLAGLDLTNYLMVLMKNHGIMLLSASDRKIVEDIKESFCYVAMNYEEEMAKKPDCLEKVYQLPDGKVIQLHDQLFSCPEALFSPCHMNLEAPGIDKICFSSIMKCDTGLRNSFFSNIILAGGSTSFPGLDKRLVKDIAKVAPANTAVQVIAPPERKISVWMGGSILASLSAFQDMWITAAEFKEVGPNIVHQRCF

SEQ ID NO: 5537 - protein, 1023 aa, Homo sapiens
MDANSKDKPPETKESAMNNAGNASFILGTGKIVTPQKHAELPPNPCTPDTFKSPLNFSTVTVEQLGITPESFVRNSAGKSSSYLKKCRRRSAVGARGSPETNHLIRFIARQQNIKNARKSPLAQDSPSQGSPALYRNVNTLRERISAFQSAFHSIKENEKMTGCLEFSEAGKESEMTDLTRKEGLSACQQSGFPAVLSSKRRRISYQRDSDENLTDAEGKVIGLQIFNIDTDRACAVETSVDLSEISSKLGSTQSGFLVEESLPLSELTETSNALKVADCVVGKGSSDAVSPDTFTAEVSSDAVPDVRSPATPACRRDLPTPKTFVLRSVLKKPSVKMCLESLQEHCNNLYDDDGTHPSLISNLPNCCKEKEAEDEENFEAPAFLNMRKRKRVTFGEDLSPEVFDESLPANTPLRKGGTPVCKKDFSGLSSLLLEQSPVPEPLPQPDFDDKGENLENIEPLQVSFAVLSSPNKSSISETLSGTDTFSSSNNHEKISSPKVGRITRTSNRRNQLVSVVEESVCNLLNTEVQPCKEKKINRRKSQETKCTKRALPKKSQVLKSCRKKKGKGKKSVQKSLYGERDIASKKPLLSPIPELPEVPEMTPSIPSIRRLGSGYFSSNGKLEEVKTPKNPVKRKDLLRHDPDLHMHQGYDKYDVSEFCSYIKSSSSLGNATSDEDPNTNIMNINENKNIPKAKNKSESENEPKAGTDSPVSCASVTEERVASDSPKPALTLQQGQEFSAGGQNAENLCQFFKISPDLNIKCERKDDFLGAAEGKLQCNRLMPNSQKDCHCLGDVLIENTKESKSQSEDLGRKPMESSSVVSCRDRKDRRRSMCYSDGRSLHLEKNGNHTPSSSVGSSVEISLENSELFKDLSDAIEQTFQRRNSETKVRRSTRLQKDLENEGLVWISLPLPSTSQKAKRRTICTFDSSGFESMSPIKETVSSRQKPQMAPPVSDPENSQGPAAGSSDEPGKRRKSFCISTLANTKATSQFKGYRRRSSLNGKGESSLTALERIEHNGERKQ

SEQ ID NO: 5538 - protein, 320 aa, Homo sapiens
MSKSESPKEPEQLRKLFIGGLSFETTDESLRSHFEQWGTLTDCVVMRDPNTKRSRGFGFVTYATVEEVDAAMNARPHKVDGRVVEPKRAVSREDSQRPGAHLTVKKIFVGGIKEDTEEHHLRDYFEQYGKIEVIEIMTDRGSGKKRGFAFVTFDDHDSVDKIVIQKYHTVNGHNCEVRKALSKQEMASASSSQRGRSGSGNFGGGRGGGFGGNDNFGRGGNFSGRGGFGGSRGGGGYGGSGDGYNGFGNDGNNFGGGGSYNDFGNYNNQSSNFGPMKGGNFGGRSSGPYGGGGQYFAKPRNQGGYGGSSSSSSYGSGRRF

SEQ ID NO: 5539 - protein, 46 aa, Homo sapiens
MCSLASGATGYSHLLKKHFHTVSLSISLILTAWFINMDLNFMDTLS

SEQ ID NO: 5540 - protein, 65 aa, Homo sapiens
MCYYSNYYGGLRYGYGVLGGGYGCGCGYGHGYGGLGCGYGRGYGGYGYGCCRPSCYGRYWSCGFY

SEQ ID NO: 5541 - protein, 2354 aa, Homo sapiens
MEKATVPVAAATAAEGEGSPPAVAAVAGPPAAAEVGGGVGGSSRARSASSPRGMVRVCDLLLKKKPPQQQHHKAKRNRTCRPPSSSESSSDSDNSGGGGGGGGGGGGGGGTSSNNSEEEEDDDDEEEEVSEVESFILDQDDLENPMLETASKLLLSGTADGADLRTVDPETQARLEALLEAAGIGKLSTADGKAFADPEVLRRLTSSVSCALDEAAAALTRMRAESTANAGQSDNRSLAEACSEGDVNAVRKLLIEGRSVNEHTEEGESLLCLACSAGYYELAQVLLAMHANVEDRGIKGDITPLMAAANGGHVKIVKLLLAHKADVNAQSSTGNTALTYACAGGYVDVVKVLLESGASIEDHNENGHTPLMEAGSAGHVEVARLLLENGAGINTHSNEFKESALTLACYKGHLEMVRFLLEAGADQEHKTDEMHTALMEACMDGHVEVARLLLDSGAQVNMPADSFESPLTLAACGGHVELAALLIERGASLEEVNDEGYTPLMEAAREGHEEMVALLLGQGANINAQTEETQETALTLACCGGFLEVADFLIKAGADIELGCSTPLMEAAQEGHLELVKYLLAAGANVHATTATGDTALTYACENGHTDVADVLLQAGADLEHESEGGRTPLMKAARAGHVCTVQFLISKGANVNRTTANNDHTVLSLACAGGHLAVVELLLAHGADPTHRLKDGSTMLIEAAKGGHTSVVCYLLDYPNNLLSAPPPDVTQLTPPSHDLNRAPRVPVQALPMVVPPQEPDKPPANVATTLPIRNKAVSGRASAMSNTPTHSIAASISQPQTPTPSPIISPSAMLPIYPAIDIDAQTESNHDTALTLACAGGHEELVQTLLERGASIEHRDKKGFTPLILAATAGHVGVVEILLDNGADIEAQSERTKDTPLSLACSGGRQEVVELLLARGANKEHRNVSDYTPLSLAASGGYVNIIKILLNAGAEINSRTGSKLGISPLMLAAMNGHTAAVKLLLDMGSDINAQIETNRNTALTLACFQGRTEVVSLLLDRKANVEHRAKTGLTPLMEAASGGYAEVGRVLLDKGADVNAPPVPSSRDTALTIAADKGHYKFCELLIGRGAHIDVRNKKGNTPLWLAANGGHLDVVQLLVQAGADVDAADNRKITPLMAAFRKGHVKVVRYLVKEVNQFPSDSECMRYIATITDKEMLKKCHLCMESIVQAKDRQAAEANKNASILLEELDLEKLREESRRLALAAKREKRKEKRRKKKEEQRRKLEEIEAKNKENFELQAAQEKEKLKVEDEPEVLTEPPSATTTTTIGISATWTTLAGSHGKRNNTITTTSSKRKNRKNKITPENVQIIFDDPLPISYSQPEKVNGESKSSSTSESGDSDNMRISSCSDESSNSNSSRKSDNHSPAVVTTTVSSKKQPSVLVTFPKEERKSVSGKASIKLSETISEGTSNSLSTCTKSGPSPLSSPNGKLTVASPKRGQKREEGWKEVVRRSKKVSVPSTVISRVIGRGGCNINAIREFTGAHIDIDKQKDKTGDRIITIRGGTESTRQATQLINALIKDPDKEIDELIPKNRLKSSSANSKIGSSAPTTTAANTSLMGIKMTTVALSSTSQTATALTVPAISSASTHKTIKNPVNNVRPGFPVSLPLAYPPPQFAHALLAAQTFQQIRPPRLPMTHFGGTFPPAQSTWGPFPVRPLSPARATNSPKPHMVPRHSNQNSSGSQVNSAGSLTSSPTTTTSSSASTVPGTSTNGSPSSPSVRRQLFVTVVKTSNATTTTVTTTASNNNTAPTNATYPMPTAKEHYPVSSPSSPSPPAQPGGVSRNSPLDCGSASPNKVASSSEQEAGSPPVVETTNTRPPNSSSSSGSSSAHSNQQQPPGSVSQEPRPPLQQSQVPPPEVRMTVPPLATSSAPVAVPSTAPVTYPMPQTPMGCPQPTPKMETPAIRPPPHGTTAPHKNSASVQNSSVAVLSVNHIKRPHSVPSSVQLPSTLSTQSACQNSVHPANKPIAPNFSAPLPFGPFSTLFENSPTSAHAFWGGSVVSSQSTPESMLSGKSSYLPNSDPLHQSDTSKAPGFRPPLQRPAPSPSGIVNMDSPYGSVTPSSTHLGNFASNISGGQMYGPGAPLGGAPAAANFNRQHFSPLSLLTPCSSASNDSSAQSVSSGVRAPSPAPSSVPLGSEKPSNVSQDARGSVPVPIGTERSARIRQTGTSAPSVIGSNLSTSVGHSGIWSFEGIGGNQDKVDWCNPGMGNPMIHRPMSDPGVFSQHQAMERDSTGIVTPSGTFHQHVPAGYMDFPKVGGMPFSVYGNAMIPPVAPIPDGAGGPIFNGPHAADPSWNSLIKMVSSSTENNGPQTVWTGPWAPHMNSVHMNQLG

SEQ ID NO: 5542 - protein, 457 aa, Homo sapiens
MSGTRASNDRPPGAGGVKRGRLQQEAAATGSRVTVVLGAQWGDEGKGKVVDLLATDADIISRCQGGNNAGHTVVVDGKEYDFHLLPSGIINTKAVSFIGNGVVIHLPGLFEEAEKNEKKGLKDWEKRLIISDRAHLVFDFHQAVDGLQEVQRQAQEGKNIGTTKKGIGPTYSSKAARTGLRICDLLSDFDEFSSRFKNLAHQHQSMFPTLEIDIEGQLKRLKGFAERIRPMVRDGVYFMYEALHGPPKKILVEGANAALLDIDFGTYPFVTSSNCTVGGVCTGLGIPPQNIGDVYGVVKAYTTRVGIGAFPTEQINEIGGLLQTRGHEWGVTTGRKRRCGWLDLMILRYAHMVNGFTALALTKLDILDVLGEVKVGVSYKLNGKRIPYFPANQEMLQKVEVEYETLPGWKADTTGARRWEDLPPQAQNYIRFVENHVGVAVKWVGVGKSRESMIQLF

SEQ ID NO: 5543 - protein, 531 aa, Homo sapiens
MCSLASGATGGRGAVENEEDLPELSDSGDEAAWEDEDDADLPHGKQQTPCLFCNRLFTSAEETFSHCKSEHQFNIDSMVHKHGLEFYGYIKLINFIRLKNPTVEYMNSIYNPVPWEKEEYLKPVLEDDLLLQFDVEDLYEPVSVPFSYPNGLSENTSVVEKLKHMEARALSAEAALARAREDLQKMKQFAQDFVMHTDVRTCSSSTSVIADLQEDEDGVYFSSYGHYGIHEEMLKDKIRTESYRDFIYQNPHIFKDKVVLDVGCGTGILSMFAAKAGAKKVLGVDQSEILYQAMDIIRLNKLEDTITLIKGKIEEVHLPVEKVDVIISEWMGYFLLFESMLDSVLYAKNKYLAKGGSVYPDICTISLVAVSDVNKHADRIAFWDDVYGFKMSCMKKAVIPEAVVEVLDPKTLISEPCGIKHIDCHTTSISDLEFSSDFTLKITRTSMCTAIAGYFDIYFEKNCHNRVVFSTGPQSTKTHWKQTVFLLEKPFSVKAGEALKGKVTVHKSKKDPRSLTVTLTLNNSTQTYGLQ

SEQ ID NO: 5544 - protein, 552 aa, Homo sapiens
MSVLSPGDLKPKRGSPHRGSLDRTDASTDLAMRSWPSELGSRTCSTSATTTAPSNSTPIARHPGRTKGYNSDDNLCEPSLEFEVPNHRQYVSRPSSLESSRNTSSNSSPLNLKGSSEQLHGRSESFSSEDLIPSRDLATLPREASTPGRNALGRHEYPLPRNGPLPQEGAQKRGTAPPYVGVRPCSASPSSEMVTLEEFLEESNRSSPTHDTPSCRDDLLSDYFRKASDPPAIGGQPGPPAKKEGAKMPTNFVAPTVKMAAPTSEGRPLKPGQYVKPNFRLTEAEAPPSVAPRQAQPPQSLSLGRPRQAPVPPASHAPASRSASLSRAFSLASADLLRASGPEACKQESPQKLGAPEALGGRETGSHTLQSPAPPSSHSLARERTPLVGKAGSSCQGPGPRSRPLDTRRFSLAPPKEERLAPLHQSATAPAIATAGAGAAAAGSGSNSQLLHFSPAAAPAARTKPKAPPRSGEVATITPVRAGLSLSEGDGVPGQGCSEGLPAKSPGRSPDLAPHLGRALEDCSRGSVSKSSPASPEPGGDPQTVWYEYGCV

SEQ ID NO: 5545 - protein, 257 aa, Homo sapiens
MADKMDMSLDDIIKLNRSQRGGRGGGRGRGRAGSQGGRGGGAQAAARVNRGGGPIRNRPAIARGAAGGGGRNRPAPYSRPKQLPDKWQHDLFDSGFGGGAGVETGGKLLVSNLDFGVSDADIQELFAEFGTLKKAAVHYDRSGRSLGTADVHFERKADALKAMKQYNGVPLDGRPMNIQLVTSQIDAQRRPAQSVNRGGMTRNRGAGGFGGGGGTRRGTRGGARGRGRGAGRNSKQQLSAEELDAQLDAYNARMDTS

SEQ ID NO: 5546 - protein, 291 aa, Homo sapiens
MGVAARPPALRHWFSHSIPLAIFALLLLYLSVRSLGARSGCGPRAQPCVPGETAPFQVRQESGTLEAPERKQPPCLGPRGMLGRMMRRFHASLKPEGDVGLSPYLAGWRALVEFLTPLGSVFAFATREAFTKVTDLEARVHGPDAEHYWSLVAMAAWERRAGLLEQPGAAPRDPTRSSGSRTLLLLHRALRWSQLCLHRVATGALGGPDAGVQCSDAYRAALGPHHPWLVRQTARLAFLAFPGRRRLLELACPGATEAEARAALVRAAGTLEDVYNRTQSLLAERGLLQLA

SEQ ID NO: 5547 - protein, 1099 aa, Homo sapiens
MGNAAGSAEQPAGPAAPPPKQPAPPKQPMPAAGELEERFNRALNCMNLPPDKVQLLSQYDNEKKWELICDQERFQVKNPPAAYIQKLKSYVDTGGVSRKVAADWMSNLGFKRRVQESTQVLRELETSLRTNHIGWVQEFLNEENRGLDVLLEYLAFAQCSVTYDMESTDNGASNSEKNKPLEQSVEDLSKGPPSSVPKSRHLTIKLTPAHSRKALRNSRIVSQKDDVHVCIMCLRAIMNYQSGFSLVMNHPACVNEIALSLNNKNAAKALVLELLAAVCLVRGGHDIILAAFDNFKEVCGEQHRFEKLMEYFRNEDSNIDFMVACMQFINIVVHSVENMNFRVFLQYEFTHLGLDLYLERLRLTESDKLQVQIQAYLDNIFDVGALLEDTETKNAVLEHMEELQEQVALLTERLRDAENESMAKIAELEKQLSQARKELETLRERFSESTAMGPSRRPPEPEKAPPAAPTRPSALELKVEELEEKGLIRILRGPGDAVSIEILPVAVATPSGGDAPTPGVPTGSPSPDLAPAAEPAPGAAPPPPPPLPGLPSPQEAPPSAPPQAPPLPGSPEPPPAPPLPGDLPPPPPPPPPPPGTDGPVPPPPPPPPPPPGGPPDALGRRDSELGPGVKAKKPIQTKFRMPLLNWVALKPSQITGTVFTELNDEKVLQELDMSDFEEQFKTKSQGPSLDLSALKSKAAQKAPSKATLIEANRAKNLAITLRKGNLGAERICQAIEAYDLQALGLDFLELLMRFLPTEYERSLITRFEREQRPMEELSEEDRFMLCFSRIPRLPERMTTLTFLGNFPDTAQLLMPQLNAIIAASMSIKSSDKLRQILEIVLAFGNYMNSSKRGAAYGFRLQSLDALLEMKSTDRKQTLLHYLVKVIAEKYPQLTGFHSDLHFLDKAGSVSLDSVLADVRSLQRGLELTQREFVRQDDCMVLKEFLRANSPTMDKLLADSKTAQEAFESVVEYFGENPKTTSPGLFFSLFSRFIKAYKKAEQEVEQWKKEAAAQEAGADTPGKGEPPAPKSPPKARRPQMDLISELKRRQQKEPLIYESDRDGAIEDIITVIKTVPFTARTGKRTSRLLCEASLGEEMPL

SEQ ID NO: 5548 - protein, 612 aa, Homo sapiens
MENQLAKSTEERTFQYQDSLPSLPVPSLEESLKKYLESVKPFANQEEYKKTEEIVQKFQSGIGEKLHQKLLERAKGKRNWLEEWWLNVAYLDVRIPSQLNVNFAGPAAHFEHYWPPKEGTQLERGSITLWHNLNYWQLLRKEKVPVHKVGNTPLDMNQFRMLFSTCKVPGITRDSIMNYFRTESEGRSPNHIVVLCRGRAFVFDVIHEGCLVTPPELLRQLTYIHKKCHSEPDGPGIAALTSEERTRWAKAREYLIGLDPENLALLEKIQSSLLVYSMEDSSPHVTPEDYSEIIAAILIGDPTVRWGDKSYNLISFSNGVFGCNCDHAPFDAMIMVNISYYVDEKIFQNEGRWKGSEKVRDIPLPEELIFIVDEKVLNDINQAKAQYLREASDLQIAAYAFTSFGKKLTKNKMLHPDTFIQLALQLAYYRLHGHPGCCYETAMTRHFYHGRTETMRSCTVEAVRWCQSMQDPSVNLRERQQKMLQAFAKHNKMMKDCSAGKGFDRHLLGLLLIAKEEGLPVPELFTDPLFSKSGGGGNFVLSTSLVGYLRVQGVVVPMVHNGYGFFYHIRDDRFVVACSAWKSCPETDAEKLVQLTFCAFHDMIQLMNSTHL

SEQ ID NO: 5549 - protein, 589 aa, Homo sapiens
MSDSPAGSNAAPESSGSGSGGGGKRPAVPAAVSLLPPADPLRQANRLPIRVLKMLSAHTGHLLHPEYLQPLSSTPVSPIELDAKKSPLALLAQTCSQIGKPDPPPSSKLNSVAAAANGLGAEKDPGRSAPGAASAAAALKQLGDSPAEDKSSFKPYSKGSGGGDSRKDSGSSSVSSTSSSSSSSPGDKAGFRVPSAACPPFPPHGAPVSASSSSSSPGGSRGGSPHHSDCKNGGGVGGGELDKKDQEPKPSPEPAAVSRGGGGEPGAHGGAESGASGRKSEPPSALVGAGHVAPVSPYKPGHSVFPLPPSSIGYHGSIVGAYAGYPSQFVPGLDPSKSGLVGGQLSGGLGLPPGKPPSSSPLTGASPPSFLQGLCRDPYCLGGYHGASHLGGSSCSTCSAHDPAGPSLKAGGYPLVYPGHPLQPAALSSSAAQAALPGHPLYTYGFMLQNEPLPHSCNWVAASGPCDKRFATSEELLSHLRTHTALPGAEKLLAAYPGASGLGSAAAAAAAAASCHLHLPPPAAPGSPGSLSLRNPHTLGLSRYHPYGKSHLSTAGGLAVPSLPTAGPYYSPYALYGQRLASASALGYQ

SEQ ID NO: 5550 - protein, 339 aa, Homo sapiens
MWTARGPFRRDRWSSEDEEAAGPSQALSPLLSDTRKIVSEGELDQLAQIRPLIFNFHEQTAIKDCLKILEEKTAAYDIMQEFMALELKNLPGEFNSGNQPSNREKNRYRDILPYDSTRVPLGKSKDYINASYIRIVNCGEEYFYIATQGPLLSTIDDFWQMVLENNSNVIAMITREIEGGIIKCYHYWPISLKKPLELKHFRVFLENYQILQYFIIRMFQVVEKSTGTSHSVKQLQFTKWPDHGTPASADSFIKYIRYARKSHLTGPMVVHCSAGIGRTGVFLCVDVVFCAIVKNCSFNIMDIVAQMREQRSGMVQTKEQYHFCYDIVLEVLRKLLTLD

SEQ ID NO: 5551 - protein, 637 aa, Homo sapiens
MSALAGEDVWRCPGCGDHIAPSQIWYRTVNETWHGSCFRCSECQDSLTNWYYEKDGKLYCPKDYWGKFGEFCHGCSLLMTGPFMVAGEFKYHPECFACMSCKVIIEDGDAYALVQHATLYCGKCHNEVVLAPMFERLSTESVQEQLPYSVTLISMPATTEGRRGFSVSVESACSNYATTVQVKEVNRMHISPNNRNAIHPGDRILEINGTPVRTLRVEEVEDAISQTSQTLQLLIEHDPVSQRLDQLRLEARLAPHMQNAGHPHALSTLDTKENLEGTLRRRSLRRSNSISKSPGPSSPKEPLLFSRDISRSESLRCSSSYSQQIFRPCDLIHGEVLGKGFFGQAIKVTHKATGKVMVMKELIRCDEETQKTFLTEVKVMRSLDHPNVLKFIGVLYKDKKLNLLTEYIEGGTLKDFLRSMDPFPWQQKVRFAKGIASGMAYLHSMCIIHRDLNSHNCLIKLDKTVVVADFGLSRLIVEERKRAPMEKATTKKRTLRKNDRKKRYTVVGNPYWMAPEMLNGKSYDETVDIFSFGIVLCEIIGQVYADPDCLAALDFGLNVKLFWEKFVPTDCPPAFFPLAAICCRLEPESRPAFSKLEDSFEALSLYLGELGIPLPAELEELDHTVSMQYGLTRDSPP

SEQ ID NO: 5552 - protein, 201 aa, Homo sapiens
MAAAKDTHEDHDTSTENTDESNHDPQFEPIVSLPEQEIKTLEEDEEELFKMRAKLFRFASENDLPEWKERGTGDVKLLKHKEKGAIRLLMRRDKTLKICANHYITPMMELKPNAGSDRAWVWNTHADFADECPKPELLAIRFLNAENAQKFKTKFEECRKEIEEREKKAGSGKNDHAEKVAEKLEALSVKEETKEDAEEKQ

SEQ ID NO: 5553 - protein, 717 aa, Homo sapiens
MAADKPADQGAEKHEGTGQSSGITDQEKELSTNAFQAFTSGNYDACLQHLACLQDINKDDYKIILNTAVAEFFKSNQTTTDNLRQTLNQLKNQVHSAVEEMDGLDDVENSMLYYNQAVILYHLRQYTEAISVGEKLYQFIEPFEEKFAQAVCFLLVDLYILTYQAEKALHLLAVLEKMISQGNNNKNGKNETGNNNNKDGSNHKAESGALIEAAKSKIHQYKVRAYIQMKSLKACKREIKSVMNTAGNSAPSLFLKSNFEYLRGNYRKAVKLLNSSNIAEHPGFMKTGECLRCMFWNNLGCIHFAMSKHNLGIFYFKKALQENDNVCAQLSAGSTDPGKKFSGRPMCTLLTNKRYELLYNCGIQLLHIGRPLAAFECLIEAVQVYHANPRLWLRLAECCIAANKGTSEQETKGLPSKKGIVQSIVGQGYHRKIVLASQSIQNTVYNDGQSSAIPVASMEFAAICLRNALLLLPEEQQDPKQENGAKNSNQLGGNTESSESSETCRCSILACSAYVALALGDNLMALNHADKLLQQPKLSGSLKFLGHLYAAEALISLDRISDAITHLNPENVTDVSLGISSNEQDQGSDKGENEAMESSGKRAPQCYPSSVNSARTVMLFNLGSAYCLRSEYDKARKCLHQAASMIHPKEVPPEAILLAVYLELQNGNTQLALQIIKRNQLLPAVKTHSEVRKKPVFQPVHPIQPIQMPAFTTVQRK

SEQ ID NO: 5554 - protein, 495 aa, Homo sapiens
MEALLEGIQNRGHGGGFLTSCEAELQELMKQIDIMVAHKKSEWEGRTHALETCLKIREQELKSLRSQLDVTHKEVGMLHQQVEEHEKIKQEMTMEYKQELKKLHEELCILKRSYEKLQKKQMREFRGNTKNHREDRSEIERLTAKIEEFRQKSLDWEKQRLIYQQQVSSLEAQRKALAEQSEIIQAQLVNRKQKLESVELSSQSEIQHLSSKLERANDTICANELEIERLTMRVNDLVGTSMTVLQEQQQKEEKLRESEKLLEALQEEKRELKAALQSQENLIHEARIQKEKLQEKVKATNTQHAVEAISLESVSATCKQLSQELMEKYEELKRMEAHNNEYKAEIKKLKEQILQGEQSYSSALEGMKMEISHLTQELHQRDITIASTKGSSSDMEKRLRAEMQKAEDKAVEHKEILDQLESLKLENRHLSEMVMKLELGLHECSLPVSPLGSIATRFLEEEELRSHHILERLDAHIEELKRESEKTVRQFTALK

SEQ ID NO: 5555 - protein, 653 aa, Homo sapiens
MIPPQEASARRREIEDKLKQEEETLSFIRDSLEKSDQLTKNMVSILSSFESRLMKLENSIIPVHKQTENLQRLQENVEKTLSCLDHVISYYHVASDTEKIIREGPTGRLEEYLGSMAKIQKAVEYFQDNSPDSPELNKVKLLFERGKEALESEFRSLMTRHSKVVSPVLILDLISGDDDLEAQEDVTLEHLPESVLQDVIRISRWLVEYGRNQDFMNVYYQIRSSQLDRSIKGLKEHFHKSSSSSGVPYSPAIPNKRKDTPTKKPVKRPGRDDMLDVETDAYIHCVSAFVKLAQSEYQLLADIIPEHHQKKTFDSLIQDALDGLMLEGENIVSAARKAIVRHDFSTVLTVFPILRHLKQTKPEFDQVLQGTAASTKNKLPGLITSMETIGAKALEDFADNIKNDPDKEYNMPKDGTVHELTSNAILFLQQLLDFQETAGAMLASQETSSSATSYSSEFSKRLLSTYICKVLGNLQLNLLSKSKVYEDPALSAIFLHNNYNYILKSLEKSELIQLVAVTQKTAERSYREHIEQQIQTYQRSWLKVTDYIAEKNLPVFQPGVKLRDKERQIIKERFKGFNDGLEELCKIQKAWAIPDTEQRDRIRQAQKTIVKETYGAFLQKFGSVPFTKNPEKYIKYGVEQVGDMIDRLFDTSA

SEQ ID NO: 5556 - protein, 244 aa, Homo sapiens
MELTIFILRLAIYILTFPLYLLNFLGLWSWICKKWFPYFLVRFTVIYNEQMASKKRELFSNLQEFAGPSGKLSLLEVGCGTGANFKFYPPGCRVTCIDPNPNFEKFLIKSIAENRHLQFERFVVAAGENMHQVADGSVDVVVCTLVLCSVKNQERILREVCRVLRPGGAFYFMEHVAAECSTWNYFWQQVLDPAWHLLFDGCNLTRESWKALERASFSKLKLQHIQAPLSWELVRPHIYGYAVK

SEQ ID NO: 5557 - protein, 1173 aa, Homo sapiens
MAVETLSPDWEFDRVDDGSQKIHAEVQLKNYGKFLEEYTSQLRRIEDALDDSIGDVWDFNLDPIALKLLPYEQSSLLELIKTENKVLNKVITVYAALCCEIKKLKYEAETKFYNGLLFYGEGATDASMVEGDCQIQMGRFISFLQELSCFVTRCYEVVMNVVHQLAALYISNKIAPKIIETTGVHFQTMYEHLGELLTVLLTLDEIIDNHITLKDHWTMYKRLLKSVHHNPSKFGIQEEKLKPFEKFLLKLEGQLLDGMIFQACIEQQFDSLNGGVSVSKNSTFAEEFAHSIRSIFANVEAKLGEPSEIDQRDKYVGICGLFVLHFQIFRTIDKKFYKSLLDICKKVPAITLTANIIWFPDNFLIQKIPAAAKLLDRKSLQAIKIHRDTFLQQKAQSLTKDVQSYYVFVSSWMMKMESILSKEQRMDKFAEDLTNRCNVFIQGFLYAYSISTIIKTTMNLYMSMQKPMTKTSVKALCRLVELLKAIEHMFYRRSMVVADSVSHITQHLQHQALHSISVAKKRVISDKKYSEQRLDVLSALVLAENTLNGPSTKQRRLIVSLALSVGTQMKTFKDEELFPLQVVMKKLDLISELRERVQTQCDCCFLYWHRAVFPIYLDDVYENAVDAARLHYMFSALRDCVPAMMHARHLESYEILLDCYDKEIMEILNEHLLDKLCKEIEKDLRLSVHTHLKLDDRNPFKVGMKDLALFFSLNPIRFFNRFIDIRAYVTHYLDKTFYNLTTVALHDWATYSEMRNLATQRYGLVMTEAHLPSQTLEQGLDVLEIMRNIHIFVSRYLYNLNNQIFIERTSNNKHLNTINIRHIANSIRTHGTGIMNTTVNFTYQFLKKKFYIFSQFMYDEHIKSRLIKDIRFFREIKDQNDHKYPFDRAEKFNRGIRKLGVTPEGQSYLDQFRQLISQIGNAMGYVRMIRSGGLHCSSNAIRFVPDLEDIVNFEELVKEEGLAEETLKAARHLDSVLSDHTRNSAEGTEYFKMLVDVFAPEFRRPKNIHLRNFYIIVPPLTLNFVEHSISCKEKLNKKNKIGAAFTDDGFAMGVAYILKLLDQYREFDSLHWFQSVREKYLKEIRAVAKQQNVQSASQDEKLLQTMNLTQKRLDVYLQEFELLYFSLSSARIFFRADKTAAEENQEKKEKEEETKTSNGDLSDSTVSADPVVK

SEQ ID NO: 5558 - protein, 323 aa, Homo sapiens
MLRWTVHLEGGPRRVNHAAVAVGHRVYSFGGYCSGEDYETLRQIDVHIFNADTHKWFTPRVSGTVPGARDGHSACVLGKIMYIFGGYEQQADCFSNDIHKLDTSTMTWTLICTKGSPARWRDFHSATMLGSHMYVFGGRADRFGPFHSNNEIYCNRIRVFDTRTEAWLDCPPTPVLPEGRRSHSAFGYNGELYIFGGYNARLNRHFHDLWKFNPVSFTWKKIEPKGKGPCPRRRQCCCIVGDKIVLFGGTSPSPEEGLGDEFDLIDHSDLHILDFSPSLKTLCKLAVIQYNLDQSCLPHDIRWELNAMTTNSNISRPIVSSHG

SEQ ID NO: 5559 - protein, 838 aa, Homo sapiens
MTGAEIEPSAQAKPEKKAGEEVIAGPERENDVPLVVRPKVRTQATTGARPKTETKSVPAARPKTEAQAMSGARPKTEVQVMGGARPKTEAQGITGARPKTDARAVGGARSKTDAKAIPGARPKDEAQAWAQSEFGTEAVSQAEGVSQTNAVAWPLATAESGSVTKSKGLSMDRELVNVDAETFPGTQGQKGIQPWFGPGEETNMGSWCYSRPRAREEASNESGFWSADETSTASSFWTGEETSVRSWPREESNTRSRHRAKHQTNPRSRPRSKQEAYVDSWSGSEDEASNPFSFWVGENTNNLFRPRVREEANIRSKLRTNREDCFESESEDEFYKQSWVLPGEEANSRFRHRDKEDPNTALKLRAQKDVDSDRVKQEPRFEEEVIIGSWFWAEKEASLEGGASAICESEPGTEEGAIGGSAYWAEEKSSLGAVAREEAKPESEEEAIFGSWFWDRDEACFDLNPCPVYKVSDRFRDAAEELNASSRPQTWDEVTVEFKPGLFHGVGFRSTSPFGIPEEASEMLEAKPKNLELSPEGEEQESLLQPDQPSPEFTFQYDPSYRSVREIREHLRARESAESESWSCSCIQCELKIGSEEFEEFLLLMDKIRDPFIHEISKIAMGMRSASQFTRDFIRDSGVVSLIETLLNYPSSRVRTSFLENMIHMAPPYPNLNMIETFICQVCEETLAHSVDSLEQLTGIRMLRHLTMTIDYHTLIANYMSGFLSLLTTANARTKFHVLKMLLNLSENPAVAKKLFSAKALSIFVGLFNIEETNDNIQIVIKMFQNISNIIKSGKMSLIDDDFSLEPLISAFREFEELAKQLQAQIDNQNDPEVGQQS

SEQ ID NO: 5560 - protein, 882 aa, Homo sapiens
MPGRARTRARGRARRRESYQQEAPGGPRAPGSATTQEPPQLQSTPRPLQEEVPVVRPLQPRAARGGAGGGAQSQGVKEPGPEAGLHTAPLQERRIGGVFQDLVVNTRQDMKHVKDSKTGSEGTVVQLLANHFRVISRPQWVAYKYNVDYKPDIEDGNLRTILLDQHRRKFGERHIFDGNSLLLSRPLKERRVEWLSTTKDKNIVKITVEFSKELTPTSPDCLRYYNILFRRTFKLLDFEQVGRNYYTKKKAIQLYRHGTSLEIWLGYVTSVLQYENSITLCADVSHKLLRIETAYDFIKRTSAQAQTGNIREEVTNKLIGSIVLTKYNNKTYRVDDIDWKQNPEDTFNKSDGSKITYIDYYRQQHKEIVTVKKQPLLVSQGRWKKGLTGTQREPILLIPQLCHMTGLTDEICKDYSIVKELAKHTRLSPRRRHHTLKEFINTLQDNKKVRELLQLWDLKFDTNFLSVPGRVLKNANIVQGRRMVKANSQGDWSREIRELPLLNAMPLHSWLILYSRSSHREAMSLKGHLQSVTAPMGITMKPAEMIEVDGDANSYIDTLRKYTRPTLQMGMSCLLVFKVICILPNDDKRRYDSIKRYLCTKCPIPSQCVVKKTLEKVQARTIVTKIAQQMNCKMGGALWKVETDVQRTMFVGIDCFHDIVNRQKSIAGFVASTNAELTKWYSQCVIQKTGEELVKELEICLKAALDVWCKNESSMPHSVIVYRDGVGDGQLQALLDHEAKKMSTYLKTISPNNFTLAFIVVKKRINTRFFLKHGSNFQNPPPGTVIDVELTRNEWYDFFIVSQSVQDGTVTPTHYNVIYDTIGLSPDTVQRLTYCLCHMYYNLPGIIRVPAPCHYAHKLAYLVGQSIHQEPNRSLSTRLFYL

SEQ ID NO: 5561 - protein, 638 aa, Homo sapiens
MNRQVCKKSFSGRSQGFSGRSAVVSGSSRMSCVARSGGAGGGACGFRSGAGSFGSRSLYNLGSNKSISISVAAGSSRAGGFGGGRSSCGFAGGYGGGFGGSYGGGFGGGRGVGSGFGGAGGFGGAGGFGGPGVFGGPGSFGGPGGFGPGGFPGGIQEVIVNQSLLQPLNVEIDPQIGQVKAQEREQIKTLNNKFASFIDKVRFLEQQNKVLETKWELLQQQTTGSGPSSLEPCFESYISFLCKQLDSLLGERGNLEGELKSMQDLVEDFKKKYEDEINKRTAAENEFVGLKKDVDAAFMNKVELQAKVDSLTDEVSFLRTLYEMELSQMQSHASDTSVVLSMDNNRCLDLGSIIAEVRAQYEEIAQRSKSEAEALYQTKLGELQTTAGRHGDDLRNTKSEIMELNRMIQRLRAEIENVKKQNANLQTAIAEAEQRGEMALKDANAKLQDLQTALQKAKDDLARLLRDYQELMNVKLALDVEIATYRKLLEGEECRMSGECQSAVCISVVSNVTSTSGSSGSSRGVFGGVSGSGSGGYKGGSSSSSSSGYGVSGGSGSGYGGVSSGSTGGRGSSGSYQSSSSGSRLGGAGSISVSHSGMGSSSGSIQTSGGSGYKSGGGGSTSIRFSQTTSSSQHSSTK

SEQ ID NO: 5562 - protein, 359 aa, Homo sapiens
MAEPFLSEYQHQPQTSNCTGAAAVQEELNPERPPGAEERVPEEDSRWQSRAFPQLGGRPGPEGEGSLESQPPPLQTQACPESSCLREGEKGQNGDDSSAGGDFPPPAEVEPTPEAELLAQPCHDSEASKLGAPAAGGEEEWGQQQRQLGKKKHRRRPSKKKRHWKPYYKLTWEEKKKFDEKQSLRASRIRAEMFAKGQPVAPYNTTQFLMDDHDQEEPDLKTGLYSKRAAAKSDDTSDDDFMEEGGEEDGGSDGMGGDGSEFLQRDFSETYERYHTESLQNMSKQELIKEYLELEKCLSRMEDENNRLRLESKRLGGDDARVRELELELDRLRAENLQLLTENELHRQQERAPLSKFGD

SEQ ID NO: 5563 - protein, 962 aa, Homo sapiens
MDEQALLGLNPNADSDFRQRALAYFEQLKISPDAWQVCAEALAQRTYSDDHVKFFCFQVLEHQVKYKYSELTTVQQQLIRETLISWLQAQMLNPQPEKTFIRNKAAQVFALLFVTEYLTKWPKFFFDILSVVDLNPRGVDLYLRILMAIDSELVDRDVVHTSEEARRNTLIKDTMREQCIPNLVESWYQILQNYQFTNSEVTCQCLEVVGAYVSWIDLSLIANDRFINMLLGHMSIEVLREEACDCLFEVVNKGMDPVDKMKLVESLCQVLQSAGFFSIDQEEDVDFLARFSKLVNGMGQSLIVSWSKLIKNGDIKNAQEALQAIETKVALMLQLLIHEDDDISSNIIGFCYDYLHILKQLTVLSDQQKANVEAIMLAVMKKLTYDEEYNFENEGEDEAMFVEYRKQLKLLLDRLAQVSPELLLASVRRVFSSTLQNWQTTRFMEVEVAIRLLYMLAEALPVSHGAHFSGDVSKASALQDMMRTLVTSGVSSYQHTSVTLEFFETVVRYEKFFTVEPQHIPCVLMAFLDHRGLRHSSAKVRSRTAYLFSRFVKSLNKQMNPFIEDILNRIQDLLELSPPENGHQSLLSSDDQLFIYETAGVLIVNSEYPAERKQALMRNLLTPLMEKFKILLEKLMLAQDEERQASLADCLNHAVGFASRTSKAFSNKQTVKQCGCSEVYLDCLQTFLPALSCPLQKDILRSGVRTFLHRMIICLEEEVLPFIPSASEHMLKDCEAKDLQEFIPLINQITAKFKIQVSPFLQQMFMPLLHAIFEVLLRPAEENDQSAALEKQMLRRSYFAFLQTVTGSGMSEVIANQGAENVERVLVTVIQGAVEYPDPIAQKTCFIILSKLVELWGGKDGPVGFADFVYKHIVPACFLAPLKQTFDLADAQTVLALSECAVTLKTIHLKRGPECVQYLQQEYLPSLQVAPEIIQEFCQALQQPDAKVFKNYLKVFFQRAKP

SEQ ID NO: 5564 - protein, 991 aa, Homo sapiens
MAESFFSDFGLLWYLKELRKEEFWKFKELLKQPLEKFELKPIPWAELKKASKEDVAKLLDKHYPGKQAWEVTLNLFLQINRKDLWTKAQEEMRNKLNPYRKHMKETFQLIWEKETCLHVPEHFYKETMKNEYKELNDAYTAAARRHTVVLEGPDGIGKTTLLRKVMLDWAEGNLWKDRFTFVFFLNVCEMNGIAETSLLELLSRDWPESSEKIEDIFSQPERILFIMDGFEQLKFNLQLKADLSDDWRQRQPMPIILSSLLQKKMLPESSLLIALGKLAMQKHYFMLRHPKLIKLLGFSESEKKSYFSYFFGEKSKALKVFNFVRDNGPLFILCHNPFTCWLVCTCVKQRLERGEDLEINSQNTTYLYASFLTTVFKAGSQSFPPKVNRARLKSLCALAAEGIWTYTFVFSHGDLRRNGLSESEGVMWVGMRLLQRRGDCFAFMHLCIQEFCAAMFYLLKRPKDDPNPAIGSITQLVRASVVQPQTLLTQVGIFMFGISTEEIVSMLETSFGFPLSKDLKQEITQCLESLSQCEADREAIAFQELFIGLFETQEKEFVTKVMNFFEEVFIYIGNIEHLVIASFCLKHCQHLTTLRMCVENIFPDDSGCISDYNEKLVYWRELCSMFITNKNFQILDMENTSLDDPSLAILCKALAQPVCKLRKLIFTSVYFGHDSELFKAVLHNPHLKLLSLYGTSLSQSDIRHLCETLKHPMCKIEELILGKCDISSEVCEDIASVLACNSKLKHLSLVENPLRDEGMTLLCEALKHSHCALERLMLMYCCLTSVSCDSISEVLLCSKSLSLLDLGSNALEDNGVASLCAALKHPGCSIRELWLMGCFLTSDSCKDIAAVLICNGKLKTLKLGHNEIGDTGVRQLCAALQHPHCKLECLGLQTCPITRACCDDIAAALIACKTLRSLNLDWIALDADAVVVLCEALSHPDCALQMLGLHKSGFDEETQKILMSVEEKIPHLTISHGPWIDEEYKIRGVLL

SEQ ID NO: 5565 - protein, 177 aa, Homo sapiens
MAAVKASTSKATRPWYSHPVYARYWQHYHQAMAWMQSHHNAYRKAVESCFNLPWYLPSALLPQSSYDNEAAYPQSFYDHHVAWQDYPCSSSHFRRSGQHPRYSSRIQASTKEDQALSKEEEMETESDAEVECDLSNMEITEELRQYFAETERHREERRRQQQLDAERLDSYVNADHD

SEQ ID NO: 5566 - protein, 500 aa, Homo sapiens
MVGRSCGVATQRQGGGQRPTNLALTLSSSPAHSTALPWLPPRSLQLLSGHSVPAQPTPHLPSACGGPTRVTLGEERAWRSHGSNAGGHTCLPRRTAGAGSLTPGGERGGNNAGHTVVVDGKEYDFHLLPSGIINTKAVSFIGNGVVIHLPGLFEEAEKNEKKGLKDWEKRLIISDRAHLVFDFHQAVDGLQEVQRQAQEGKNIGTTKKGIGPTYSSKAARTGLRICDLLSDFDEFSSRFKNLAHQHQSMFPTLEIDIEGQLKRLKGFAERIRPMVRDGVYFMYEALHGPPKKILVEGANAALLDIDFGTYPFVTSSNCTVGGVCTGLGIPPQNIGDVYGVVKAYTTRVGIGAFPTEQINEIGGLLQTRGHEWGVTTGRKRRCGWLDLMILRYAHMVNGFTALALTKLDILDVLGEVKVGVSYKLNGKRIPYFPANQEMLQKVEVEYETLPGWKADTTGARRWEDLPPQAQNYIRFVENHVGVAVKWVGVGKSRESMIQLF

SEQ ID NO: 5567 - protein, 155 aa, Homo sapiens
MVNSCCGSVCSDQGCGQDLCQETCCCPSCCQTTCCRTTCYRPSYSVSCCCRPQCCQSVCCQPTCCRPSCCVPTCCHPSCCISSCCRPSCCVSSCCKPQCCQSVCCQPNCCRPSCCRPCCCLRPVCGRVSCHTTCYRPACVISTCPRPVCCASSCC

SEQ ID NO: 5568 - protein, 707 aa, Homo sapiens
MAAEALAAEAVASRLERQEEDIRWLWSEVERLRDEQLNAPYSCQAEGPCLTREVAQLRAENCDLRHRLCSLRLCLAEERSRQATLESAELEAAQEAGAQPPPSQSQDKDMKKKKMKESEADSEVKHQPIFIKERLKLFEILKKDHQLLLAIYGKKGDTSNIITVRVADGQTVQGEVWKTTPYQVAAEISQELAESTVIAKVNGELWDLDRPLEGDSSLELLTFDNEKVNTATTTVYRCGPLIDLCKGPHVRHTGKIKTIKIFKNSSTYWEGNPEMETLQRIYGISFPDNKMMRDWEKFQEEAKNRDHRKIGKEQELFFFHDLSPGSCFFLPRGAFIYNTLTDFIREEYHKRDFTEVLSPNMYNSKLWEASGHWQHYSENMFTFEIEKDTFALKPMNCPGHCLMFAHRPRSWREMPIRFADFGVLHRNELSGTLSGLTRVRRFQQDDAHIFCTVEQIEEEIKGCLQFLQSVYSTFGFSFQLNLSTRPENFLGEIEMWNEAEKQLQNSLMDFGEPWKMNPGDGAFYGPKIDIKIKDAIGRYHQCATIQLDFQLPIRFNLTYVSKDGDDKKRPVIIHRAILGSVERMIAILSENYGGKWPFWLSPRQVMVIPVGPTCEKYALQVSSEFFEEGFMADVDLDHSCTLNKKIRNAQLAQYNFILVVGEKEKIDNAVNVRTRDNKIHGEILVTSAIDKLKNLRKTRTLNAEEAF

SEQ ID NO: 5569 - protein, 271 aa, Homo sapiens
MAGLEVLFASAAPAITCRQDALVCFLHWEVVTHGYFGLGVGDQPGPNDKKSELLPAGWNNNKDLYVLRYEYKDGSRKLLVKAITVESSMILNVLEYGSQQVADLTLNLDDYIDAEHLGDFHRTYKNSEELRSRIVSGIITPIHEQWEKANVSSPHREFPPATAREVDPLRIPPHHPHTSRQPPWCDPLGPFVVGGEDLDPFGPRRGGMIVDPLRSGFPRALIDPSSGLPNRLPPGAVPPGARFDPFGPIGTSPPGPNPDHLPPPGYDDMYL

SEQ ID NO: 5570 - protein, 157 aa, Homo sapiens
MATPPKRRAVEATGEKVLRYETFISDVLQRDLRKVLDHRDKVYEQLAKYLQLRNVIERLQEAKHSELYMQVDLGCNFFVDTVVPDTSRIYVALGYGFFLELTLAEALKFIDRKSSLLTELSNSLTKDSMNIKAHIHMLLEGLRELQGLQNFPEKPHH

SEQ ID NO: 5571 - protein, 180 aa, Homo sapiens
MQAEGRGTGGSTGDADGPGGPGIPDGPGGNAGGPGEAGATGGRGPRGAGAARASGPGGGAPRGPHGGAASGLNGCCRCGARGPESRLLEFYLAMPFATPMEAELARRSLAQDAPPLPVPGVLLKEFTVSGNILTIRLTAADHRQLQLSISSCLQQLSLLMWITQCFLPVFLAQPPSGQRR

SEQ ID NO: 5572 - protein, 206 aa, Homo sapiens [sequence omitted]

SEQ ID NO: 5573 - protein, 2332 aa, Homo sapiens
MAEPSSARRPVPLIESELYFLIARYLSAGPCRRAAQVLVQELEQYQLLPKRLDWEGNEHNRSYEELVLSNKHVAPDHLLQICQRIGPMLDKEIPPSISRVTSLLGAGRQSLLRTAKDCRHTVWKGSAFAALHRGRPPEMPVNYGSPPNLVEIHRGKQLTGCSTFSTAFPGTMYQHIKMHRRILGHLSAVYCVAFDRTGHRIFTGSDDCLVKIWSTHNGRLLSTLRGHSAEISDMAVNYENTMIAAGSCDKIIRVWCLRTCAPVAVLQGHTGSITSLQFSPMAKGSQRYMVSTGADGTVCFWQWDLESLKFSPRPLKFTEKPRPGVQMLCSSFSVGGMFLATGSTDHVIRMYFLGFEAPEKIAELESHTDKVDSIQFCNNGDRFLSGSRDGTARIWRFEQLEWRSILLDMATRISGDLSSEEERFMKPKVTMIAWNQNDSIVVTAVNDHVLKVWNSYTGQLLHNLMGHADEVFVLETHPFDSRIMLSAGHDGSIFIWDITKGTKMKHYFNMIEGQGHGAVFDCKFSQDGQHFACTDSHGHLLIFGFGCSKPYEKIPDQMFFHTDYRPLIRDSNNYVLDEQTQQAPHLMPPPFLVDVDGNPHPTKYQRLVPGRENSADEHLIPQLGYVATSDGEVIEQIISLQTNDNDERSPESSILDGMIRQLQQQQDQRMGADQDTIPRGLSNGEETPRRGFRRLSLDIQSPPNIGLRRSGQVEGVRQMHQNAPRSQIATERDLQAWKRRVVVPEVPLGIFRKLEDFRLEKGEEERNLYIIGRKRKTLQLSHKSDSVVLVSQSRQRTCRRKYPNYGRRNRSWRELSSGNESSSSVRHETSCDQSEGSGSSEEDEWRSDRKSESYSESSSDSSSRYSDWTADAGINLQPPLRTSCRRRITRFCSSSEDEISTENLSPPKRRRKRKKENKPKKENLRRMTPAELANMEHLYEFHPPVWITDTTLRKSPFVPQMGDEVIYFRQGHEAYIEAVRRNNIYELNPNKEPWRKMDLRDQELVKIVGIRYEVGPPTLCCLKLAFIDPATGKLMDKSFSIRYHDMPDVIDFLVLRQFYDEARQRNWQSCDRFRSIIDDAWWFGTVLSQEPYQPQYPDSHFQCYIVRWDNTEIEKLSPWDMEPIPDNVDPPEELGASISVTTDELEKLLYKPQAGEWGQKSRDEECDRIISGIDQLLNLDIAAAFAGPVDLCTYPKYCTVVAYPTDLYTIRMRLVNRFYRRLSALVWEVRYIEHNARTFNEPESVIARSAKKITDQLLKFIKNQHCTNISELSNTSENDEQNAEDLDDSDLPKTSSGRRRVHDGKKSIRATNYVESNWKKQCKELVNLIFQCEDSEPFRQPVDLVEYPDYRDIIDTPMDFGTVRETLDAGNYDSPLEFCKDIRLIFSNAKAYTPNKRSKIYSMTLRLSALFEEKMKKISSDFKIGQKFNEKLRRSQRFKQRQNCKGDSQPNKSIRNLKPKRLKSQTKIIPELVGSPTQSTSSRTAYLGTHKTSAGISSGVTSGDSSDSAESSERARGSRNRPITNGSTLSESEVEDSLATSLSSSASSSSEESKESSRARESSSRSGLSRSSNLRVTRTRAAQRKTGPVSLANGCGARGSATRKRVYLSDSDNNSLETGEILKARAGNNRKVLARGSCAAVAANKIKLMSDVEENSSSESVCSGRKLPHRNASAVARKKLLHNSEDEQSLKSEIEEEELKDENQLLPVSSSHTAQSNVDESENRDSESESDLRVAARGSNWHANGYKSHTPAPSKTKFLKIESSEEDSKSHDSDHACNRTAGPSTSVQKLKAESISEEADSEPGRSGGRKYNTFHKNASFFKKTKILSDSEDSESEEQDREDGKCHKMEMNPISGNLNCDPIAMSQCSSDHGCETDLDSDDDKIEKPNNFMKDSASQDNGLSARGSISRKRVCSSDSDSSLQVVKKSSKARTGLLRITRRCAATAANKIKLMSDVEDVSLENVHTRSKNGRKKPLHLACTTAKKKLSDCEGSVHCEVPSEQYACEGKPPDPDSEGSTKVLSQALNGDSDSEDMLNSEHKHRHTNIHKIDAPSKRKSSSVTSSGEDSKSHIPGSETDRTFSSESTLAQKATAENNFEVELNYGLRRWNGRRLRTYGKAPFSKTKVIHDSQETAEKEVKRKRSHPELENVKISETTGNSKFRPDTSSKSSDLGSVTESDIDCTDNTKTKRRKTKGKAKVVRKEFVPRDREPNTKVRTCMHNQKDAVQMPSETLKAKMVPEKVPRRCATVAANKIKIMSNLKETISGPENVWIRKSSARGSLPHRNASAAAKKKLLNVYKEDDTTINSESEKELEDINRKMLFLRGFRSWKENAQ

SEQ ID NO: 5574 - protein, 986 aa, Homo sapiens
MAESFFSDFGLLWYLKELRKEEFWKFKELLKQPLEKFELKPIPWAELKKASKEDVAKLLDKHYPGKQAWEVTLNLFLQINRKDLWTKAQEEMRNKLNPYRKHMKETFQLIWEKETCLHVPEHFYKETMKNEYKELNDAYTAAARRHTVVLEGPDGIGKTTLLRKVMLDWAEGNLWKDRFTFVFFLNVCEMNGIAETSLLELLSRDWPESSEKIEDIFSQPERILFIMDGFEQLKFNLQLKADLSDDWRQRQPMPIILSSLLQKKMLPESSLLIALGKLAMQKHYFMLRHPKLIKLLGFSESEKKSYFSYFFGEKSKALKVFNFVRDNGPLFILCHNPFTCWLVCTCVKQRLERGEDLEINSQNTTYLYASFLTTVFKAGSQSFPPKVNRARLKSLCALAAEGIWTYTFVFSHGDLRRNGLSESEGVMWVGMRLLQRRGDCFAFMHLCIQEFCAAMFYLLKRPKDDPNPAIGSITQLVRASVVQPQTLLTQVGIFMFGISTEEIVSMLETSFGFPLSKDLKQEITQCLESLSQCEADREAIAFQELFIGLFETQEKEFVTKVMNFFEEVFIYIGNIEHLVIASFCLKHCQHLTTLRMCVENIFPDDSGCISDYNEKLVYWRELCSMFITNKNFQILDMENTSLDDPSLAILCKALAQPVCKLRKLIFTSVYFGHDSELFKAVLHNPHLKLLSLYGTSLSQSDIRHLCETLKHPMCKIEELILGKCDISSEVCEDIASVLACNSKLKHLSLVENPLRDEGMTLLCEALKHSHCALERLMLMYCCLTSVSCDSISEVLLCSKSLSLLDLGSNALEDNGVASLCAALKHPGCSIRELWLMGCFLTSDSCKDIAAVLICNGKLKTLKLGHNEIGDTGVRQLCAALQHPHCKLECLGLQTCPITRACCDDIAAALIACKTLRSLNLDWIALDADAVVVLCEALSHPDCALQMLGNCQKSLGDTVAPGENHCSIKHLLLTLPINMQRQLRLQK

SEQ ID NO: 5575 - protein, 1012 aa, Homo sapiens
MDALDASKLLDEELYSRQLYVLGSPAMQRIQGARVLVSGLQGLGAEVAKNLVLMGVGSLTLHDPHPTCWSDLAAQFLLSEQDLERSRAEASQELLAQLNRAVQVVVHTGDITEDLLLDFQVVVLTAAKLEEQLKVGTLCHKHGVCFLAADTRGLVGQLFCDFGEDFTVQDPTEAEPLTAAIQHISQGSPGILTLRKGANTHYFRDGDLVTFSGIEGMVELNDCDPRSIHVREDGSLEIGDTTTFSRYLRGGAITEVKRPKTVRHKSLDTALLQPHVVAQSSQEVHHAHCLHQAFCALHKFQHLHGRPPQPWDPVDAETVVGLARDLEPLKRTEEEPLEEPLDEALVRTVALSSAGVLSPMVAMLGAVAAQEVLKAISRKFMPLDQWLYFDALDCLPEDGELLPSPEDCALRGSRYDGQIAVFGAGFQEKLRRQHYLLVGAGAIGCELLKVFALVGLGAGNSGGLTVVDMDHIERSNLSRQFLFRSQDVGRPKAEVAAAAARGLNPDLQVIPLTYPLDPTTEHIYGDNFFSRVDGVAAALDSFQARRYVAARCTHYLKPLLEAGTSGTWGSATVFMPHVTEAYRAPASAAASEDAPYPVCTVRYFPSTAEHTLQWARHEFEELFRLSAETINHHQQAHTSLADMDEPQTLTLLKPVLGVLRVRPQNWQDCVAWALGHWKLCFHYGIKQLLRHFPPNKVLEDGTPFWSGPKQCPQPLEFDTNQDTHLLYVLAAANLYAQMHGLPGSQDWTALRELLKLLPQPDPQQMAPIFASNLELASASAEFGPEQQKELNKALEVWSVGPPLKPLMFEKDDDSNFHVDFVVAAASLRCQNYGIPPVNRAQSKRIVGQIIPAIATTTAAVAGLLGLELYKVVSGPRPRSAFRHSYLHLAENYLIRYMPFAPAIQTFHHLKWTSWDRLKVPAGQPERTLESLLAHLQEQHGLRVRILLHGSALLYAAGWSPEKQAQHLPLRVTELVQQLTGQAPAPGQRVLVLELSCEGDDEDTAFPPLHYEL

SEQ ID NO: 5576 - protein, 119 aa, Homo sapiens
MVRTKTWTLKKHFVGYPTNSDFELKTAELPPLKNGEVLLEALFLTVDPYMRVVESKNVALPKGTIVLASPGWTTHSISDGKDLEKLLTEWPDTIPLSLALGTVGMPGLTAYFGLLEICG

SEQ ID NO: 5577 - protein, 598 aa, Homo sapiens
MGGCFSKPKPVELKIEVVLPEKERGKEELSASGKGSPRAYQGNGTARHFHTEERLSTPHPYPSPQDCVEAAVCHVKDLENGQMREVELGWGKVLLVKDNGEFHALGHKCPHYGAPLVKGVLSRGRVRCPWHGACFNISTGDLEDFPGLDSLHKFQVKIEKEKVYVRASKQALQLQRRTKVMAKCISPSAGYSSSTNVLIVGAGAAGLVCAETLRQEGFSDRIVLCTLDRHLPYDRPKLSKSLDTQPEQLALRPKEFFRAYGIEVLTEAQVVTVDVRTKKVVFKDGFKLEYSKLLLAPGSSPKTLSCKGKEVENVFTIRTPEDANRVVRLARGRNVVVVGAGFLGMEVAAYLTEKAHSVSVVELEETPFRRFLGERVGRALMKMFENNRVKFYMQTEVSELRGQEGKLKEVVLKSSKVVRADVCVVGIGAVPATGFLRQSGIGLDSRGFIPVNKMMQTNVPGVFAAGDAVTFPLAWRNNRKVNIPHWQMAHAQGRVAAQNMLAQEAEMSTVPYLWTAMFGKSLRYAGYGEGFDDVIIQGDLEELKFVAFYTKGDEVIAVASMNYDPIVSKVAEVLASGRAIRKREVETGDMSWLTGKGS

SEQ ID NO: 5578 - protein, 616 aa, Homo sapiens
MGSYLSVPAYFTSRDLFRCSECQDSLTNWYYEKDGKLYCPKDYWGKFGEFCHGCSLLMTGPFMVAGEFKYHPECFACMSCKVIIEDGDAYALVQHATLYCGKCHNEVVLAPMFERLSTESVQEQLPYSVTLISMPATTEGRRGFSVSVESACSNYATTVQVKEVNRMHISPNNRNAIHPGDRILEINGTPVRTLRVEEVEDAISQTSQTLQLLIEHDPVSQRLDQLRLEARLAPHMQNAGHPHALSTLDTKENLEGTLRRRSLRRSNSISKSPGPSSPKEPLLFSRDISRSESLRCSSSYSQQIFRPCDLIHGEVLGKGFFGQAIKVTHKATGKVMVMKELIRCDEETQKTFLTEVKVMRSLDHPNVLKFIGVLYKDKKLNLLTEYIEGGTLKDFLRSMDPFPWQQKVRFAKGIASGMAYLHSMCIIHRDLNSHNCLIKLDKTVVVADFGLSRLIVEERKRAPMEKATTKKRTLRKNDRKKRYTVVGNPYWMAPEMLNGKSYDETVDIFSFGIVLCEIIGQVYADPDCLAALDFGLNVKLFWEKFVPTDCPPAFFPLAAICCRLEPESRPAFSKLEDSFEALSLYLGELGIPLPAELEELDHTVSMQYGLTRDSPP

SEQ ID NO: 5579 - protein, 445 aa, Homo sapiens
MREIVHIQAGQCGNQIGAKFWEVISDEHGIDPTGSYHGDSDLQLERINVYYNEAAGNKYVPRAILVDLEPGTMDSVRSGPFGQIFRPDNFVFGQSGAGNNWAKGHYTEGAELVDSVLDVVRKESESCDCLQGFQLTHSLGGGTGSGMGTLLISKIREEYPDRIMNTFSVMPSPKVSDTVVEPYNATLSVHQLVENTDETYSIDNEALYDICFRTLKLTTPTYGDLNHLVSATMSGVTTCLRFPGQLNADLRKLAVNMVPFPRLHFFMPGFAPLTSRGSQQYRALTVPELTQQMFDSKNMMAACDPRHGRYLTVAAIFRGRMSMKEVDEQMLNVQNKNSSYFVEWIPNNVKTAVCDIPPRGLKMSATFIGNSTAIQELFKRISEQFTAMFRRKAFLHWYTGEGMDEMEFTEAESNMNDLVSEYQQYQDATADEQGEFEEEEGEDEA

SEQ ID NO: 5580 - protein, 674 aa, Homo sapiens
MAKHGADEPSSRSGSPDREGRASEDRSLLHQRLAVRELIDTEVSYLHMLQLCASDIRSRLQQLPQGDLDVLFSNIDDIIKVNSRFLHDLQETASKEEEQVQLVGNIFLEFQEELEQVYKVYCASYDQALLLVDTYRKEPELQRHIQGIVEAVVPQAGSSGLSFLLVIPLQRITRYPLLLQKILENTVPDASAYPVLQRAVSALQDVNTNINEYKMRKEVASKYTKVEQLTLRERLARINTHTLSKKTTRLSQLLKQEAGLIAAEDKEFDDLEERFQWVSLCVTELKNNVAAYLDNLQAFLYFRPHEYNLDIPEGPAVQYCNLARDLHLEAFLKFKQRLEGLVWQPLCSLAKALLGPQNLIKKRLDKLLDFERVEEKLLEVGSVTYQEEAARHTYQALNSLLVAELPQFNQLVMQWLGQIMCTFVTLQRDLAKQVLQRAEGSMAQLPHHHVPEPAFRKLVEDALGRTSNQLRSFQETFEKVQPPPTTQPLLPGSERQVQALLSRYGPGKLYQVTSNISGTGTLDLTLPRGQIVAILQNKDTKGNSGRWLVDTGGHRGYVPAGKLQLYHVVPSAEELRRQAGLNKDPRCLTPEPSPALVPSIPTMNQVIAAYPFVARSSHEVSLQAGQPVTILEAQDKKGNPEWSLVEVNGQRGYVPSGFLARARSPVLWGWSLPS

SEQ ID NO: 5581 - protein, 1134 aa, Homo sapiens
MASDGASALPGPDMSMKPSAAPSPSPALPFLPPTSDPPDHPPREPPPQPIMPSVFSPDNPLMLSAFPSSLLVTGDGGPCLSGAGAGKVIVKVKTEGGSAEPSQTQNFILTQTALNSTAPGTPCGGLEGPAPPFVTASNVKTILPSKAVGVSQEGPPGLPPQPPPPVAQLVPIVPLEKAWPGPHGTTGEGGPVATLSKPSLGDRSKISKDVYENFRQWQRYKALARRHLSQSPDTEALSCFLIPVLRSLARLKPTMTLEEGLPLAVQEWEHTSNFDRMIFYEMAERFMEFEAEEMQIQNTQLMNGSQGLSPATPLKLDPLGPLASEVCQQPVYIPKKAASKTRAPRRRQRKAQRPPAPEAPKEIPPEAVKEYVDIMEWLVGTHLATGESDGKQEEEGQQQEEEGMYPDPGLLSYINELCSQKVFVSKVEAVIHPQFLADLLSPEKQRDPLALIEELEQEEGLTLAQLVQKRLMALEEEEDAEAPPSFSGAQLDSSPSGSVEDEDGDGRLRPSPGLQGAGGAACLGKVSSSGKRAREVHGGQEQALDSPRGMHRDGNTLPSPSSWDLQPELAAPQGTPGPLGVERRGSGKVINQVSLHQDGHLGGAGPPGHCLVADRTSEALPLCWQGGFQPESTPSLDAGLAELAPLQGQGLEKQVLGLQKGQQTGGRGVLPQGKEPLAVPWEGSSGAMWGDDRGTPMAQSYDQNPSPRAAGERDDVCLSPGVWLSSEMDAVGLELPVQIEEVIESFQVEKCVTEYQEGCQGLGSRGNISLGPGETLVPGDTESSVIPCGGTVAAAALEKRNYCSLPGPLRANSPPLRSKENQEQSCETVGHPSDLWAEGCFPLLESGDSTLGSSKETLPPTCQGNLLIMGTEDASSLPEASQEAGSRGNSFSPLLETIEPVNILDVKDDCGLQLRVSEDTCPLNVHSYDPQGEGRVDPDLSKPKNLAPLQESQESYTTGTPKATSSHQGLGSTLPRRGTRNAIVPRETSVSKTHRSADRAKGKEKKKKEAEEEDEELSNFAYLLASKLSLSPREHPLSPHHASGGQGSQRASHLLPAGAKGPSKLPYPVAKSGKRALAGGPAPTEKTPHSGAQLGVPREKPLALGVVRPSQPRKRRCDSFVTGRARGSKRRRSQ

SEQ ID NO: 5582 - protein, 173 aa, Homo sapiens
MAVAVGVRAAPVLGLARALVLGLRGSQAARWRGWGTAAPGSLWALCECPAGCRELWFRGRAAWAARSERLLHPAQDSDGEREDSAAERARQQLEALLNKTMRIRMTDGRTLVGCFLCTDRDCNVILGSAQEFLKPSDSFSAGEPRVLGLAMVPGHHIVSIEVQRESLTGPPYL

SEQ ID NO: 5583 - protein, 185 aa, Homo sapiens
MVNSCCGSVCSDQGCGQDLCQETCCCPSCCQTTCCRTTCYRPSYSVSCCCRPQCCQSVCCQPTCCRPSCCVSSCCKPQCCQSVCCQPTCCHPSCCISSCCRPSCCVSSCCKPQCCQSVCCQPNCCRPSCSISSCCRPSCCESSCCRPCCCLRPVCGRVSCHTTCYRPACVISTCPRPVCCASSCC

SEQ ID NO: 5584 - protein, 83 aa, Homo sapiens
MCCNYYRNCCGGCGYGSGWSSGCGYGCGYGCGYGSGCRYGSGYGTGCGYGCGYGSGCGYGCGYSSSCCGYRPLCYRRCYSSCY

SEQ ID NO: 5585 - protein, 330 aa, Homo sapiens
MGSRKKEIALQVNISTQELWEEMLSSKGLTVVDVYQGWCGPCKPVVSLFQKMRIEVGLDLLHFALAEADRLDVLEKYRGKCEPTFLFYAGGELVAVVRGANAPLLQKTILDQLEAEKKVLAEGRERKVIKDEALSDEDECVSHGKNNGEDEDMVSSERTCTLAIIKPDAVAHGKTDEIIMKIQEAGFEILTNEERTMTEAEVRLFYQHKAGEEAFEKLVHHMCSGPSHLLILTRTEGFEDVVTTWRTVMGPRDPNVARREQPESLRAQYGTEMPFNAVHGSRDREDADRELALLFPSLKFSDKDTEAPQGGEAEATAGPTEALCFPEDVD

SEQ ID NO: 5586 - protein, 201 aa, Homo sapiens
MVSSCCGSVCSDQGCGQDLCQETCCRPSCCETTCCRTTCCRPSCCVSSCCRPQCCQSVCCQPTCSRPSCCQTTCCRTTCYRPSCCVSSCCRPQCCQPACCQPTCCRPPRCCISSCCRPSCCVSSCCKPQCCQSVCCQPNCCRPSCSISSCCRPSCCESSCCRPCCCVRPVCGRVSCHTTCYRPTCVISSCPRPLCCASSCC

SEQ ID NO: 5587 - protein, 263 aa, Homo sapiens
MGDIPAVGLSSWKASPGKVTEAVKEAIDAGYRHFDCAYFYHNEREVGAGIRCKIKEGAVRREDLFIATKLWCTCHKKSLVETACRKSLKALKLNYLDLYLIHWPMGFKPPHPEWIMSCSELSFCLSHPRVQDLPLDESNMVIPSDTDFLDTWEAMEDLVITGLVKNIGVSNFNHEQLERLLNKPGLRFKPLTNQILIRFQIQRNVIVIPGSITPSHIKENIQVFDFELTQHDMDNILSLNRNLRLAMFPITKNHKDYPFHIEY

SEQ ID NO: 5588 - protein, 58 aa, Homo sapiens
MRYYGSYYRGLGYGCGGFGGLGYGCGCGGYRYGSGYGGYRYGCCRPSCREGYGFSGFY

SEQ ID NO: 5589 - protein, 52 aa, Homo sapiens
MCYGYGCGCGSFCRLGYGCGYEGCRYGCGHRGCGDGCCCPSCYRRYRFTGFY

SEQ ID NO: 5590 - protein, 84 aa, Homo sapiens
MSYYGSYYRGLGYGCGGFGGLGYGYGCGCGSFRRLGYGCGFGGNGYGYCRPSCYGGYGFSILLKSYPEDTISEVIRRSFNLTKY

SEQ ID NO: 5591 - protein, 81 aa, Homo sapiens
MSYYGSYYGGLGYGCGGFGGLGYGYGCGCGSFRRLGSGCGYGGYGYGSGFGGYGYGSGFGGYGYGCYRPSYYGGYGFSGFY

SEQ ID NO: 5592 - protein, 137 aa, Homo sapiens
MSYNCSSGNFSSCCFGSYLRYPVSTYNLFYPSNAIYSPNTCQLGSSLYNGCQETYCEPTSCQTSCTLARSYQTSCYCPKNSIFCSPRQTNYIRSLGCGNTGLGSLGCGSTGFQSLDCGSSFYHPTTFSSRNFQATCY

SEQ ID NO: 5593 - protein, 159 aa, Homo sapiens
MSYNCCSRNFSSRSFGGYLYYPGSYPSSLVYSTALCSPSTCQLRSSLYRDCQKTCWEPASCQKSCYRAASILCCPCQTTCSGSLGFRSSSCRSQGYGSRCCYSLGNGSSGFRFLKYGGCGFPSLSYGSRFCYPNYLASGAWQSSCYRPICGSRFYQFTC

SEQ ID NO: 5594 - protein, 227 aa, Homo sapiens
MLNPDGVYLGNYRCSLMGFDLNRHWLDPSPWVHPTLHGVKQLIVQMYNDPKTSLEFYIDIHAHSTMMNGFMYGNIFEDEERFQRQAIFPKLLCQNAEDFSYSSTSFNRDAVKAGTGRRFLGGLLDHTSYCYTLEVSFYSYIISGTTAAVPYTEEAYMKLGRNVARTFLDYYRLNPVVEKVAIPMPRLRKEKSPPYKHPLLRGPASNYPNSKGDKKSSVNHKDPSTPF

SEQ ID NO: 5595 - protein, 154 aa, Homo sapiens
MTHCCSPCCQPTCCRTTCCRTTCWKPTTVTTCSSTPCCQPSCCVSSCCQPCCRPTCCQNTCCQPTCVTSCCQPSCCSTPCCQPTCCGSSCDQSSSCAPVYCRRTCYYPTTVCLPGCLNQSCGSNCCQPCCRPACCETTCFQPTCVSSCCQPFCC

SEQ ID NO: 5596 - protein, 2351 aa, Homo sapiens
MKQRKGQGSGGSRGRKKRGLSDISPSTSLPPLVEGQLRCFLKLTVNRVIWKIAKPPTCVLVRVRWWGETSDGTLFCPRDALQTEPKAVRTTTRYAIRCGPKQFTSYLTDMAVLVLEVITKLDGLPIGRVQINGLAQLSPTHQINGFFTIVSSTSKKLGELQVSLALEPLSETYDSYHPLPTTDMTENVLLSKQGFRENTEPSSTQFQVPSRPRDIHTIKIDGKELAANSSRSTTPRGKDHVCFAENPDTIKDSSFGLQHSLNSGQSLESVTLKGRAPRKQMSLLNSSEFQPQIRTVAKSHSDSCILSSNNLPTKDLLSALLEQGNKLRNAMVISAMKSSPETSMLLDQVHPPINEDSLRASTQIRAFSRNRFKDHIEDHLLPSTENTFWRHDTKADTRAIQLLLGSAELSQGNFWDGLGSPPDSPSPGSDVYCISELNDPQYDQSLLENLFYTAPKSDTSISDFLSEEDDIVPSKKISQSTALARSSKVLESSDHKLKKRSAGKRNRNLVEQQMLSETPEDAQTMTLSVDRLALLGRTHSVRIIIETMGVPPDSPQMTPGKKSYAGPPPKVTTAKKRTFFVEYHFPVGFSESGLGKTALITEVVRLASSKITDGKVKFQQRFVFPVQFGGPMIEHWWNSNLTFQIYVKKTPQKKPEVIGSVSLSLRAVIQSELLSFSDQLPVQQENGQSPFGPLKVTMELITDNKDFTGINTKLSGNTHYTPLCAPTSPNKALPELNQDMTCTKNPQNLNQIHEETAKKAQNLVLPNRKSPSPVAPHPSTFVATPASHNLVNQTNGTTKESALLLHVLLMVPDGKDFISGESEKQSPCNVYLNCKLFSTEEVTRSVIAWGTTQPVFNFSQVIPVSLSSKYLERLKNNVMVIETWNKVRSPGQDKLLGLVKLPLHQFYMSFKDAKISRLLLDAQYPVVAVDSYMPVIDVFSGHQNGSLRVFLAMGSSNQIMALQRLKNEEGTLPPFSPRPAHFLDQPTAASVAMAEDRGNGLMEHCFEIHIEMVKGLAPLQATVWGEADCYVQYYFPVQHSQSSVLKGPEFLENGITLKPFRTATTLCVPDPIFNSEHHHSLLLPAEVPVQRLLLSAFSAQGLVPGGGVQFEIWCRYYYPNVRDQKVAKGTLPLSRICAMVTTQHREDVGIQTFNLPLTPRIENRKELRNQSSGLLDVGLRYRRSAAAEGVLAARTVSISVQIIRACGLQAAAKALAEREPALQFSATVGVNASVTTHLSFLPQGEQRRTHPVACSFCPEFSHHVEFTCNLVTQHCSGEACFLAELLEFAEVIFAVYHENTKSASDIISIESCKEYLLGVVKVPTKELLIKRSGITGWYPIILPEDGGLPHGLELMQKIVGGLELSISFTHRGDRERVLEAAEHLGWSFENSLKDFVRMDEGEPATVTISTPRLWLPIHCVLLAGHNHIHKNTYCYLRYKFYDHEAFWTPLKKPKESVNKKQIMVTFKASKRAEVTRGPSLLWYFREERLEIQVWRAYGNDSVERPHQTDSWIGSAYVDLARLGERSARTLTVSGVYPLFGRNASNLSGAALRVHVVLSSLSSHLEPTHELDSMDCSSHSESEQLPRRNDEVQLSPPEVISCHQKSPASTQVPCSSTTAEVRLTQEGPADLDGTFAVSILVERAMHLSLKGSPLTERKVSIPSCCVSFATADESSPVYTQVVENTDSPIWNFQQQSRLSKELLLDPQQTLVFKVWHKGDEERVIGFASVDLSPLLSGFQFVCGWYNITDFSGECQGQIKVAVSPLESLIHFKEERQARRGVETSKSLIPIYSPFSFPASDTYAAFSSHMARQTLDQLAHASSKELDFSSPGRSDTTRSQASRHEEHVQNIRRFHESLHLQGEAPLPCDDKLTTSPLSSQTSILTSLRKNLSELDQIQRYFRQKLTKPFLPLSPQTQTAISQHQESCRDHLGPGASSLDPGSQCILEKSSNLVLQVSSLITDLQTITRDSQAALSSHRARSRSNKATTLPDAQDTEALQERCTMPDEPLVRAPDKGTDSPSPPPLEETSNGGRMLHESLRHAVPITRMQSSEDTEAGPAYSDEDYEEDIIEAALNEITTVTDKTSPWSSVISDTSEVISPQPDEVQREGPSCPSPGPFCREELMVKSSFLSSPERAVNPHLPRQGSPSQSLVACECEASKARVGGESASANPQPIPCPTLSGAQQSSTFVGWSSPQTDQNKEPKSEAPAENEAATSELGDSADSFKKLPLNLASQSRRENHKGPPIDSSDIRQRQVTTGSETSTKQSLLLPGPIVVPNFFLPPQQLEASLRMLSLSATLPPAATTDQDKSEATRGALSQRPCRPRPNSLPLNLPEEETLRIARIFSSQYSQKD

SEQ ID NO: 5597 - protein, 72 aa, Homo sapiens
MNYYGNYYGGLGYGYGGFDDLGYGYGCGCGSFRRLGYGGGYGGYGYGSGFGGYGYRSCRPSCYGGYGFSGFY

SEQ ID NO: 5598 - protein, 65 aa, Homo sapiens
MSYNCCCGNFSSHSCEGYLCYSGYSRGGSSYPSNLVYSTEPLISQHLPAGFLSLQGLSGDLLGNP

SEQ ID NO: 5599 - protein, 127 aa, Homo sapiens
MVNSCCGSVCSDQGCDQGLCQETCCRPSCCQTTCCCPSCVVSSCCRPSCSQTTCCQTTCCRPSCCHPVCCQTTCRPSCGVSSCCRPLCCQTTCRPSCGVSSCCRPLCCQTTCCRATCCRPSCCGSSC

SEQ ID NO: 5600 - protein, 105 aa, Homo sapiens
MGCCPGDCFTCCTQEQNCCEECCCQPGCCGCCGSCCGCGGSGCGGSGCGGSCCGSSCCGSGCGGCGGCGGCGGGCCGSSCCGSSCCGSGCCGPVCCQPTPICDTK

SEQ ID NO: 5601 - protein, 1304 aa, Homo sapiens
MEEIPVKVAVRIRPLLCKEALHNHQVCVRVIPNSQQVIIGRDRVFTFDFVFGKNSTQDEVYNTCIKPLVLSLIEGYNATVFAYGQTGSGKTYTIGGGHIASVVEGQKGIIPRAIQEIFQSISEHPSIDFNVKVSYIEVYKEDLRDLLELETSMKDLHIREDEKGNTVIVGAKECHVESAGEVMSLLEMGNAARHTGTTQMNEHSSRSHAIFTISICQVHKNMEAAEDGSWYSPRHIVSKFHFVDLAGSERVTKTGNTGERFKESIQINSGLLALGNVISALGDPRRKSSHIPYRDAKITRLLKDSLGGSAKTVMITCVSPSSSNFDESLNSLKYANRARNIRNKPTVNFSPESDRIDEMEFEIKLLREALQSQQAGVSQTTQINREGSPDTNRIHSLEEQVAQLQGECLGYQCCVEEAFTFLVDLKDTVRLNEKQQHKLQEWFNMIQEVRKAVLTSFRGIGGTASLEEGPQHVTVLQLKRELKKCQCVLAADEVVFNQKELEVKELKNQVQMMVQENKGHAVSLKEAQKVNRLQNEKIIEQQLLVDQLSEELTKLNLSVTSSAKENCGDGPDARIPERRPYTVPFDTHLGHYIYIPSRQDSRKVHTSPPMYSLDRIFAGFRTRSQMLLGHIEEQDKVLHCQFSDNSDDEESEGQEKSGTRCRSRSWIQKPDSVCSLVELSDTQDETQKSDLENEDLKIDCLQESQELNLQKLKNSERILTEAKQKMRELTINIKMKEDLIKELIKTGNDAKSVSKQYSLKVTKLEHDAEQAKVELIETQKQLQELENKDLSDVAMKVKLQKEFRKKMDAAKLRVQVLQKKQQDSKKLASLSIQNEKRANELEQSVDHMKYQKIQLQRKLREENEKRKQLDAVIKRDQQKIKALNTDSLKISTRLNLLEQELSEKNVQLQTSTAEEKTKISEQVEVLQKEKDQLQKRRHNVDEKLKNGRVLSPEEEHVLFQLEEGIEALEAAIEYRNESIQNRQKSLRASFHNLSRGEANVLEKLACLSPVEIRTILFRYFNKVVNLREAERKQQLYNEEMKMKVLERDNMVRELESALDHLKLQCDRRLTLQQKEHEQKMQLLLHHFKEQDGEGIMETFKTYEDKIQQLEKDLYFYKKTSRDHKKKLKELVGEAIRRQLAPSEYQEAGDGVLKPEGGGMLSEELKWASRPESMKLSGREREMDSSASSLRTQPNPQKLWEDIPELPPIHSSLAPPSGHMLGNENKTETDDNQFTKSHSRLSSQIQVVGNVGRLHGVTPVKLCRKELRQISALELSLRRSSLGVGIGSMAADSIEVSRKPRDLKT

SEQ ID NO: 5602 - protein, 300 aa, Homo sapiens
MEEEASSPGLGCSKPHLEKLTLGITRILESSPGVTEVTIIEKPPAERHMISSWEQKNNCVMPEDVKNFYLMTNGFHMTWSVKLDEHIIPLGSMAINSISKLTQLTQSSMYSLPNAPTLADLEDDTHEASDDQPEKPHFDSRSVIFELDSCNGSGKVCLVYKSGKPALAEDTEIWFLDRALYWHFLTDTFTAYYRLLITHLGLPQWQYAFTSYGISPQAKQWFSMYKPITYNTNLLTEETDSFVNKLDPSKVFKSKNKIVIPKKKGPVQPAGGQKGPSGPSGPSTSSTSKSSSGSGNPTRK

SEQ ID NO: 5603 - protein, 129 aa, Homo sapiens
MMTDLKQSHSVRLNDGPFMPVLGFGTYAPDHTPKSQAAEATKVAIDVGFRHIDSAYLYQNEEEVGQAIWEKIADGTVKREEIFYTIKLWATFFRAELVHPALERSLKKLGPDYVDLFIIHVPFAMKGSS

SEQ ID NO: 5604 - protein, 418 aa, Homo sapiens
MHPEPSEPATGGAAELDCAQEPGVEESAGDHGSAGRGGCKEEINDPKEICVGSSDTSYHSQQKQSGDNGSGGHFAHPREDREDRGPRMTKSSLQKLCKQHKLYITPALNDTLYLHFKGFDRIENLEEYTGLRCLWLQSNGIQKIENLEAQTELRCLFLQMNLLRKIENLEPLQKLDALNLSNNYIKTIENLSCLPVLNTLQMAHNHLETVEDIQHLQECLRLCVLDLSHNKLSDPEILSILESMPDLRVLNLMGNPVIRQIPNYRRTVTVRLKHLTYLDDRPVFPKDRACAEAWARGGYAAEKEERQQWESRERKKITDSIEALAMIKQRAEERKRQRESQERGEMTSSDDGENVPASAEGKEEPPGDRETRQKMELFVKESFEAKDELCPEKPSGEEPPVEAKREDGDPATVTACEG

SEQ ID NO: 5605 - protein, 823 aa, Homo sapiens
MGKKRTKGKTVPIDDSSETLEPVCRHIRKGLEQGNLKKALVNVEWNICQDCKTDNKVKDKAEEETEEKPSVWLCLKCGHQGCGRNSQEQHALKHYLTPRSEPHCLVLSLDNWSVWCYVCDNEVQYCSSNQLGQVVDYVRKQASITTPKPAEKDNGNIELENKKLEKESKNEQEREKKENMAKENPPMNSPCQITVKGLSNLGNTCFFNAVMQNLSQTPVLRELLKEVKMSGTIVKIEPPDLALTEPLEINLEPPGPLTLAMSQFLNEMQETKKGVVTPKELFSQVCKKAVRFKGYQQQDSQELLRYLLDGMRAEEHQRVSKGILKAFGNSTEKLDEELKNKVKDYEKKKSMPSFVDRIFGGELTSMIMCDQCRTVSLVHESFLDLSLPVLDDQSGKKSVNDKNLKKTVEDEDQDSEEEKDNDSYIKERSDIPSGTSKHLQKKAKKQAKKQAKNQRRQQKIQGKVLHLNDICTIDHPEDSEYEAEMSLQGEVNIKSNHISQEGVMHKEYCVNQKDLNGQAKMIESVTDNQKSTEEVDMKNINMDNDLEVLTSSPTRNLNGAYLTEGSNGEVDISNGFKNLNLNAALHPDEINIEILNDSHTPGTKVYEVVNEDPETAFCTLANREVFNTDECSIQHCLYQFTRNEKLRDANKLLCEVCTRRQCNGPKANIKGERKHVYTNAKKQMLISLAPPVLTLHLKRFQQAGFNLRKVNKHIKFPEILDLAPFCTLKCKNVAEENTRVLYSLYGVVEHSGTMRSGHYTAYAKARTANSHLSNLVLHGDIPQDFEMESKGQWFHISDTHVQAVPTTKVLNSQAYLLFYERIL

SEQ ID NO: 5606 - protein, 1067 aa, Homo sapiens
MNSMDRHIQQTNDRLQCIKQHLQNPANFHNAATELLDWCGDPRAFQRPFEQSLMGCLTVVSRVAAQQGFDLDLGYRLLAVCAANRDKFTPKSAALLSSWCEELGRLLLLRHQKSRQSDPPGKLPMQPPLSSMSSMKPTLSHSDGSFPYDSVPWQQNTNQPPGSLSVVTTVWGVTNTSQSQVLGNPMANANNPMNPGGNPMASGMTTSNPGLNSPQFAGQQQQFSAKAGPAQPYIQQSMYGRPNYPGSGGFGASYPGGPNAPAGMGIPPHTRPPADFTQPAAAAAAAAVAAAAATATATATATVAALQETQNKDINQYGPMGPTQAYNSQFMNQPGPRGPASMGGSMNPASMAAGMTPSGMSGPPMGMNQPRPPGISPFGTHGQRMPQQTYPGPRPQSLPIQNIKRPYPGEPNYGNQQYGPNSQFPTQPGQYPAPNPPRPLTSPNYPGQRMPSQPSSGQYPPPTVNMGQYYKPEQFNGQNNTFSGSSYSNYSQGNVNRPPRPVPVANYPHSPVPGNPTPPMTPGSSIPPYLSPSQDVKPPFPPDIKPNMSALPPPPANHNDELRLTFPVRDGVVLEPFRLEHNLAVSNHVFHLRPTVHQTLMWRSDLELQFKCYHHEDRQMNTNWPASVQVSVNATPLTIERGDNKTSHKPLHLKHVCQPGRNTIQITVTACCCSHLFVLQLVHRPSVRSVLQGLLKKRLLPAEHCITKIKRNFSSVAASSGNTTLNGEDGVEQTAIKVSLKCPITFRRIQLPARGHDCKHVQCFDLESYLQLNCERGTWRCPVCNKTALLEGLEVDQYMWGILNAIQHSEFEEVTIDPTCSWRPVPIKSDLHIKDDPDGIPSKRFKTMSPSQMIMPNVMEMIAALGPGPSPYPLPPPPGGTNSNDYSSQGNNYQGHGNFDFPHGNPGGTSMNDFMHGPPQLSHPPDMPNNMAALEKPLSHPMQETMPHAGSSDQPHPSIQQGLHVPHPSSQSGPPLHHSGAPPPPPSQPPRQPPQAAPSSHPHSDLTFNPSSALEGQAGAQGASDMPEPSLDLLPELTNPDELLSYLDPPDLPSNSNDDLLSLFENN

SEQ ID NO: 5607 - protein, 345 aa, Homo sapiens
MDGEDIPDFSSLKEETAYWKELSLKYKQSFQEARDELVEFQEGSRELEAELEAQLVQAEQRNRDLQADNQRLKYEVEALKEKLEHQYAQSYKQVSVLEDDLSQTRAIKEQLHKYVRELEQANDDLERAKRATIVSLEDFEQRLNQAIERNAFLESELDEKESLLVSVQRLKDEARDLRQELAVRERQQEVTRKSAPSSPTLDCEKMDSAVQASLSLPATPVGKGTENTFPSPKAIPNGFGTSPLTPSARISALNIVGDLLRKVGALESKLAACRNFAKDQASRKSYISGNVNCGVLNGNGTKFSRSGHTSFFDKGAVNGFDPAPPPPGLGSSRPSSAPGMLPLSV

SEQ ID NO: 5608 - protein, 195 aa, Homo sapiens
MGSRASTLLRDEELEEIKKETGFSHSQITRLYSRFTSLDKGENGTLSREDFQRIPELAINPLGDRIINAFFPEGEDQVNFRGFMRTLAHFRPIEDNEKSKDVNGPEPLNSRSNKLHFAFRLYDLDKDEKISRDELLQVLRMMVGVNISDEQLGSIADRTIQEADQDGDSAISFTEFVKVLEKVDVEQKMSIRFLH

SEQ ID NO: 5609 - protein, 259 aa, Homo sapiens
MADACCTRTYVIAASTMSVCSSDVGHVSRVSSPSTCTGSSWQVDNCQESCCEPRSCASSCCTPSCCAPAPCLALVCAPVSCEPSPCQSGCTDSCTPSCCQQSSCQPACCTSSPCQQACCVPVCCKSNCCKPVCCVSICSGASSPCCQQSSCQSACCTFSPCQQACCVPICCKPICCVPVCSGASSLCCQKSSCQPACCTTSCCRPSSSVSLLCRPVCRPACCVPVPSCCVPASSCQPSCCHPASCLSFLCRPACSRLAC

SEQ ID NO: 5610 - protein, 56 aa, Homo sapiens
MIYYSNYYGGYGYGGLGCGYGCGYRGYGCGYGGYGGYGNGYYCPSCYGRYWSYGFY

SEQ ID NO: 5611 - protein, 298 aa, Homo sapiens
MAASTMSVCSSAYSDSWQVDDCPESCCEPPCSAPSCCAPAPSLSLVCTPVSCVSSPCCQAACEPSACQSGCTSSCTPSCCQQSSCQPACCTSSPCQQACCVPVCCKTVCCKPVCCVPVCCGAASSCCRQSSCQPACCASSSCQPACCVPVCCKPVCCVSTCSEDSSSCCQQSSCQPACCTSSSYQQACCVPVCCKTVYCKPICCVPVCSRASSSRCQQPSCQPACCTTSCCRPSSSVSLLCHPVCRSTCCVPVSSCCAPTSSCQSSCCRPASCVSLLCRPASSRLACYSLCSGKKSSC

SEQ ID NO: 5612 - protein, 188 aa, Homo sapiens
MTAPSCAFPVQFRQPSVSGLSQITKSLYISNGVAANNKLMLSSNQITMVINVSVEVVNTLYEDIQYMQVPVADSPNSRLCDFFDPIADHIHSVEMKQGRTLLHCAAGVSRSAALCLAYLMKYHAMSLLDAHTWTKSCRPIIRPNSGFWEQLIHYEFQLFGKNTVHMVSSPVGMIPDIYEKEVRLMIPL

SEQ ID NO: 5613 - protein, 48 aa, Homo sapiens
MSFDNNYHGGQGYAKGGLGCSYGCGLSGYGYACYCPWCYERSWFSGCF

SEQ ID NO: 5614 - protein, 63 aa, Homo sapiens
MSYSGSYYGGLGYGCGGFGGLGYGYSCGCGSFRRLGYGCGYGGYRYSCCHPSCYGGYWSSGFY

SEQ ID NO: 5615 - protein, 62 aa, Homo sapiens
MCGSYYGNYYGDHGYGCCGYEGLGYGYGSLRCGYSSCCGYGHGYGSRFFCGCGYGCGSGYYY

SEQ ID NO: 5616 - protein, 1407 aa, Homo sapiens
MWSLTASEGESTTAHFFLGAGDEGLGTRGIGMRPEESDSELLEDEEDEVPPEPQIIVGICAMTKKSKSKPMTQILERLCRFDYLTVVILGEDVILNEPVENWPSCHCLISFHSKGFPLDKAVAYSKLRNPFLINDLAMQYYIQDRREVYRILQEEGIDLPRYAVLNRDPARPEECNLIEGEDQVEVNGAVFPKPFVEKPVSAEDHNVYIYYPSSAGGGSQRLFRKIGSRSSVYSPESSVRKTGSYIYEEFMPTDGTDVKVYTVGPDYAHAEARKSPALDGKVERDSEGKEIRYPVMLTAMEKLVARKVCVAFKQTVCGFDLLRANGHSFVCDVNGFSFVKNSMKYYDDCAKILGNTIMRELAPQFQIPWSIPTEAEDIPIVPTTSGTMMELRCVIAIIRHGDRTPKQKMKMEVKHPRFFALFEKHGGYKTGKLKLKRPEQLQEVLDITRLLLAELEKEPGGEIEEKTGKLEQLKSVLEMYGHFSGINRKVQLTYYPHGVKASNEGQDPQRETLAPSLLLVLKWGGELTPAGRVQAEELGRAFRCMYPGGQGDYAGFPGCGLLRLHSTFRHDLKIYASDEGRVQMTAAAFAKGLLALEGELTPILVQMVKSANMNGLLDSDGDSLSSCQHRVKARLHHILQQDAPFGPEDYDQLAPTRSTSLLNSMTIIQNPVKVCDQVFALIENLTHQIRERMQDPRSVDLQLYHSETLELMLQRWSKLERDFRQKSGRYDISKIPDIYDCVKYDVQHNGSLGLQGTAELLRLSKALADVVIPQEYGISREEKLEIAVGFCLPLLRKILLDLQRTHEDESVNKLHPLYSRGVLSPGRHVRTRLYFTSESHVHSLLSVFRYGGLLDETQDAQWQRALDYLSAISELNYMTQIVIMLYEDNTQDPLSEERFHVELHFSPGVKGVEEEGSAPAGCGFRPASSENEEMKTNQGSMENLCPGKASDEPDRALQTSPQPPEGPGLPRRSPLIRNRKAGSMEVLSETSSSRPGGYRLFSSSRPPTEMKQSGLGSQCTGLFSTTVLGGSSSAPNLQDYARSHGKKLPPASLKHRDGFEGCSMVPTIYPLETLHNALSLRQVSEFLSRVCQRHTDAQAQASAALFDSMHSSQASDNPFSPAALHSPPLQLQQRSEKPPWYSSGPSSTVSSAGPSSPTTVDGNSQFGFSDQPSLNSHVAEEHQGLGLLQETPGSGAQELSIEGEQELFEPNQSPQVPPMETSQPYEEVSQPCQEVPDISQPCQDISEALSQPCQKVPDISQQCQENHDNGNHTCQEVPHISQPCQKSSQLCQKVSEEVCQLCLENSEEVSQPCQGVSVEVGKLVHKFHVGVGSLVQETLVEVGSPAEEIPEEVIQPYQEFSVEVGRLAQETSAINLLSQGIPEIDKPSQEFPEEIDLQAQEVPEEIN

SEQ ID NO: 5617 - protein, 234 aa, Homo sapiens
MEGASRNLASTPRVHAKVMMYRKEQYLDVLHALKVVRFVSDATPQAEVYLRMYQLESGKLPRSPSFPLEPDDEVFLAIAKAMEEMVEDSVDCYWITRRFVNQLNTKYRDSLPQLPKAFEQYLNLEDGRLLTHLRMCSAAPKLPYDLWFKRCFAGCLPESSLQRVWDKVVSGSCKILVFVAVEILLTFKIKVMALNSAEKITKFLENIPQDSSDAIVSKAIDLWHKHCGTPVHSS

SEQ ID NO: 5618 - protein, 178 aa, Homo sapiens
MTTLRAFTCDDLFRFNNINLDPLTETYGIPFYLQYLAHWPEYFIVAEAPGGELMGYIMGKAEGSVAREEWHGHVTALSVAPEFRRLGLAAKLMELLEEISERKGGFFVDLFVRVSNQVAVNMYKQLGYSVYRTVIEYYSASNGEPDEDAYDMRKALSRDTEKKSIIPLPHPVRPEDIE

SEQ ID NO: 5619 - protein, 790 aa, Homo sapiens; identical to SEQ ID NO: 4974

SEQ ID NO: 5620 - protein, 1195 aa, Homo sapiens
MWSLTASEGESTTAHFFLGAGDEGLGTRGIGMRPEESDSELLEDEEDEVPPEPQIIVGICAMTKKSKSKPMTQILERLCRFDYLTVVILGEDVILNEPVENWPSCHCLISFHSKGFPLDKAVAYSKLRNPFLINDLAMQYYIQGDRREVYRILQEEGIDLPRYAVLNRDPARPEECNLIEGEDQVEVNGAVFPKPFVEKPVSAEDHNVYIYYPSSAGGGSQRLFRKIGSRSSVYSPESSVRKTGSYIYEEFMPTDGTDVKVYTVGPDYAHAEARKSPALDGKVERDSEGKEIRYPVMLTAMEKLVARKVCVAFKQTVCGFDLLRANGHSFVCDVNGFSFVKNSMKYYDDCAKILGNTIMRELAPQFQIPWSIPTEAEDIPIVPTTSGTMMELRCVIAIIRHGDRTPKQKMKMEVKHPRFFALFEKHGGYKTGKLKLKRPEQLQEVLDITRLLLAELEKEPGGEIEEKTGKLEQLKSVLEMYGHFSGINRKVQLTYYPHGVKASNEGQDPQRETLAPSLLLVLKWGGELTPAGRVQAEELGRAFRCMYPGGQGDYAGFPGCGLLRLHSTFRHDLKIYASDEGRVQMTAAAFAKGLLALEGELTPILVQMVKSANMNGLLDSDGDSLSSCQHRVKARLHHILQQDAPFGPEDYDQLAPTRSTSLLNSMTIIQNPVKVCDQVFALIENLTHQIRERMQDPRSVDLQLYHSETLELMLQRWSKLERDFRQKSGRYDISKIPDIYDCVKYDVQHNGSLGLQGTAELLRLSKALADVVIPQEYGISREEKLEIAVGFCLPLLRKILLDLQRTHEDEYSRGVLSPGRHVRTRLYFTSESHVHSLLSVFRYGGLLDETQDADRALQTSPQPPEGPGLPRRSPLIRNRKAGSMEVLSETSSSRPGGYRLFSSSRPPTEMKQSGLGSQCTGLFSTTVLGGSSSAPNLQDYARSHGKKLPPASLKHRDELLFVPAVKRFSVSFAKHPTNGFEGCSMVPTIYPLETLHNALSLRQVPPMETSQPYEEVSQPCQEVPDISQPCQDISEALSQPCQKVPDISQQCQENHDNGNHTCQEVPHISQPCQKSSQLCQKVSEEVCQLCLENSEEVSQPCQGVSVEVGKLVHKFHVGVGSLVQETLVEVGSPAEEIPEEVIQPYQEFSVEVGRLAQETSAINLLSQGIPEIDKPSQEFPEEIDLQAQEVPEEIN

SEQ ID NO: 5621 - protein, 79 aa, Homo sapiens
MCCNYYGNSCGYGSGCGCGYGSGSGCGCGYGTGYGCGYGCGFGSHYGCGYGTGYGCGYGSGSGYCGYRPFCFRRCYSSC

SEQ ID NO: 5622 - protein, 588 aa, Homo sapiens
MKLEFTEKNYNSFVLQNLNRQRKRKEYWDMALSVDNHVFFAHRNVLAAVSPLVRSLISSNDMKTADELFITIDTSYLSPVTVDQLLDYFYSGKVVISEQNVEELLRGAQYFNTPRLRVHCNDFLIKSICRANCLRYLFLAELFELKEVSDVAYSGIRDNFHYWASPEGSMHFMRCPPVIFGRLLRDENLHVLNEDQALSALINWVYFRKEDREKYFKKFFNYINLNAVSNKTLVFASNKLVGMENTSSHTTLIESVLMDRKQERPCSLLVYQRKGALLDSVVILGGQKAHGQFNDGVFAYIIQENLWMKLSDMPYRAAALSATSAGRYIYISGGTTEQISGLKTAWRYDMDDNSWTKLPDLPIGLVFHTMVTCGGTVYSVGGSIAPRRYVSNIYRYDERKEVWCLAGKMSIPMDGTAVITKGDRHLYIVTGRCLVKGYISRVGVVDCFDTSTGDVVQCITFPIEFNHRPLLSFQQDNILCVHSHRQSVEINLQKVKASKTTTSVPVLPNSCPLDVSHAICSIGDSKVFVCGGVTTASDVQTKDYTINPNAFLLDQKTGKWKTLAPPPEALDCPACCLAKLPCKILQRI

SEQ ID NO: 5623 - protein, 735 aa, Homo sapiens
MIPPQEASARRREIEDKLKQEEETLSFIRDSLEKSDQLTKNMVSILSSFESRLMKLENSIIPVHKQTENLQRLQENVEKTLSCLDHVISYYHVASDTEKIIREGPTGRLEEYLGSMAKIQKAVEYFQDNSPDSPELNKVKLLFERGKEALESEFRSLMTRHSKVVSPVLILDLISGDDDLEAQEDVTLEHLPESVLQDVIRISRWLVEYGRNQDFMNVYYQIRSSQLDRSIKGLKEHFHKSSSSSGVPYSPAIPNKRKDTPTKKPVKRPGTIRKAQNLLKQYSQHGLDGKKGGSNLIPLEGLLPCTPRGGLPGPWINAACVCAADISPGHEHDFRVKHLSEALNDKHGPLAGRDDMLDVETDAYIHCVSAFVKLAQSEYQLLADIIPEHHQKKTFDSLIQDALDGLMLEGENIVSAARKAIVRHDFSTVLTVFPILRHLKQTKPEFDQVLQGTAASTKNKLPGLITSMETIGAKALEDFADNIKNDPDKEYNMPKDGTVHELTSNAILFLQQLLDFQETAGAMLASQETSSSATSYSSEFSKRLLSTYICKVLGNLQLNLLSKSKVYEDPALSAIFLHNNYNYILKSLEKSELIQLVAVTQKTAERSYREHIEQQIQTYQRSWLKVTDYIAEKNLPVFQPGVKLRDKERQIIKERFKGFNDGLEELCKIQKAWAIPDTEQRDRIRQAQKTIVKETYGAFLQKFGSVPFTKNPEKYIKYGVEQVGDMIDRLFDTSA

SEQ ID NO: 5624 - protein, 125 aa, Homo sapiens
MAGAGPTMLLREENGCCSRRQSSSSAGDSDGEREDSAAERARQQLEALLNKTMRIRMTDGRTLVGCFLCTDRDCNVILGSAQEFLKPSDSFSAGEPRVLGLAMVPGHHIVSIEVQRESLTGPPYL

SEQ ID NO: 5625 - protein, 158 aa, Homo sapiens
MLLLDCNPEVDGLKHLLETGASVNAPPDPCKQSPVHLAAGSGLACFLLWQLQTGADLNQQDVLGEAPLHKAAKVGSLECLSLLVASDAQIDLCNKNGQTAEDLAWSCGFPDCAKFLTTIKCMQTIKASEHPDRNDCVAVLRQKRSLGSVENTSGKRKC

SEQ ID NO: 5626 - protein, 2908 aa, Homo sapiens
MRGRRGRPPKQPAAPAAERCAPAPPPPPPPPTSGPIGGLRSRHRGSSRGRWAAAQAEVAPKTRLSSPRGGSSSRRKPPPPPPAPPSTSAPGRGGRGGGGGRTGGGGGGGHLARTTAARRAVNKVVYDDHESEEEEEEEDMVSEEEEEEDGDAEETQDSEDDEEDEMEEDDDDSDYPEEMEDDDDDASYCTESSFRSHSTYSSTPGRRKPRVHRPRSPILEEKDIPPLEFPKSSEDLMVPNEHIMNVIAIYEVLRNFGTVLRLSPFRFEDFCAALVSQEQCTLMAEMHVVLLKAVLREEDTSNTTFGPADLKDSVNSTLYFIDGMTWPEVLRVYCESDKEYHHVLPYQEAEDYPYGPVENKIKVLQFLVDQFLTTNIAREELMSEGVIQYDDHCRVCHKLGDLLCCETCSAVYHLECVKPPLEEVPEDEWQCEVCVAHKVPGVTDCVAEIQKNKPYIRHEPIGYDRSRRKYWFLNRRLIIEEDTENENEKKIWYYSTKVQLAELIDCLDKDYWEAELCKILEEMREEIHRHMDITEDLTNKARGSNKSFLAAANEEILESIRAKKGDIDNVKSPEETEKDKNETENDSKDAEKNREEFEDQSLEKDSDDKTPDDDPEQGKSEEPTEVGDKGNSVSANLGDNTTNATSEETSPSEGRSPVGCLSETPDSSNMAEKKVASELPQDVPEEPNKTCESSNTSATTTSIQPNLENSNSSSELNSSQSESAKAADDPENGERESHTPVSIQEEIVGDFKSEKSNGELSESPGAGKGASGSTRIITRLRNPDSKLSQLKSQQVAAAAHEANKLFKEGKEVLVVNSQGEISRLSTKKEVIMKGNINNYFKLGQEGKYRVYHNQYSTNSFALNKHQHREDHDKRRHLAHKFCLTPAGEFKWNGSVHGSKVLTISTLRLTITQLENNIPSSFLHPNWASHRANWIKAVQMCSKPREFALALAILECAVKPVVMLPIWRESLGHTRLHRMTSIEREEKEKVKKKEKKQEEEETMQQATWVKYTFPVKHQVWKQKGEEYRVTGYGGWSWISKTHVYRFVPKLPGNTNVNYRKSLEGTKNNMDENMDESDKRKCSRSPKKIKIEPDSEKDEVKGSDAAKGADQNEMDISKITEKKDQDVKELLDSDSDKPCKEEPMEVDDDMKTESHVNCQESSQVDVVNVSEGFHLRTSYKKKTKSSKLDGLLERRIKQFTLEEKQRLEKIKLEGGIKGIGKTSTNSSKNLSESPVITKAKEGCQSDSMRQEQSPNANNDQPEDLIQGCSESDSSVLRMSDPSHTTNKLYPKDRVLDDVSIRSPETKCPKQNSIENDIEEKVSDLASRGQEPSKSKTKGNDFFIDDSKLASADDIGTLICKNKKPLIQEESDTIVSSSKSALHSSVPKSTNDRDATPLSRAMDFEGKLGCDSESNSTLENSSDTVSIQDSSEEDMIVQNSNESISEQFRTREQDVEVLEPLKCELVSGESTGNCEDRLPVKGTEANGKKPSQQKKLEERPVNKCSDQIKLKNTTDKKNNENRESEKKGQRTSTFQINGKDNKPKIYLKGECLKEISESRVVSGNVEPKVNNINKIIPENDIKSLTVKESAIRPFINGDVIMEDFNERNSSETKSHLLSSSDAEGNYRDSLETLPSTKESDSTQTTTPSASCPESNSVNQVEDMEIETSEVKKVTSSPITSEEESNLSNDFIDENGLPINKNENVNGESKRKTVITEVTTMTSTVATESKTVIKVEKGDKQTVVSSTENCAKSTVTTTTTTVTKLSTPSTGGSVDIISVKEQSKTVVTTTVTDSLTTTGGTLVTSMTVSKEYSTRDKVKLMKFSRPKKTRSGTALPSYARGSFVTKSSKKSIFVLPNDDLKKLARKGGIREVPYFNYNAKPALDIWPYPSPRPTFGITWRYRLQTVKSLAGVSLMLRLLWASLRWDDMAAKAPPGGGTTRTETSETEITTTEIIKRRDVGPYGIRSEYCIARGSIICPIGVPETPKETPTPQARGSGLRSSALRPKRPETPKQTGPVIIETWVAEEELELWEIRAFAERVEKEKAQAVEQQAKKRLEQQKPTVIATSTTSPTSSTTSTISPAQKVMVAPISGSVTTGTKMVLTTKVGSPATVTFQQNKNFHQTFATWVKQGQSNSGVVQVQQKVLGIIPSSTGTSQQTFTSFQAAATVTIRPNTSGSGGTTSNSQVITGPQIRPGMTVIRTPLQQSTLGKAIIRTPVMVQPGAPQQVMTQIIRGQPVSTAVSAPNTVSSTPGQKSLTSATSTSNIQSSASQPPRPQQGQVKLTMAQLTQLTQGHGGNQGLTVVIQGQGQTTGQLQLIPQGVTVLPGPGQQLMQAAMPNGTVQRFLFTPLATTATTASTTTTTVSTTAAGTGEQRQSKLSPQMQVHQDKTLPPAQSSSVGPAEAQPQTAQPSAQPQPQTQPQSPAQPEVQTQPEVQTQTTVSSHVPSEAQPTHAQSSKPQVAAQSQPQSNVQGQSPVRVQSPSQTRIRPSTPSQLSPGQQSQVQTTTSQPIPIQPHTSLQIPSQGQPQSQPQVVMKHNAVIEHLKQKKSMTPAEREENQRMIVCNQVMKYILDKIDKEEKQAAKKRKREESVEQKRSKQNATKLSALLFKHKEQLRAEILKKRALLDKDLQIEVQEELKRDLKIKKEKDLMQLAQATAVAAPCPPVTPAPPAPPAPPPSPPPPPAVQHTGLLSTPTLPAASQKRKREEEKDSSSKSKKKKMISTTSKETKKDTKLYCICKTPYDESKFYIGCDRCQNWYHGRCVGILQSEAELIDEYVCPQCQSTEDAMTVLTPLTEKDYEGLKRVLRSLQAHKMAWPFLEPVDPNDAPDYYGVIKEPMDLATMEERVQRRYYEKLTEFVADMTKIFDNCRYYNPSDSPFYQCAEVLESFFVQKLKGFKASRSHNNKLQSTAS

SEQ ID NO: 5627 - protein, 875 aa, Homo sapiens
MNFQAGGGQSPQQQQQLAGGPPQQFALSNSAAIRAEIQRFESVHPNIYAIYDLIERIEDLALQNQIREHVISIEDSFVNSQEWTLSRSVPELKVGIVGNLSSGKSALVHRYLTGTYVQEESPEGGRFKKEIVVDGQSYLLLIRDEGGPPELQFAAWVDAVVFVFSLEDEISFQTVYNYFLRLCSFRNASEVPMVLVGTQDAISAANPRVIDDSRARKLSTDLKRCTYYETCATYGLNVERVFQDVAQKVVALRKKQQLAIGPCKSLPNSPSHSAVSAASIPAVHINQATNGGGSAFSDYSSSVPSTPSISQRELRIETIAASSTPTPIRKQSKRRSNIFTSRKGADLDREKKAAECKVDSIGSGRAIPIKQGILLKRSGKSLNKEWKKKYVTLCDNGLLTYHPSLHDYMQNIHGKEIDLLRTTVKVPGKRLPRATPATAPGTSPRANGLSVERSNTQLGGGTGAPHSASSASLHSERPLSSSAWAGPRPEGLHQRSCSVSSADQWSEATTSLPPGMQHPASGPAEVLSSSPKLDPPPSPHSNRKKHRRKKSTGTPRPDGPSSATEEAEESFEFVVVSLTGQTWHFEASTAEERELWVQSVQAQILASLQGCRSAKDKTRLGNQNAALAVQAVRTVRGNSFCIDCDAPNPDWASLNLGALMCIECSGIHRHLGAHLSRVRSLDLDDWPPELLAVMTAMGNALANSVWEGALGGYSKPGPDACREEKERWIRAKYEQKLFLAPLPSSDVPLGQQLLRAVVEDDLRLLVMLLAHGSKEEVNETYGDGDGRTALHLSSAMANVVFTQLLIWYGVDVRSRDARGLTPLAYARRAGSQECADILIQHGCPGEGCGLAPTPNREPANGTNPSAELHRSPSLL

SEQ ID NO: 5628 - protein, 586 aa, Homo sapiens
MGGALGLRQLPICAPACRPSSGHSPWAAASPNPNQWSSRSRWCCLRRSEARRSCRPVGRAAPGPTRAMARPATSTRRSACPPLTPTPALRIAWRLLSATSRTSRMASVLSRGRVRCPWHGACFNISTGDLEDFPGLDSLHKFQVKIEKEKVYVRASKQALQLQRRTKVMAKCISPSAGYSSSTNVLIVGAGAAGLVCAETLRQEGFSDRIVLCTLDRHLPYDRPKLSKSLDTQPEQLALRPKEFFRAYGIEVLTEAQVVTVDVRTKKVVFKDGFKLEYSKLLLAPGSSPKTLSCKGKEVENVFTIRTPEDANRVVRLARGRNVVVVGAGFLGMEVAAYLTEKAHSVSVVELEETPFRRFLGERVGRALMKMFENNRVKFYMQTEVSELRGQEGKLKEVVLKSSKVVRADVCVVGIGAVPATGFLRQSGIGLDSRGFIPVNKMMQTNVPGVFAAGDAVTFPLAWRNNRKVNIPHWQMAHAQGRVAAQNMLAQEAEMSTVPYLWTAMFGKSLRYAGYGEGFDDVIIQGDLEELKFVAFYTKGDEVIAVASMNYDPIVSKVAEVLASGRAIRKREVETGDMSWLTGKGS

SEQ ID NO: 5629 - protein, 506 aa, Homo sapiens
MPVQAAQWTEFLSCPICYNEFDENVHKPISLGCSHTVCKTCLNKLHRKACPFDQTAINTDIDVLPVNFALLQLVGAQVPDHQSIKLSNLGENKHYEVAKKCVEDLALYLKPLSGGKGVASLNQSALSRPMQRKLVTLVNCQLVEEEGRVRAMRAARSLGERTVTELILQHQNPQQLSANLWAAVRARGCQFLGPAMQEEALKLVLLALEDGSALSRKVLVLFVVQRLEPRFPQASKTSIGHVVQLLYRASCFKVTKRDEDSSLMQLKEEFRSYEALRREHDAQIVHIAMEAGLRISPEQWSSLLYGDLAHKSHMQSIIDKLQSPESFAKSVQELTIVLQRTGDPANLNRLRPHLELLANIDPNPDAVSPTWEQLENAMVAVKTVVHGLVDFIQNYSRKGHETPQPQPNSKYKTSMCRDLRQQGGCPRGTNCTFAHSQEELEKCNPRGLYLHCCLLSSVASLGTVHNELYKQQHCDREKISVCAVKRAETCFSSQFFSPLEVPREED

SEQ ID NO: 5630 - protein, 260 aa, Homo sapiens
MPRARSGRRSRGAGGREETFLRVRANRQTRLNARIGKMKRRKQDEGQVCPLCNRPLAGSEQEMSRHVEHCLSKREGSCMAEDDAVDIEHENNNRFEEYEWCGQKRIRATTLLEGGFRGSGFIMCSGKENPDSDADLDVDGDDTLEYGKPQYTEADVIPCTGEEPGEAKEREALRGAVLNGGPPSTRITPEFSKWASDEMPSTSNGESSKQEAMQKTCKNSDIEKITEDSAVTTFEALKARVRELERQLSRGDRYKCLICM

SEQ ID NO: 5631 - protein, 486 aa, Homo sapiens
MAAVKTLNPKAEVARAQAALAVNISAARGLQDVLRTNLGPKGTMKMLVSGAGDIKLTKDGNVLLHEMGLHPRIITEGFEAAKEKALQFLEEVKVSREMDRETLIDVARTSLRTKVHAELADVLTEAVVDSILAIKKQDEPIDLFMIEIMEMKHKSETDTSLIRGLVLDHGARHPDMKKRVEDAYILTCNVSLEYEKTEVNSGFFYKSAEEREKLVKAERKFIEDRVKKIIELKRKVCGDSDKGFVVINQKGIDPFSLDALSKEGIVALRRAKRRNMERLTLACGGVALNSFDDLSPDCLGHAGLVYEYTLGEEKFTFIEKCNNPRSVTLLIKGPNKHTLTQIKDAVRDGLRAVKNAIDDGCVVPGAGAVEVAMAEALIKHKPSVKGRAQLGVQAFADALLIIPKVLAQNSGFDLQETLVKIQAEHSESGQLVGVDLNTGEPMVAAEVGVWDNYCVKKQLLHSCTVIATNILLVDEIMRAGMSSLKG

SEQ ID NO: 5632 - protein, 468 aa, Homo sapiens
MSFRLSGGSRRICSRTGSGRLSGGGTGFVAGNVCVGSGARSSFSCTLEGISSGGSFCNSGGGLGSGACAGFLGNEHSLLSGNEKVTMQNLNDRLASYLDHVHALEEANADLEQKIKGWYEKCEPGSSREHDHDYSRYFSVIEDLKRQIISATICNASIVLQNDNARLTADDFRLKYENELALHHSVEADTSGLRRVLDELTLCTTDLEIQCETLSEELTYLKKSHEEEMEVLQYTAGGNVNVEMNATPGVDLTVLLNNMRAEYEDLAEQNRKDAEAWFNERSATLQQQISDHEGAATAARNELTELKRNLQTLEIELQSLMAVKHSYECSLAETEGNYCNQLQQIQDQIGVMEEQLQQIRTETEGQKLEYEQLLDVKIFLEKEIDIYCNLLDGEERKSKSTCYKSKGYRPVNSGNQAKDSTEETIVKTVVEELDQIGNLLSLRVHSVEEKSSKISNITVEQRVPSKAP

SEQ ID NO: 5633 - protein, 271 aa, Homo sapiens; identical to SEQ ID NO: 5569

SEQ ID NO: 5634 - protein, 250 aa, Homo sapiens
MSENAAPDFYYVAMDFGGHGLSSHYSPGVPYYLQTFVSEIRRVVAGGVVGGMFFCTFPEMVDKLILLDTPLFLLESDEMENLLTYKRRAIEHVLQVEASQEPSHVFSLKQLLQRLLKSNSHLSEECGELLLQRGTTKVATGLVLNRDQRLAWAENSIDFISRELCAHSIRKLQAHVLLIKAVHGYFDSRQNYSEKESLSFMIDTMKSTLKEQFQFVEVPGNHCVHMSEPQHVASIISSFLQCTHMLPAQL

SEQ ID NO: 5635 - protein, 169 aa, Homo sapiens
MVFPLPTPQEPIMATPPKRRAVEATGEKVLRYETFISDVLQRDLRKVLDHRDKVYEQLAKYLQLRNVIERLQEAKHSELYMQVDLGCNFFVDTVVPDTSRIYVALGYGFFLELTLAEALKFIDRKSSLLTELSNSLTKDSMNIKAHIHMLLEGLRELQGLQNFPEKPHH

SEQ ID NO: 5636 - protein, 1057 aa, Homo sapiens
MTTVVVHVDSKAELTTLLEQWEKEHGSGQDMVPILTRMSQLIEKETEEYRKGDPDPFDDRHPGRADPECMLGHLLRILFKNDDFMNALVNAYVMTSREPPLNTAACRLLLDIMPGLETAVVFQEKEGIVENLFKWAREADQPLRTYSTGLLGGAMENQDIAANYRDENSQLVAIVLRRLRELQLQEVALRQENKRPSPRKLSSEPLLPLDEEAVDMDYGDMAVDDAEIQKSALQIIINCVCGPDNRISSIGKFISGTPRRKLPQNPKSSEHTLAKMWNVVQSNNGIKVLLSLLSIKMPITDADQIRALACKALVGLSRSSTVRQIISKLPLFSSCQIQQLMKEPVLQDKRSDHVKFCKYAAELIERVSGKPLLIGTDVSLARLQKADVVAQSRISFPEKELLLLIRNHLISKGLGETATVLTKEADLPMTAASHSSAFTPVTAAASPVSLAAPRIANGIATRLGSHAAVGASAPSAPTAHPQPRPPQGPLALPGPSYAGNSPLIGRISFIRERPSPCNGRKIRVLRQKSDHGAYSQSPAIKKQLDRHLPSPPTLDSIITEYLREQHARCKNPVATCPPFSLFTPHQCPEPKQRRQAPINFTSRLNRRASFPKYGGVDGGCFDRHLIFSRFRPISVFREANEDESGFTCCAFSARERFLMLGTCTGQLKLYNVFSGQEEASYNCHNSAITHLEPSRDGSLLLTSATWSQPLSALWGMKSVFDMKHSFTEDHYVEFSKHSQDRVIGTKGDIAHIYDIQTGNKLLTLFNPDLANNYKRNCATFNPTDDLVLNDGVLWDVRSAQAIHKFDKFNMNISGVFHPNGLEVIINTEIWDLRTFHLLHTVPALDQCRVVFNHTGTVMYGAMLQADDEDDLMEERMKSPFGSSFRTFNATDYKPIATIDVKRNIFDLCTDTKDCYLAVIENQGSMDALNMDTVCRLYEVGRQRLAEDEDEEEDQEEEEQEEEDDDEDDDDTDDLDELDTDQLLEAELEEDDNNENAGEDGDNDFSPSDEELANLLEEGEDGEDEDSDADEEVELILGDTDSSDNSDLEDDIILSLNE

SEQ ID NO: 5637 - protein, 802 aa, Homo sapiens
MAAEALAAEAVASRLERQEEDIRWLWSEVERLRDEQLNAPYSCQAEGPCLTREVAQLRAENCDLRHRLCSLRLCLAEERSRQATLESAELEAAQEAGAQPPPSQSQDKDMKKKKMKESEADSEVKHQPIFIKERLKLFEILKKDHQLLLAIYGKKGDTSNIITVRVADGQTVQGEVWKTTPYQVAAEISQELAESTVIAKVNGELWDLDRPLEGDSSLELLTFDNEEAQAVYWHSSAHILGEAMELYYGGHLCYGPPIENGFYYDMFIEDRAVSSTELSALENICKAIIKEKQPFERLEVSKEILLEMFKYNKFKCRILNEKVNTATTTVYRCGPLIDLCKGPHVRHTGKIKTIKIFKNSSTYWEGNPEMETLQRIYGISFPDNKMMRDWEKFQEEAKNRDHRKIGKEQELFFFHDLSPGSCFFLPRGAFIYNTLTDFIREEYHKRDFTEVLSPNMYNSKLWEASGHWQHYSENMFTFEIEKDTFALKPMNCPGHCLMFAHRPRSWREMPIRFADFGVLHRNELSGTLSGLTRVRRFQQDDAHIFCTVEQIEEEIKGCLQFLQSVYSTFGFSFQLNLSTRPENFLGEIEMWNEAEKQLQNSLMDFGEPWKMNPGDGAFYGPKIDIKIKDAIGRYHQCATIQLDFQLPIRFNLTYVSKDGDDKKRPVIIHRAILGSVERMIAILSENYGGKWPFWLSPRQVMVIPVGPTCEKYALQVSSEFFEEGFMADVDLDHSCTLNKKIRNAQLAQYNFILVVGEKEKIDNAVNVRTRDNKIHGEILVTSAIDKLKNLRKTRTLNAEEAF

SEQ ID NO: 5638 - protein, 382 aa, Homo sapiens
MFKIQLEPLKLRAWTLNGFVKFRNKETSAGPVAVMGKDYYKILGIPSGANEDEIKKAYRKMALKYHPDKNKEPNAEEKFKEIAEAYDVLSDPKKRGLYDQYGEEGLKTGGGTSGGSSGSFHYTFHGDPHATFASFFGGSNPFDIFFASSRSTRPFSGFDPDDMDVDEDEDPFGAFGRFGFNGLSRGPRRAPEPLYPRRKVQDPPVVHELRVSLEEIYHGSTKRMKITRRRLNPDGRTVRTEDKILHIVIKRGWKEGTKITFPKEGDATPDNIPADIVFVLKDKPHAHFRRDGTNVLYSALISLKEALCGCTVNIPTIDGRVIPLPCNDVIKPGTVKRLRGEGLPFPKVPTQRGDLIVEFKVRFPDRLTPQTRQILKQHLPCS

SEQ ID NO: 5639 - protein, 451 aa, Homo sapiens [sequence omitted]

SEQ ID NO: 5640 - protein, 147 aa, Homo sapiens
  VARIANT 1: note = X can be any amino acid
XTARGPEPEQMGLAPCCTQALCGLALRHHSHLQQIRLEFHRLSEENTLLKNDLGRVRQELEAAESTHDAQRKEIEVLKKDKEKACSEMEVLNRQNQNYKDQLSQLNVRVLQLGQEASTHQAQNEEHRVTIQMLTQSLEEVVRSGQQQ

SEQ ID NO: 5641 - protein, 256 aa, Homo sapiens
MATQRKHLVKDFNPYITCYICKGYLIKPTTVTECLHTFCKTCIVQHFEDSNDCPRCGNQVHETNPLEMLRLDNTLEEIIFKLVPGLREQELERESEFWKKNKPQENGQDDTSKADKPKVDEEGDENEDDKDYHRSDPQIAICLDCLRNNGQSGDNVVKGLMKKFIRCSTRVTVGTIKKFLSLKLKLPSSYELDVLCNGEIMGKDHTMEFIYMTRWRLRGENFRCLNCSASQVCSQDGPLYQSYPMVLQYRPRIDFG

SEQ ID NO: 5642 - protein, 2226 aa, Homo sapiens
MAPKKEKGGTVNTSSKIWEPSLIAAQFNQNDWQASIAFVVGNQIEDDLLIQALTVAVQVPQRKLFSMVSWQDILQQINEINTLVGSASSKKAKKPVGGNAPLYYEVLTAAKAIMDSGEKLTLPLIGKLLKFQLLQIKFKDQQRRENEKKVIEDKPKLEKDKGKAKSPKEKKAPSAKPAKGKGKDQPEANAPVKKTTQLKRRGEDDHTNRYIDDEPDDGAQHYIIVVGFNNPQLLAIMAELGIPITSVIKISSENYEPLQTHLAAVNQQQEVLLQSEDLEAEKLKKENAIKELKTFWKYLEPVLNNEKPETNLFDVARLEYMVKAADFPSDWSDGEMMLKLGTDIFENIACLMYDILDWKRQHQHYLESMQLINVPQVVNEKPVLEAMPTSEAPQPAVPAPGKKKAQYEEPQAPPPVTSVITTEVDMRYYNYLLNPIREEFISVPLILHCMLEQVVATEEDLVPPSLREPSPRADGLDHRIAAHIVSLLPSLCLSEREKKNLHDIFLSEEENESKAVPKGPLLLNYHDAHAHKKYALQDQKNFDPVQIEQEMQSKLPLWEFLQFPLPPPWNNTKRLATIHELMHFCTSDVLSWNEVERAFKVFTFESLKLSEVDEKGKLKPSGMMCGSDSEMFNIPWDNPARFAKQIRQQYVMKMNTQEAKQKADIKIKDRTLFVDQNLSMSVQDNESNREPSDPSQCDANNMKHSDLNNLKLSVPDNRQLLEQESIMKAQPQHESLEQTTNNEIKDDAVTKADSHEKKPKKMMVEADLEDIKKTQQRSLMDWSFTEHFKPKVLLQVLQEAHKQYRCVDSYYHTQDNSLLLVFHNPMNRQRLHCEYWNIALHSNVGFRNYLELVAKSIQDWITKEEAIYQESKMNEKIIRTRAELELKSSANAKLTSASKIFSIKESKSNKGISKTEISDQEKEKEKEKIPFILEGSLKAWKEEQHRLAEEERLREEKKAEKKGKEAGKKKGKDNAEKEDSRSLKKKSPYKEKSKEEQVKIQEVTEESPHQPEPKITYPFHGYNMGNIPTQISGSNYYLYPSDGGQIEVEKTMFEKGPTFIKVRVVKDNHNFMIHLNDPKEIVKKEEKGDYYLEEEEEGDEEQSLETEVSDAKNKAFSKFGSFSATLENGICLSISYYGSNGMAPEDKDPDLETILNIPSALTPTVVPVIVTVPQSKAKGKIKGKEKPKESLKEEEHPKEEEKKEEEVEPEPVLQETLDVPTFQSLNVSCPSGLLLTFIGQESTGQYVIDEEPTWDIMVRQSYPQRVKHYEFYKTVMPPAEQEASRVITSQGTVVKYMLDGSTQILFADGAVSRSPNSGLICPPSEMPATPHSGDLMDSISQQKSETIPSEITNTKKGKSHKSQSSMAHKGEIHDPPPEAVQTVTPVEVHIGTWFTTTPEGNRIGTKGLERIADLTPLLSFQATDPVNGTVMTTREDKVVIVERKDGTRIVDHADGTRITTFYQVYEDQIILPDDQETTEGAAVTRQVKCMRVESSRYATVIANCEDSSCCATFGDGTTIIAKPQGTYQVLPPNTGSLYIDKDCSAVYCHESSSNIYYPFQKREQLRAGRYIMRHTSEVICEVLDPEGNTFQVMADGSISTILPEKKLEDDLNEKTEGYDSLSSMHLEKNHQQIYGEHVPRFFVMYADGSGMELLRDSDIEEYLSLAYKESNTVVLQEPVQEQPGTLTITVLRPFHEASPWQVKKEDTIVPPNLRSRSWETFPSVEKKTPGPPFGTQIWKGLCIESKQLVSAPGAILKSPSVLQMRQFIQHEVIKNEVKLRLQVSLKDYINYILKKEDELQEMMVKDSRTEEERGNAADLLKLVMSFPKMEETTKSHVTEVAAHLTDLFKQSLATPPKCPPDTFGKDFFEKTWRHTASSKRWKEKIDKTARGSEIETTQNYLMDIKNRIIPPFFKSELNQLYQSQYNHLDSLSKKLPSFTKKNEDANETAVQDTSDLNLDFKPHKVSEQKSSSVPSLPKPEISADKKDFTAQNQTENLTKSPEEAESYEPVKIPTQSLLQDVAGQTARGSEKVKLPHYLLSSKPKSQPLAKVQDSVGGKVNTSSVASAAINNAKSSLFGFHLLPSSVKFGVLKEGHTYATVVKLKNVGVDFCRFKVKQPPPSTGLKVTYKPGPVAAGMQTELNIELFATAVGEDGAKGSAHISHNIEIMTEHEVLFLPVEATVLTSSNYDKRPKDFPQGKENPMVQRTSTIYSSTLGVFMSRKVSPH

SEQ ID NO: 5643 - protein, 777 aa, Homo sapiens
MPAFLGLKCLGKLCSSEKSKVTSSERTSARGSNRKRLIVEDRRVSGTSFTAHRRATITHLLYLCPKDYCPRGRVCNSVDPFVAHPQDPHHPSEKPVIHCHKCGEPCKGEVLRVQTKHFHIKCFTCKVCGCDLAQGGFFIKNGEYLCTLDYQRMYGTRCHGCGEFVEGEVVTALGKTYHPNCFACTICKRPFPPGDRVTFNGRDCLCQLCAQPMSSSPKETTFSSNCAGCGRDIKNGQALLALDKQWHLGCFKCKSCGKVLTGEYISKDGAPYCEKDYQGLFGVKCEACHQFITGKVLEAGDKHYHPSCARCSRCNQMFTEGEEMYLQGSTVWHPDCKQSTKTEEKLRPTRTSSESIYSRPGSSIPGSPGHTIYAKVDNEILDYKDLAAIPKVKAIYDIERPDLITYEPFYTSGYDDKQERQSLGESAALSPTPSAEGYQDVRDRMIHRSTSQGSINSPVYSRHSYTPTTSRSPQHFHRPGNEPSSGRNSPLPYRPDSRPLTPTYAQAPKHFHVPDQGINIYRKPPIYKQHAALAAQSKSSEDIIKFSKFPAAQAPDPSETPKIETDHWPGPPSFAVVGPDMKRRSSGREEDDEELLRRRQLQEEQLMKLNSGLGQLILKEEMEKESRERSSLLASRYDSPINSASHIPSSKTASLPGYGRNGLHRPVSTDFAQYNSYGDVSGGVRDYQTLPDGHMPAMRMDRGVSMPNMLEPKIFPYEMLMVTNRGRNKILREVDRTRLERHLAPEVFREIFGMSIQEFDRLPLWRRNDMKKKAKLF

SEQ ID NO: 5644 - protein, 562 aa, Homo sapiens
MNPLFGPNLFLLQQEQQGLAGPLGDSLGGDHFAGGGDLPPAPLSPAGPAAYSPPGPGPAPPAAMALRNDLGSNINVLKTLNLRFRCFLAKVHELERRNRLLEKQLQQALEEGKQGRRGLGRRDQAVQTGFVSPIRPLGLQLGARPAAVCSPSARVLGSPARSPAGPLAPSAASLSSSSTSTSTTYSSSARFMPGTIWSFSHARRLGPGLEPTLVQGPGLSWVHPDGVGVQIDTITPEIRALYNVLAKVKRERDEYKRRWEEEYTVRIQLQDRVNELQEEAQEADACQEELALKVEQLKAELVVFKGLMSNNLSELDTKIQEKAMKVDMDICRRIDITAKLCDVAQQRNCEDMIQMFQKKLVPSMGGRKRERKAAVEEDTSLSESEGPRQPDGDEEESTALSINEEMQRMLNQLREYDFEDDCDSLTWEETEETLLLWEDFSGYAMAAAEAQGEQEDSLEKVIKDTESLFKTREKEYQETIDQIELELATAKNDMNRHLHEYMEMCSMKRGLDVQMETCRRLITQSGDRKSPAFTAVPLSDPPPPPSEAEDSDRDVSSDSSMR

SEQ ID NO: 5645 - protein, 804 aa, Homo sapiens
MNYQQQLANSAAIRAEIQRFESVHPNIYSIYELLERVEEPVLQNQIREHVIAIEDAFVNSQEWTLSRSVPELKVGIVGNLASGKSALVHRYLTGTYVQEESPEGGRFKKEIVVDGQSYLLLIRDEGGPPEAQFAMWVDAVIFVFSLEDEISFQTVYHYYSRMANYRNTSEIPLVLVGTQDAISSANPRVIDDARARKLSNDLKRCTYYETCATYGLNVERVFQDVAQKIVATRKKQQLSIGPCKSLPNSPSHSSVCSAQVSAVHISQTSNGGGSLSDYSSSVPSTPSTSQKELRIDVPPTANTPTPVRKQSKRRSNLFTSRKGSDPDKEKKGLESRADSIGSGRAIPIKQGMLLKRSGKSLNKEWKKKYVTLCDNGVLTYHPSLHDYMQNVHGKEIDLLRTTVKVPGKRPPRATSACAPISSPKTNGLSKDMSSLHISPNSDTGLGDSVCSSPSISSTTSPKLDPPPSPHANRKKHRRKKSTSNFKADGLSGTAEEQEENFEFIIVSLTGQTWHFEATTYEERDAWVQAIESQILASLQSCESSKNKSRLTSQSEAMALQSIRNMRGNSHCVDCETQNPNWASLNLGALMCIECSGIHRNLGTHLSRVRSLDLDDWPVELIKVMSSIGNELANSVWEESSQGRTKPSVDSTREEKERWIRAKYEQKLFLAPLPCTELSLGQHLLRATADEDLRTAILLLAHGSRDEVNETCGEGDGRTALHLACRKGNVVLAQLLIWYGVDVTARDAHGNTALAYARQASSQECIDVLLQYGCPDERFVLMATPNLSRRNNNRNNSSGRVPTII

SEQ ID NO: 5646 - protein, 903 aa, Homo sapiens
MPEQFSVAEFLAVTAEDLSSPAGAAAFAAKMPRYRGAALAREEILEGDQAILQRIKKAVRAIHSSGLGHVENEEQYREAVESLGNSHLSQNSHELSTGFLNLAVFTREVAALFKNLIQNLNNIVSFPLDSLMKGQLRDGRQDSKKQLEKAWKDYEAKMAKLEKERDRARVTGGIPGEVAQDMQRERRIFQLHMCEYLLKAGESQMKQGPDFLQSLIKFFHAQHNFFQDGWKAAQSLFPFIEKLAASVHALHQAQEDELQKLTQLRDSLRGTLQLESREEHLSRKNSGCGYSIHQHQGNKQFGTEKVGFLYKKSDGIRRVWQKRKCGVKYGCLTISHSTINRPPVKLTLLTCQVRPNPEEKKCFDLVTHNRTYHFQAEDEHECEAWVSVLQNSKDEALSSAFLGEPSAGPGSWGSAGHDGEPHDLTKLLIAEVKSRPGNSQCCDCGAADPTWLSTNLGVLTCIQCSGVHRELGVRFSRMQSLTLDLLGPSELLLALNMGNTSFNEVMEAQLPSHGGPKPSAESDMGTRRDYIMAKYVEHRFARRCTPEPQRLWTAICNRDLLSVLEAFANGQDFGQPLPGPDAQAPEELVLHLAVKVANQASLPLVDFIIQNGGHLDAKAADGNTALHYAALYNQPDCLKLLLKGRALVGTVNEAGETALDIARKKHHKECEELLEQAQAGTFAFPLHVDYSWVISTEPGSDSEEDEEEKRCLLKLPAQAHWASGRLDISNKTYETVASLGAATPQGESEDCPPPLPVKNSSRTLVQGCARHASGDRSEVSSLSSEAPETPESLGSPASSSSLMSPLEPGDPSQAPPNSEEGLREPPGTSRPSLTSGTTPSEMYLPVRFSSESTRSYRRGARSPEDGPSARQPLPRRNVPVGITEGDGSRTGSLPASSVQLLQD

SEQ ID NO: 5647 - protein, 452 aa, Homo sapiens
MMKRQLHRMRQLAQTGSLGRTPETAEFLGEDLLQVEQRLEPAKRAAHNIHKRLQACLQGQSGADMDKRVKKLPLMALSTTMAESFKELDPDSSMGKALEMSCAIQNQLARILAEFEMTLERDVLQPLSRLSEEELPAILKHKKSLQKLVSDWNTLKSRLSQATKNSGSSQGLGGSPGSHSHTTMANKVETLKEEEEELKRKVEQCRDEYLADLYHFVTKEDSYANYFIRLLEIQADYHRRSLSSLDTALAELRENHGQADHSPSMTATHFPRVYGVSLATHLQELGREIALPIEACVMMLLSEGMKEEGLFRLAAGASVLKRLKQTMASDPHSLEEFCSDPHAVAGALKSYLRELPEPLMTFDLYDDWMRAASLKEPGARLQALQEVCSRLPPENLSNLRYLMKFLARLAEEQEVNKMTPSNIAIVLGPNLLWPPEKEGTEPARELGSQTLC

SEQ ID NO: 5648 - protein, 378 aa, Homo sapiens
MNNSGADEIGKLFVGGLDWSTTQETLRSYFSQYGEVVDCVIMKDKTTNQSRGFGFVKFKDPNCVGTVLASRPHTLDGRNIDPKPCTPRGMQPERTRPKEGWQKGPRSDNSKSNKIFVGGIPHNCGETELREYFKKFGVVTEVVMIYDAEKQRPRGFGFITFEDEQSVDQAVNMHFHDIMGKKVEVKRAEPRDSKSQAPGQPGASQWGSRVVPNAANGWAGQPPPTWQQGYGPQGMWVPAGQAIGGYGPPPAGRGAPPPPPPFTSYIVSTPPGGFPPPQGFPQGYGAPPQFSFGYGPPPPPPDQFAPPGVPPPPATPGAAPLAFPPPPSQAAPDMSKPPTAQPDFPYGQYGLGSYSPAPPGCGPHFVYSLMVRLSSDVA

SEQ ID NO: 5649 - protein, 808 aa, Homo sapiens
MEVLREKVEEEEEAEREEAAEWAEWARMEKMMRPVEVRKEEITLKQETLRDLEKKLSEIQITVSAELPAFTKDTIDISKLPISYKTNTPKEEHLLQVADNFSRQYSHLCPDRVPLFLHPLNECEVPKFVSTTLRPTLMPYPELYNWDSCAQFVSDFLTMVPLPDPLKPTIKKEEKVLPKKYTIKPPRDLCSRFEQEQEVKKQQEIRAQEKKRLREEEERLMEAEKAKPDALHGLRVHSWVLVLSGKREVPENFFIDPFTGHSYSTQDEHFLGIESLWNHKNYWINMQDCWNCCKDLIFDLGDPVRWEYMLLGTDKSQLSLTEEDDSGINDEDDVENLGKEDEDKSFDMPHSWVEQIEISPEAFETRCPNGKKVIQYKRAKLEKWAPYLNSNGLVSRLTTYEDLQCTNILEIKEWYQNREDMLELKHINKTTDLKTDYFKPGHPQALRVHSYKSMQPEMDRVIEFYETARVDGLMKREETAAMTEYYQGRPDFLSYRHASFGPRVKKLTLSSAESNPRPIVKITERFFRNPAKPAEEDVAERVFLVAEERIQLRYHCREDHITASKREFLRRTEVDSKGNKIIMTPDMCISFEVEPMEHTKKLLYQYEAMMHLKREEKLSRHQVWESELEVLEILKLREEEEAAHTLTISIYDTKRNEKSKEYREAMERMMHEEHLRQVETQLDYLAPFLAQLPPGEKLTCWQAVRLKDECLSDFKQRLINKANLIQARFEKETQELQKKQQWYQENQVTLTPEDEDLYLSYCSQAMFRIRILEQRLNRHKELAPLKYLALEEKLYKDPRLGELQKIFA

SEQ ID NO: 5650 - protein, 275 aa, Homo sapiens
MWPLTALLLLVPSSGQAATLEKPILSLHPPWTTIFKGERVTLKCDGYHPLLLELQPISTLWYLGHLLLPSHKKSIEVQTPGVYRCQTRGAPVSDPIHLSVSNDWLILQVPYAPVFEGEPLVLRCRGWYDKVVYKLHYYHDGQAVRYFHSSANYTVLQARASDSGRYQCSGTMRIPVESAPMFSAKVAVTVQEARHAAAVRVLQVQPRGAPLRLGRRVHSPGARGRGARIVLVRGGYRHPQCPETQSVAAAPGAGFSPGPGLHHRPSSMGRSLGSW

SEQ ID NO: 5651 - protein, 218 aa, Homo sapiens
MNCRSEVLEVSVEGRQVEEAMLAVLHTVLLHRSTGKFHYKKEGTYSIGTVGTQDVDCDFIDFTYVRVSSEELDRALRKVVGEFKDALRNSGGDGLGQMSLEFYQKKKSRWPFSDECIPWEVWTVKVHVVALATEQERQICREKVGEKLCEKIINIVEVMNRHEYLPKMPTQSEVDNVFDTGLRDVQPYLYKISFQITDALGTSVTTTMRRLIKDTLAL

SEQ ID NO: 5652 - protein, 183 aa, Homo sapiens
MMQICDTYNQKHSLFNAMNRFIGAVNNMDQTVMVPSLLRDVPLADPGLDNDVGVEVGGSGGCLEERTPPVPDSGSANGSFFAPSRDMYSHYVLLKSIRNDIEWGVLHQPPPPAGSEEGSAWKSKDILVDLGHLEGADAGEEDLEQQFHYHLRGLHTVLSKLTRKANILTNRYKQEIGFGNWGH

SEQ ID NO: 5653 - protein, 122 aa, Homo sapiens
MLFAPCCHQCGEFIIGRVIKAMNNSWHPECFRCDLCQEVLADIGFVKNAGRHLCRPCHNREKARGLGKYICQKCHAIIDEQPLIFKNDPYHPDHFNCANCGQEGSDCRCTGAERGAILPAMP

SEQ ID NO: 5654 - protein, 360 aa, Homo sapiens
MDSELMHSIVGSYHKPPERVFVPSFTQNEPSQNCHPANLEVTSPKILHSPNSQEKQLEYTKRMVLNVEREKNMILEQQAQLQREKEQDQMKLYAKLEKLDVLEKECFRLTTTQKTAEDKIKHLEEKLKEEEHQRKLFQDKASELQTGLEISKIIMSSVSNLKHSKEKKKSSKKTKCIKRRPPWQICSKFGALPFVAEKPSRTTSWCKAIPPDSEKSISICDNLSELLMAMQDELDQMSMEHQELLKQMKETESHSVCDDIECELECLLKKMEIKGEQISKLKKHQDSVCKLQQKVQNSKMSEASGIQQEDSYPKGSKNIKNSPRKCLTDTNLFQKNSSFHPIRVHNLQMKLRRDDIMWEQ

SEQ ID NO: 5655 - protein, 585 aa, Homo sapiens
MSGSTPFQMRLVHLDLKGAPPKVSYLSEIFPLFRALGANGLLIEYEDMFPYEGPLRLLRAKYAYSPSEIKEILHLAGLNELEVIPLVQTFGHMEFVLKHTAFAHLREVGSFPCTLNPHEAESLALVGAMIDQVLELHPGAQRLHIGCDEVYYLGEGEASRRWLQQEQNSTGKLCLSHMRAVASGVKARRPSVTPLVWDDMLRDLPEDQLAASGVPQLVEPVLWDYTADLDVHGKVLLMQKYRRCGFPQLWAASAFKGATGPSQAVPPVEHHLRNHVQWLQVAGSGPTDSLQGIILTGWQRYDHYSVLCELLPAGVPSLAACLQLLLRGGFDEDVKAKVENLLGISSLEKTDPVRQAPCSPPCPLLPLPFPRPWRQLFSAGLSAGRGPAPSLAATSLPLSHKSASICAALWMRCWRATGMSLAGSAPTTASGSSSTRSWFSTSSPQRSASWHSGAPSCRSWRLPCSWLSTRMPWRSGWRKTCTPACSGCKLCCRTSARCLPPRCHPPALAGTLLRTPEGRAHARGLLLEAGGALHCQMAWAIRAHVGVVPSGPAVSCPHSVPEGPGQPLGERLENTEGSSTGRPAL

SEQ ID NO: 5656 - protein, 703 aa, Homo sapiens
MEALLEGIQNRGHGGGFLTSCEAELQELMKQIDIMVAHKKSEWEGRTHALETCLKIREQELKSLRSQLDVTHKEVGMLHQQVEEHEKIKQEMTMEYKQELKKLHEELCILKRSYEKLQKKQMREFRGNTKNHREDRSEIERLTAKIEEFRQKSLDWEKQRLIYQQQVSSLEAQRKALAEQSEIIQAQLVNRKQKLESVELSSQSEIQHLSSKLERANDTICANELEIERLTMRVNDLVGTSMTVLQEQQQKEEKLRESEKLLEALQEEKRELKAALQSQENLIHEARIQKEKLQEKVKATNTQHAVEAIRPREESLAEKKYTSQGQGDLDSVLSQLNFTHTSEDLLQAEVTCLEGSLESVSATCKQLSQELMEKYEELKRMEAHNNEYKAEIKKLKEQILQGEQSYSSALEGMKMEISHLTQELHQRDITIASTKGSSSDMEKRLRAEMQKAEDKAVEHKEILDQLESLKLENRHLSEMVMKLELGLHEAKEISLADLQENYIEALNKLVSENQQLQKDLMNTKSQLEISTQMCKKQNDRIFKPTHSRTTEFKNTEFKPTHGQHRHDGIKTEHYKTDLHSPRGQASDSINPMSRVLSPLSPQISPCSSTRSLTSYSLCKTHSLPSALDTNEANFSDTMSESMNDQEEFISSCSLPVSPLGSIATRFLEEEELRSHHILERLDAHIEELKRESEKTVRQFTALK

SEQ ID NO: 5657 - protein, 541 aa, Homo sapiens
MSSCVSSQPSSNRAAPQDELGGRGSSSSESQKPCEALRGLSSLSIHLGMESFIVVTECEPGCAVDLGLARDRPLEADGQEVPLDTSGSQARPHLSGRKLSLQERSQGGLAAGGSLDMNGRCICPSLPYSPVSSPQSSPRLPRRPTVESHHVSITGMQDCVQLNQYTLKDEIGKGSYGVVKLAYNENDNTYYAMKVLSKKKLIRQAGFPRRPPPRGTRPAPGGCIQPRGPIEQVYQEIAILKKLDHPNVVKLVEVLDDPNEDHLYMVFELVNQGPVMEVPTLKPLSEDQARFYFQDLIKGIEYLHYQKIIHRDIKPSNLLVGEDGHIKIADFGVSNEFKGSDALLSNTVGTPAFMAPESLSETRKIFSGKALDVWAMGVTLYCFVFGQCPFMDERIMCLHSKIKSQALEFPDQPDIAEDLKDLITRMLDKNPESRIVVPEIKLHPWVTRHGAEPLPSEDENCTLVEVTEEEVENSVKHIPSLATVILVKTMIRKRSFGNPFEGSRREERSLSAPGNLLTKQGSEDNLQGTDPPPVGEEEVLL

SEQ ID NO: 5658 - protein, 820 aa, Homo sapiens
MTDTRRRVKVYTLNEDRQWDDRGTGHVSSGYVERLKGMSLLVRAESDGSLLLESKINPNTAYQKQQDTLIVWSEAENYDLALSFQEKAGCDEIWEKICQVQGKDPSVDITQDLVDESEEERFDDMSSPGLELPSCELSRLEEIAELVASSLPSPLRREKLALALENEGYIKKLLELFHVCEDLENIEGLHHLYEIIKGIFLLNRTALFEVMFSEECIMDVIGCLEYDPALSQPRKHREFLTKTAKFKEVIPISDPELKQKIHQTYRVQYIQDMVLPTPSVFEENMLSTLHSFIFFNKVEIVGMLQEDEKFLTDLFAQLTDEATDEEKRQELVNFLKEFCAFSQTLQPQNRDAFFKTLSNMGILPALEVILGMDDTQVRSAATDIFSYLVEYNPSMVREFVMQEAQQNDDDILLINLIIEHMICDTDPELGGAVQLMGLLRTLVDPENMLATANKTEKTEFLGFFYKHCMHVLTAPLLANTTEDKPSKDDFQTAQLLALVLELLTFCVEHHTYHIKNYIINKDILRRVLVLMASKHAFLALCALRFKRKIIGLKDEFYNRYIMKSFLFEPVVKAFLNNGSRYNLMNSAIIEMFEFIRVEDIKSLTAHVIENYWKALEDVDYVQTFKGLKLRFEQQRERQDNPKLDSMRSILRNHRYRRDARTLEDEEEMWFNTDEDDMEDGEAVVSPSDKTKNDDDIMDPISKFMERKKLKESEEKEVLLKTNLSGRQSPSFKLSLSSGTKTNLTSQSSTTNLPGSPGSPGSPGSPGSPGSVPKNTSQTAAITTKGGLVGLVDYPDDDEDDDEDEDKEDTLPLSKKAKFDS

SEQ ID NO: 5659 - protein, 793 aa, Homo sapiens
MSEQGDLNQAIAEEGGTEQETATPENGIVKSESLDEEEKLELQRRLEAQNQERRKSKSGAGKGKLTRSLAVCEESSARPGGESLQDQESIHLQLSSFSSLQEEDKSRKDDSEREKEKDKNKDKTSEKPKIRMLSKDCSQEYTDSTGIDLHEFLINTLKNNSRDRMILLKMEQEIIDFIADNNNHYKKFPQMSSYQRMLVHRVAAYFGLDHNVDQTGKSVIINKTSSTRIPEQRFCEHLKDEKGEESQKRFILKRDNSSIDKEDNQSVCSQESLFVENRGNRDGSGRTSGSRQSSSENELKWSDHQRAWSSTDSDSSNRNLKPAMTKTASFGGITVLTRGDSTSSTRSTGKLSKAGSESSSSAGSSGSLSRTHPPLQSTPLVSGVAAGSPGCVPYPENGIGGQVAPSSTSYILLPLEAATGIPPGSILLNPHTGQPFVNPDGTPAIYNPPTSQQPLRSAMVGQSQQQPPQQQPSPQPQQQVQPPQPQMAGPLVTQSVQGLQASSQSVQYPAVSFPPQHLLPVSPTQHFPMRDDVATQFGQMTLSRQSSGETPEPPSGPVYPSSLMPQPAQQPSYVIASTGQQLPTGGFSGSGPPISQQVLQPPPSPQGFVQQPPPAQMPVYYYPSGQYPTSTTQQYRPMAPVQYNAQRSQQMPQAAQQAGYQPVLSGQQGFQGLIGVQQPPQSQNVINNQQGTPVQSVMVSYPTMSSYQVPMTQGSQGLPQQSYQQPIMLPNQAGQGSLPATGMPVYCNVTPPTPQNNLRLIGPHCPSSTVPVMSASCRTNCASMSNAGWQVKF

SEQ ID NO: 5660 - protein, 488 aa, Homo sapiens
MRFHWLPTLSEPFDRNQELETCIRPLWTPSGSACETEHNKSMDMGNQHPSISRLQEIQKEVKSVEQQVIGFSGLSDDKNYKKLERILTKQLFEIDSVDTEGKGDIQQARKRAAQETERLLKELEQNANHPHRIEIQNIFEEAQSLVREKIVPFYNGGNCVTDEFEEGIQDIILRLTHVKTGGKISLRKARYHTLTKICAVQEIIEDCMKKQPSLPLSEDAHPSVAKINFVMCEVNKARGVLIALLMGVNNNETCRHLSCVLSGLIADLDALDVCGRTEIRNYRREVVEDINKLLKYLDLEEEADTTKAFDLRQNHSILKIEKVLKRMREIKNELLQAQNPSELYLSSKTELQGLIGQLDEVSLEKNPCIREARRRAVIEVQTLITYIDLKEALEKRKLFACEEHPSHKAVWNVLGNLSEIQGEVLSFDGNRTDKNYIRLEELLTKQLLALDAVDPQGEEKCKAARKQAVRLAQNILSYLDLKSDEWEY

SEQ ID NO: 5661 - protein, 325 aa, Homo sapiens
MGKMVSVINTVDTSHEDMIHDAQMDYYGTRLATCSSDRSVKIFDVRNGGQILIADLRGHEGPVWQVAWAHPMYGNILASCSYDRKVIIWREENGTWEKSHEHAGHDSSVNSVCWAPHDYGLILACGSSDGAISLLTYTGEGQWEVKKINNAHTIGCNAVSWAPAVVPGSLIDHPSGQKPNYIKRFASGGCDNLIKLWKEEEDGQWKEEQKLEAHSDWVRDVAWAPSIGLPTSTIASCSQDGRVFIWTCDDASSNTWSPKLLHKFNDVVWHVSWSITANILAVSGGDNKVTLWKESVDGQWVCISDVNKGQGSVSASVTEGQQNEQ

SEQ ID NO: 5662 - protein, 281 aa, Homo sapiens
MLFIFPLSLPWRPSCWKESCSTGQRQAGRSREDSVTPPPSSPWPTPPAGAMSTKQEARRDEGEARTRGQEAQLRDRAHLSQQRRLKQATQFLHKDSADLLPLDSLKRLGTSKDLQPRSVIQRRLVEGNPNWLQGEPPRMQDLIHGQESRRKTSRTEIPALLVNCKCQDQLLRVAVDTGTQYNRISAGCLSRLGLEKRVLKASAGDLAPGPPTQVEQLELQLGQETVVCSAQVVDAESPEFCLGLQTLLSLKCCIDLEHGVLRLKAPFSELPFLPLYQEPGQ

SEQ ID NO: 5663 - protein, 510 aa, Homo sapiens
TGGGVAPAGQVRTATWARRARPYRKMAARTGTELASAASTTAPGSSKRRKRHPWHTVSRRPGRTPKWRLPRISARAPYRLRRLRRHTYWPPRRPVAASRCWPVGATPLGSVGGRTGKMDAATLTYDTLRFAEFEDFPETSEPVWILGRKYSIFTEKDEILSDVASRLWFTYRKNFPAIGGTGPTSDTGWGCMLRCGQMIFAQALVCRHLGRDWRWTQRKRQPDSYFSVLNAFIDRKDSYYSIHQIAQMGVGEGKSIGQWYGPNTVAQVLKKLAVFDTWSSLAVHIAMDNTVVMEEIRRLCRTSVPCAGATAFPADSDRHCNGFPAGAEVTNRPSPWRPLVLLIPLRLGLTDINEAYVETLKHCFMMPQSLGVIGGKPNSAHYFIGYVGEELIYLDPHTTQPAVEPTDGCFIPDESFHCQHPPCRMSIAELDPSIAVGFFCKTEDDFNDWCQQVKKLSLLGGALPMFELVELQPSHLACPDVLNLSLDSSDVERLERFFDSEDEDFEILSL

SEQ ID NO: 5664 - protein, 183 aa, Homo sapiens
MASNKTTLQKMGKKQNGKSKKVEEAEPEEFVVEKVLDRRVVNGKVEYFLKWKGFTDADNTWEPEENLDCPELIEAFLNSQKAGKEKDGTKRKSLSDSESDDSKSKKKRDAADKPRGFARGLDPERIIGATDSSGELMFLMKWKDSDEADLVLAKEANMKCPQIVIAFYEERLTWHSCPEDEAQ

SEQ ID NO: 5665 - protein, 487 aa, Homo sapiens
MERSGQRVTTWDCDQGKHSDSDYREDGMDLGSDAGSSSSSSRASSQSNSTKVTPCSECKSSSSPGGSLDLVSALEDYEEPFPVYQKKVIDEWAPEEDGEEEEEEDERDQRGYRDDRSPAREPGDVSARTRSGGGGGRSATTAMPPPVPNGNLHQHDPQDLRHNGNVVVAGRPSCSRGPRRAIQKPQPAGGRRSGRGPAAGGLCLQPPDGGTCVPEEPPVPPMDWEALEKHLAGLQFREQEVRNQGQARTNSTSAQKNERESIRQKLALGSFFDDGPGIYTSCSKSGKPSLSSRLQSGMNLQICFVNDSGSDKDSDADDSKTETSLDTPLSPMSKQSSSYSDRDTTEEESESLDDMDFLTRQKKLQAEAKMALAMAKPMAKMQVEVEKQNRKKSPVADLLPHMPHISECLMKRSLKPTDLRDMTIGQLQVIVNDLHSQIESLNEELVQLLLIRDELHTEQDAMLVDIEDLTRHAESQQKHMAEKMPAK

SEQ ID NO: 5666 - protein, 308 aa, Homo sapiens
MKRAHPEYSSSDSELDETIEVEKESADENGNLSSALGSMSPTTSSQILARKRRRGIIEKRRRDRINNSLSELRRLVPSAFEKQVMEQGSAKLEKAEILQMTVDHLKMLHTAGGKGYFDAHALAMDYRSLGFRECLAEVARYLSIIEGLDASDPLRVRLVSHLNNYASQREAASGAHAGLGHIPWGTVFGHHPHIAHPLLLPQNGHGNAGTTASPTEPHHQGRLGSAHPEAPALRAPPSGSLGPVLPVVTSASKLSPPLLSSVASLSAFPFSFGSFHLLSPNALSPSAPTQAANLGKPYRPWGTEIGAF

SEQ ID NO: 5667 - protein, 445 aa, Homo sapiens
MSVTYDDSVGVEVSSDSFWEVGNYKRTVKRIDDGHRLCSDLMNCLHERARIEKAYAQQLTEWARRWRQLVEKGPQYGTVEKAWMAFMSEAERVSELHLEVKASLMNDDFEKIKNWQKEAFHKQMMGGFKETKEAEDGFRKAQKPWAKKLKEVEAAKKAHHAACKEEKLAISREANSKADPSLNPEQLKKLQDKIEKCKQDVLKTKEKYEKSLKELDQGTPQYMENMEQVFEQCQQFEEKRLRFFREVLLEVQKHLDLSNVAGYKAIYHDLEQSIRAADAVEDLRWFRANHGPGMAMNWPQFEEWSADLNRTLSRREKKKATDGVTLTGINQTGDQSLPSKPSSVSSYEKTQSYPTDWSDDESNNPFSSTDANGDSNPFDDDATSGTEVRVRALYDYEGQEHDELSFKAGDELTKMEDEDEQGWCKGRLDNGQVGLYPANYVEAIQ

SEQ ID NO: 5668 - protein, 415 aa, Homo sapiens
MMLGPEGGEGFVVKLRGLPWSCSVEDVQNFLSDCTIHDGAAGVHFIYTREGRQSGEAFVELGSEDDVKMALKKDRESMGHRYIEVFKSHRTEMDWVLKHSGPNSADSANDGFVRLRGLPFGCTKEEIVQFFSGLEIVPNGITLPVDPEGKITGEAFVQFASQELAEKALGKHKERIGHRYIEVFKSSQEEVRSYSDPPLKFMSVQRPGPYDRPGTARRYIGIVKQAGLERMRPGAYSTGYGGYEEYSGLSDGYGFTTDLFGRDLSYCLSGMYDHRYGDSEFTVQSTTGHCVHMRGLPYKATENDIYNFFSPLNPVRVHIEIGPDGRVTGEADVEFATHEEAVAAMSKDRANMQHRYIELFLNSTTGASNGAYSSQVMQGMGVSAAQATYSGLESQSVSGCYGAGYSGQNSMGGYD

SEQ ID NO: 5669 - protein, 589 aa, Homo sapiens
MSVSVHETRKSRSSTGSMNVTLFHKASHPDCVLAHLNTLRKHCMFTDVTLWAGDRAFPCHRAVLAASSRYFEAMFSHGLRESRDDTVNFQDNLHPEVLELLLDFAYSSRIAINEENAESLLEAGDMLQFHDVRDAAAEFLEKNLFPSNCLGMMLLSDAHQCRRLYEFSWRMCLVHFETVRQSEDFNSLSKDTLLDLISSDELETEDERVVFEAILQWVKHDLEPRKVHLPELLRSVRLALLPSDCLQEAVSSEALLMADERTKLIMDEALRCKTRILQNDGVVTSPCARPRKAGHTLLILGGQTFMCDKIYQVDHKAKEIIPKADLPSPRKEFSASAIGCKVYVTGGRGSENGVSKDVWVYDTVHEEWSKAAPMLIARFGHGSAELENCLYVVGGHTSLAGVFPASPSVSLKQVEKYDPGANKWMMVAPLRDGVSNAAVVSAKLKLFVFGGTSIHRDMVSKVQCYDPSENRWTIKAECPQPWRYTAAAVLGSQIFIMGGDTEFTAASAYRFDCETNQWTRIGDMTAKRMSCHALASGNKLYVVGGYFGTQRCKTLDCYDPTSDTWNCITTVPYSLIPTAFVSTWKHLPA

SEQ ID NO: 5670 - protein, 436 aa, Homo sapiens
MMGEAAVAAGPCPLREDSFTRFSSQSNVYGLAGGAGGRGELLAATLKGKVLGFRYQDLRQKIRPVAKELQFNYIPVDAEIVSIDTFNKSPPKRGLVVGITFIKDSGDKGSPFLNIYCDYEPGSEYNLDSIAQSCLNLELQFTPFQLCHAEVQVGDQLETVFLLSGNDPAIHLYKENEGLHQFEEQPVENLFPELTNLTSSVLWLDVHNFPGTSRRLSALGCQSGYVRVAHVDQRSREVLQMWSVLQDGPISRVIVFSLSAAKETKDRPLQDEYSVLVASMLEPAVVYRDLLNRGLEDQLLLPGSDQFDSVLCSLVTDVDLDGRPEVLVATYGQELLCYKYRGPESGLPEAQHGFHLLWQRSFSSPLLAMAHVDLTGDGLQELAVVSLKGVHILQHSLIQASELVLTRLRHQVEQRRRRLQGLEDGAGAGPAENAAS

SEQ ID NO: 5671 - protein, 213 aa, Homo sapiens
MLLPFIRTLPLLCYNHLLVSPDSATLSPPYSLEKMTDLVAVWDVALSDGVHKIEFEHGTTSGKRVVYVDGKEEIRKEWMFKLVGKETFYVGAAKTKATINIDAISGFAYEYTLEINGKSLKKYMEDRSKTTNTWVLHMDGENFRIVLEKDAMDVWCNGKKLETAGEFVDDGTETHFSIGNHDCYIKAVSSGKRKEGIIHTLIVDNREIPEIAS

SEQ ID NO: 5672 - protein, 220 aa, Homo sapiens
MTSGEVKTSLKNAYSSAKRLSPKMEEEGEEEDYCTPGAFELERLFWKGSPQYTHVNEVWPKLYIGDEATALDRYRLQKAGFTHVLNAAHGRWNVDTGPDYYRDMDIQYHGVEADDLPTFDLSVFFYPAAAFIDRALSDDHSKILVHCVMGRSRSATLVLAYLMIHKDMTLVDAIQQVAKNRCVLPNRGFLKQLRELDKQLVQQRRRSQRQDGEEEDGREL

SEQ ID NO: 5673 - protein, 614 aa, Homo sapiens
MSPADRCRSANTIEPATTSSLALFLLLQRDQSSRTRGLPEEKEEVTMDTSENRPENDVPEPPMPIADQVSNDDRPEGSVEDEEKKESSLPKSFKRKISVVSATKGVPAGNSDTEGGQPGRKRRWGASTATTQKKPSISITTESLKSLIPDIKPLAGQEAVVDLHADDSRISEDETERNGDDGTHDKGLKICRTVTQVVPAEGQENGQREEEEEEKEPEAEPPVPPQVSVEVALPPPAEHEVKKVTLGDTLTRRSISQQKSGVSITIDDPVRTAQVPSPPRGKISNIVHISNLVRPFTLGQLKELLGRTGTLVEEAFWIDKIKSHCFVTYSTVEEAVATRTALHGVKWPQSNPKFLCADYAEQDELDYHRGLLVDRPSETKTEEQGIPRPLHPPPPPPVQPPQHPRAEQREQERAVREQWAEREREMERRERTRSEREWDRDKVREGPRSRSRSRDRRRKERAKSKEKKSEKKEKAQEEPPAKLLDDLFRKTKAAPCIYWLPLTDSQIVQKEAERAERAKEREKRRKEQEEEEQKEREKEAERERNRQLEREKRREHSRERDRERERERERDRGDRDRDRERDRERGRERDRRDTKRHSRSRSRSTPVRDRGGRR

SEQ ID NO: 5674 - protein, 400 aa, Homo sapiens
MKNEPLTPGYHGFPARDSQGNQEPTTTPDAMVQPFTTIPFPPPPQNGIPTEYGVPHTQDYAGQTGEHNLTLYGSTQAHGEQSSNSPSTQNGSLTTEGGAQTDGQQSQTQSSENSESKSTPKRLHVSNIPFRFRDPDLRQMFGQFGKILDVEIIFNERGSKGFGFVTFENSADADRAREKLHGTVVEGRKIEVNNATARVMTNKKMVTPYANGWKLSPVVGAVYGPELYAASSFQADVSLGNDAAVPLSGRGGINTYIPLIIPGFPYPTAATTAAAFRGAHLRGRGRTVYGAVRAVPPTAIPAYPGVVYQDGFYGADLYIESANCFRSNRVDMQPTDMHSLLLQPQPPLLQPLQPLTVTVMAGCTQPTPTMPLPLPLAMELALWRVYTEVATADLPPTEVT

SEQ ID NO: 5675 - protein, 514 aa, Homo sapiens
MDEGMEISSEGNSLIKAVHQSRLRLTRLLLEGGAYINESNDRGETPLMIACKTKHVDHQSVSKAKMVKYLLENNADPNIQDKSGKTALMHACLEKAGPEVVSLLLKSGADLSLQDHSSYSALVYAINSEDTETLKVLLSACKAKGKEVIIITTAKLPCGKHTTKQYLNMPPVDIDGCHSPATCTTPSEIDIKTASSPLSHSSETELTLFGFKDLELAGSNDDTWDPGSPVRKPALAPKGPKLPHAPPWVKSPPLLMHQNRVASLQEELQDITPEEELSYKTNGLALSKRFITRHQSIDVKDTAHLLRAFDQASSRKMSYDEINCQSYLSEGNQQCIEVPVDQDPDSNQTIFASTLRSIVQKRNLGANHYSSDSQLSAGLTPPTSEDGKALIGKKKILSPSPSQLSESKELLENIPPGPLSRRNHAVLERRGSGAFPLDHSVTQTRQGFLPPLNVNSHPPISDINVNNKICSLLSCGQKVLMPTVPIFPKEFKSKKMLLRRQSLQTEQIKQLVNF

SEQ ID NO: 5676 - protein, 557 aa, Homo sapiens
MDQSRVLLWVKAEPFIVGALQVPPPSKFSLHYLRKISTYVQIRATEGAYPRLYWSTWRHIACGKLQLAKDLAWLYFEIFDSLSMKTPEERLEWSEVLSNCMSEEEVEKQRNQLSVDTLQFLLFLYIQQLNKVSLRTSLIGEEWPSPRNKSQSPDLTEKSNCHNKNWNDYSHQAFVYDHLSDLLELLLDPKQLTASFHSTHSSLVSREAVVALSFLIEGTISRARKIYPLHELALWQPLHADSGFSKISKTFSFYKLETWLRSCLTGNPFGTSACLKSGKKLAWAHQVEGTTKRAKIACNTHVAPRMHRLVVMSQVYKQTLAKSSDTLAGAHVKIHRCNESFIYLLSPLRSVTIEKCRNSIFVLGPVGTTLHLHSCDNVKVIAVCHRLSISSTTGCIFHVLTPTRPLILSGNQTVTFAPFHTHYPMLEDHMARTGLATVPNYWDNPMVVCRENSDTRVFQLLPPCEFYVFIIPFEMEGDTTEIPGGLPSVYQKALGQREQKIQIWQKTVKEAHLTKDQRKQFQVLVENKFYEWLINTGHRQQLDSLVPPAAGSKQAAG

SEQ ID NO: 5677 - protein, 215 aa, Homo sapiens [sequence omitted]

SEQ ID NO: 5678 - protein, 295 aa, Homo sapiens
MELIQDTSRPPLEYVKGVPLIKYFAEALGPLQSFQARPDDLLINTYPKSGTTWVSQILDMIYQGGDLEKCNRAPIYVRVPFLEVNDPGEPSGLETLKDTPPPRLIKSHLPLALLPQTLLDQKVKVVYVARNPKDVAVSYYHFHRMEKAHPEPGTWDSFLEKFMAGEVSYGSWYQHVQEWWELSRTHPVLYLFYEDMKENPKREIQKILEFVGRSLPEETMDFMVQHTSFKEMKKNPMTNYTTVPQELMDHSISPFMRKGMAGDWKTTFTVAQNERFDADYAEKMAGCSLSFRSEL

SEQ ID NO: 5679 - protein, 455 aa, Homo sapiens
MSSLGASFVQIKFDDLQFFENCGGGSFGSVYRAKWISQDKEVAVKKLLKIEKEAEILSVLSHRNIIQFYGVILEPPNYGIVTEYASLGSLYDYINSNRSEEMDMDHIMTWATDVAKGMHYLHMEAPVKVIHRDLKSRNVVIAADGVLKICDFGASRFHNHTTHMSLVGTFPWMAPEVIQSLPVSETCDTYSYGVVLWEMLTREVPFKGLEGLQVAWLVVEKNERLTIPSSCPRSFAELLHQCWEADAKKRPSFKQIISILESMSNDTSLPDKCNSFLHNKAEWRCEIEATLERLKKLERDLSFKEQELKERERRLKMWEQKLTEQSNTPLLLPLAARMSEESYFESKTEESNSAEMSCQITATSNGEGHGMNPSLQAMMLMGFGDIFSMNKAGAVMHSGMQINMQAKQNSSKTTSKRRGKKVNMALGFSDFDLSEGDDDDDDDGEEEDNDMDNSE

SEQ ID NO: 5680 - protein, 140 aa, Homo sapiens
MRFRFCGDLDCPDWVLAEISTLAKMSSVKLRLLCSQVLKELLGQGIDYEKILKLTADAKFESGDVKATVAVLSFILSSAAKHSVDGESLSSELQQLGLPKEHAASLCRCYEEKQSPLQKHLRVCSLRKLKQAQTLMSSLG

SEQ ID NO: 5681 - protein, 190 aa, Homo sapiens
MTASASSFSSSQGVQQPSIYSFSQITRSLFLSNGVAANDKLLLSSNRITAIVNASVEVVNVFFEGIQYIKVPVTDARDSRLYDFFDPIADLIHTIDMRQGRTLLHCMAGVSRSASLCLAYLMKYHSMSLLDAHTWTKSRRPIIRPNNGFWEQLINYEFKLFNNNTVRMINSPVGNIPDIYEKDLRMMISM

SEQ ID NO: 5682 - protein, 1191 aa, Homo sapiens
MLRKLTIEQINDWFTIGKTVTNVELLGAPPAFPAGAAREEVQRQDVAPGAGPAAQAPALAQAPARPAAAFERSLSQRSSEVEYINKYRQLEAQELDVCRSVQPTSGPGPRPSLAKLSSVTCIPGTTYKYPDLPISRYKEEVVSLIESNSVVIIHGATGSGKSTQLPQYILDHYVQRSAYCSIVVTQPRKIGASSIARWISKERAWTLGGVVGYQVGLEKIATEDTRLIYMTTGVLLQKIVSAKSLMEFTHIIIDEVHERTEEMDFLLLVVRKLLRTNSRFVKVVLMSATISCKEFADYFAVPVQNKMNPAYIFEVEGKPHSVEEYYLNDLEHIHHSKLSPHLLEEPVITKDIYEVAVSLIQMFDDLDMKESGNKAWSGAQFVLERSSVLVFLPGLGEINYMHELLTSLVHKRLQVYPLHSSVALEEQNNVFLSPVPGYRKIILSTNIAESSVTVPDVKYVIDFCLTRTLVCDEDTNYQSLRLSWASKTSCNQRKGRAGRVSRGYCYRLVHKDFWDNSIPDHVVPEMLRCPLGSTILKVKLLDMGEPRALLATALSPPGLSDIERTILLLKEVGALAVSGQREDENPHDGELTFLGRVLAQLPVNQQLGKLIVLGHVFGCLDECLIIAAALSLKNFFAMPFRQHLDGYRNKVNFSGSSKSDCIALVEAFKTWKACRQTGELRYPKDELNWGRLNYIQIKRIREVAELYEELKTRISQFNMHVDSRRPVMDQEYIYKQRFILQVVLAGAFYPNYFTFGQPDEEMAVRELAGKDPKTTVVLKHIPPYGFLYYKQLQSLFRQCGQVKSIVFDGAKAFVEFSRNPTERFKTLPAVYMAIKMSQLKVSLELSVHSAEEIEGKVQGMNVSKLRNTRVNVDFQKQTVDPMQVSFNTSDRSQTVTDLLLTIDVTEVVEVGHFWGYRIDENNSEILKKLTAEINQLTLVPLPTHPHPDLVCLAPFADFDKQRYFRAQVLYVSGNSAEVFFVDYGNKSHVDLHLLMEIPCQFLELPFQALEFKICKMRPSAKSLVCGKHWSDGASQWFASLVSGCTLLVKVFSVVHSVLHVDVYQYSGVQDAINIRDVLIQQGYAELTEESYESKVNILRAAINKLVCDGPNGCKCLGPERVAQLQDIARQKLLGLFCQSKPREKIVPKWHEKPYEWNQVDPKLVMEQADRESSRGKNTFLYQLHKLVVLGT

SEQ ID NO: 5683 - protein, 301 aa, Homo sapiens
MTRHGKNCTAGAVYTYHEKKKDTAASGYGTQNIRLSRDAVKDFDCCCLSLQPCHDPVVTPDGYLYEREAILEYILHQKKEIARQMKAYEKQRGTRREEQKELQRAASQDHVRGFLEKESAIVSRPLNPFTAKALSGTSPDDVQPGPSVGPPSKDKDKVLPSFWIPSLTPEAKATKLEKPSRTVTCPMSGKPLRMSDLTPVHFTPLDSSVDRVGLITRSERYVCAVTRDSLSNATPCAVLRPSGAVVTLECVEKLIRKDMVDPVTGDKLTDRDIIVLQRGGTGFAGSGVKLQAEKSRPVMQA

SEQ ID NO: 5684 - protein, 502 aa, Homo sapiens
MQSCESSGDSADDPLSRGLRRRGQPRVVVIGAGLAGLAAAKALLEQGFTDVTVLEASSHIGGRVQSVKLGHATFELGATWIHGSHGNPIYHLAEANGLLEETTDGERSVGRISLYSKNGVACYLTNHGRRIPKDVVEEFSDLYNEVYNLTQEFFRHDKPVNAESQNSVGVFTREEVRNRIRNDPDDPEATKRLKLAMIQQYLKVESCESSSHSMDEVSLSAFGEWTEIPGAHHIIPSGFMRVVELLAEGIPAHVIQLGKPVRCIHWDQASARPRGPEIEPRGVLKRQYTSFFRPGLPTEKVAAIHRLGIGTTDKIFLEFEEPFWGPECNSLQFVWEDEAESHTLTYPPELWYRKICGFDVLYPPERYGHVLSGWICGEEALVMEKCDDEAVAEICTEMLRQFTGNPNIPKPRRILRSAWGSNPYFRGSYSYTQVGSSGADVEKLAKPLPYTESSKTAPMQVLFSGEATHRKYYSTTHGALLSGQREAARLIEMYRDLFQQGT

SEQ ID NO: 5685 - protein, 192 aa, Homo sapiens
MGTFDLWTDYLGLAHLVRALSGKEGPETRLSPQPEPEPMLEPVSALEPMPAPESVPVPGPKDQKRSLESSPAPERLCSFCKHNGESRAIYQSHVLKDEAGRVLCPILRDYVCPQCGATRERAHTRRFCPLTGQGYTSVYSHTTRNSAGKKLVRPDKAKTQDTGHRRGGGGGAGFRGAGKSEPSPSCSPSMST

SEQ ID NO: 5686 - protein, 855 aa, Homo sapiens
MAVEDSTLQVVVRVRPPTPRELDSQRRPVVQVVDERVLVFNPEEPDGGFPGLKWGGTHDGPKKKGKDLTFVFDRVFGEAATQQDVFQHTTHSVLDSFLQGYNCSVFAYGATGAGKTHTMLGREGDPGIMYLTTVELYRRLEARQQEKHFEVLISYQEVYNEQIHDLLEPKGPLAIREDPDKGVVVQGLSFHQPASAEQLLEILTRGNRNRTQHPTDANATSSRSHAIFQIFVKQQDRVPGLTQAVQVAKMSLIDLAGSERASSTHAKGERLREGANINRSLLALINVLNALADAKGRKTHVPYRDSKLTRLLKDSLGGNCRTVMIAAISPSSLTYEDTYNTLKYADRAKEIRLSLKSNVTSLDCHISQYATICQQLQAEVAALRKKLQVYEGGGQPPPQDLPGSPKSGPPPEHLPSSPLPPHPPSQPCTPELPAGPRALQEESLGMEAQVERAMEGNSSDQEQSPEDEDEGPAEEVPTQMPEQNPTHALPESPRLTLQPKPVVGHFSARELDGDRSKQLALKVLCVAQRQYSLLQAANLLTPDMITEFETLQQLVQEEKIEPGAEALRTSGLARGAPLAQELCSESKPPGYTGPVTRTMARRLSGPLHTLGIPPGPNCTPAQGSRWPMEKKRRRPSALEADSPMAPKRGTKRQRQSFLPCLRRGSLPDTQPSQGPSTPKGERASSPCHSPRVCPATVIKSRVPLGPSAMQNCSTPLALPTRDLNATFDLSEEPPSKPSFHECIGWDKIPQELSRLDQPFIPRAPVPLFTMKGPKPTSSLPGTSACKKKRVASSSVSHGRSRIARLPSSTLKRPAGPLVLPELPLSPLCPSNRRNGKDLIRVGRALSAGNGVTKVS

SEQ ID NO: 5687 - protein, 147 aa, Homo sapiens
MWKFPGGLSEPEEDIGDTAVREVFEETGIKSEFRSVLSIRQQHTNPGAFGKSDMYIICRLKPYSFTINFCQEECLRCEWMDLNDLAKTENTTPITSRVARLLLYGYREGFDKIDLTVEELPAVYTGLFYKLYHKELPENYKTMKGID

SEQ ID NO: 5688 - protein, 1108 aa, Homo sapiens
MALRPGAGSGGGGAAGAGAGSAGGGGFMFPVAGGIRPPQAGLMPMQQQGFPMVSVMQPNMQGIMGMNYSSQMSQGPIAMQAGIPMGPMPAAGMPYLGQAPFLGMRPPGPQYTPDMQKQFAEEQQKRFEQQQKLLEEERKRRQFEEQKQKLRLLSSVKPKTGEKSRDDALEAIKGNLDGFSRDAKMHPTPASHPKKPGVGVFPSQDPAQPRMPPWIYNESLVPDAYKKILETTMTPTGIDTAKLYPILMSSGLPRETLGQIWALANRTTPGKLTKEELYTVLAMIAVTQVVKPEEDDFQDFQDASKSGSLDDSFSDFQELPASSKTSNSQHGNSAPSLLMPLPGTKALPSMDKYAVFKGIAADKSSENTVPPGDPGDKYSAFRELEQTAENKPLGESFAEFRSAGTDDGFTDFKTADSVSPLEPPTKDKTFPPSFPSGTIQQKQQTQVKNPLNLADLDMFSSVNCSSEKPLSFSAVFSTSKSVSTPQSTGSAATMTALAATKTSSLADDFGEFSLFGEYSGLAPVGEQDDFADFMAFSNSSISSEQKPDDKYDALKEEASPVPLTSNVGSTVKGGQNSTAASTKYDVFRQLSLEGSGLGVEDLKDNTPSGKSDDDFADFHSSKFSSINSDKSLGEKAVAFRHTKEDSASVKSLDLPSIGGSSVGKEDSEDALSVQFDMKLADVGGDLKHVMSDSSLDLPTVSGQHPPAAAGSGSPSATSILQKKETSFGSSENITMTSLSKVTTFVSEDALPETTFPALASFKDTIPQTSEQKEYENRDYKDFTKQDLPTAERSQEATCPSPASSGASQETPNECSDDFGEFQSEKPKISKFDFLVATSQSKMKSSEEMIKSELATFDLSVQGSHKRSLSLGDKEISRSSPSPALEQPFRDRSNTLNEKPALPVIRDKYKDLTGEVEENERYAYEWQRCLGSALNVIKKANDTLNGISSSSVCTEVIQSAQGMEYLLGVVEVYRVTKRVELGIKATAVCSEKLQQLLKDIDKVWNNLIGFMSLATLTPDENSLDFSSCMLRPGIKNAQELACGVCLLNVDSRSRKEEKPAEEHPKKAFNSETDSFKLAYGGHQYHASCANFWINCVEPKPPGLVLPDLL

SEQ ID NO: 5689 - protein, 418 aa, Homo sapiens
METHISCLFPELLAMIFGYLDVRDKGRAAQVCTAWRDAAYHKSVWRGVEAKLHLRRANPSLFPSLQARGIRRVQILSLRRSLSYVIQGMANIESLNLSGCYNLTDNGLGHAFVQEIGSLRALNLSLCKQITDSSLGRIAQYLKGLEVLELGGCSNITNTGLLLIAWGLQRLKSLNLRSCRHLSDVGIGHLAGMTRSAAEGCLGLEQLTLQDCQKLTDLSLKHISRGLTGLRLLNLSFCGGISDAGLLHLSHMGSLRSLNLRSCDNISDTGIMHLAMGSLRLSGLDVSFCDKVGDQSLAYIAQGLDGLKSLSLCSCHISDDGINRMVRQMHGLRTLNIGQCVRITDKGLELIAEHLSQLTGIDLYGCTRITKRGLERITQLPCLKVLNLGLWQMTDSEKEARGDFSPLFTVRTRGSSRR

SEQ ID NO: 5690 - protein, 456 aa, Homo sapiens
MAAALKCLLTLGRWCPGLGVAPQARALAALVPGVTQVDNKSGFLQKRPHRQHPGILKLPHVRLPQALANGAQLLLLGSAGPTMENQVQTLTSYLWSRHLPVEPEELQRRARHLEKKFLENPDLSQTEEKLRGAVLHALRKTTYHWQELSYTEGLSLVYMAARLDGGFAAVSRAFHEIRARNPAFQPQTLMDFGSGTGSVTWAAHSIWGQSLREYMCVDRSAAMLVLAEKLLKGGSESGEPYIPGVFFRQFLPVSPKVQFDVVVSAFSLSELPSKADRTEVVQTLWRKTGHFLVLVENGTKAGHSLLMDARDLVLKGKEKSPLDPRPGFVFAPCPHELPCPQLTNLACSFSQAYHPIPFSWNKKPKEEKFSMVILARGSPEEAHRWPRITQPVLKRPRHVHCHLCCPDGHMQHAVLTARRHGRDLYRCARVSSWGDLLPVLTPSAFPPSTAQDPSES

SEQ ID NO: 5691 - protein, 251 aa, Homo sapiens
MDMKRRIHLELRNRTPAAVRELVLDNCKSNDGKIEGLTAEFVNLEFLSLINVGLISVSNLPKLPKLKKLELSENRIFGGLDMLAEKLPNLTHLNLSGNKLKDISTLEPLKKLECLKSLDLFNCEVTNLNDYRESVFKLLPQLTYLDGYDREDQEAPDSDAEVDGVDEEEEDEEGEDEEDEDDEDGEEEEFDEEDDEDEDVEGDEDDDEVSEEEEEFGLDEEDEDEDEDEEEEEGGKGEKRKRETDDEGEDD

SEQ ID NO: 5692 - protein, 169 aa, Homo sapiens
MSAPPALQIREANAHLAAVHRRAAELEARLDAAERTVHAQAERLALHDQQLRAALDELGRAKDREIATLQEQLMTSEATVHSLQATVHQRDELIRQLQPRAELLQDICRRRPPLAGLLDALAEAERLGPLPASDPGHPPPGGPGPPLDNSTGEEADRDHLQPAVFGTTV

SEQ ID NO: 5693 - protein, 691 aa, Homo sapiens
MKIFCSRANPTTGSVEWLEEDEHYDYHQEIARSSYADMLHDKDRNVKYYQGIRAAVSRVKDRGQKALVLDIGTGTGLLSMMAVTAGADFCYAIEVFKPMADAAVKIVEKNGFSDKIKVINKHSTEVTVGPEGDMPCRANILVTELFDTELIGEGALPSYEHAHRHLVEENCEAVPHRATVYAQLVESGRMWSWNKLFPIHVQTSLGEQVIVPPVDVESCPGAPSVCDIQLNQVSPADFTVLSDVLPMFSIDFSKQVSSSAACHSRRFEPLTSGRAQVVLSWWDIEMDPEGKIKCTMAPFWAHSDPEEMQWRDHWMQCVYFLPQEEPVVQGSALYLVAHHDDYCVWYSLQRTSPEKNERVRQMRPVCDCQAHLLWNRPRFGEINDQDRTDRYVQALRTVLKPDSVCLCVSDGSLLSVLAHHLGVEQVFTVESSAASHKLLRKIFKANHLEDKINIIEKRPELLTNEDLQGRKVSLLLGEPFFTTSLLPWHNLYFWYVRTAVDQHLGPGAMVMPQAASLHAVVVEFRDLWRIRSPCGDCEGFDVHIMDDMIKRALDFRESREAEPHPLWEYPCRSLSEPWQILTFDFQQPVPLQPLCAEGTVELRRPGQSHAAVLWMEYHLTPECTLSTGLLEPADPEGGCCWNPHCKQAVYFFSPAPDPRALLGGAAVSYAVEFHPDTGDIIMEFRHADTPD

SEQ ID NO: 5694 - protein, 155 aa, Homo sapiens
MTVEGPPPKDTGIARVPLAGAAGGPGIGRAAGRGIPAGVPMPQAPAGLAGPVRGVGGPSQQVMTPQGRGTVAAAAAAATASIAGAPTQYPPGRGGPPPPMGRGAPPPGMMGPPPGMRPPMGPPMGIPPGRGTPMGMPPPGMRPPPPGMRGKCLQW

SEQ ID NO: 5695 - protein, 133 aa, Homo sapiens
MTRGNQRELARQKNMKKQSDSVKGKRRDDGLSAAARKQSAPSSLPPGTRRSCSRSRKRQTRRRRNPSSFVASCPTLLPFACVPGASPTTLAFPPVVLTGPSTDGIPFALSLQRVPFVLPSPQVASLPLGHSRG

SEQ ID NO: 5696 - protein, 602 aa, Homo sapiens
MAEFRVRVSTGEAFGAGTWDKVSVSIVGTRGESPPLPLDNLGKEFTAGAEEDFQVTLPEDVGRVLLLRVHKAPPVLPLLGPLAPDAWFCRWFQLTPPRGGHLLFPCYQWLEGAGTLVLQEGTAKVSWADHHPVLQQQRQEELQARQEMYQWKAYNPGWPHCLDEKTVEDLELNIKYSTAKNANFYLQAGSAFAEMKIKGLLDRKGLWRSLNEMKRIFNFRRTPAAEHAFEHWQEDAFFASQFLNGLNPVLIRRCHYLPKNFPVTDAMVASVLGPGTSLQAELEKGSLFLVDHGILSGIQTNVINGKPQFSAAPMTLLYQSPGCGPLLPLAIQLSQTPGPNSPIFLPTDDKWDWLLAKTWVRNAEFSFHEALTHLLHSHLLPEVFTLATLRQLPHCHPLFKSTGIGIEGFSELIQRNMKQLNYSLLCLPEDIRTRGVEDIPGYYYRDDGMQIWGIPSSLETREALVQYVTMVIFTCSAKHAAVSAGQFDSCAWMPNLPPSMQLPPPTSKGLATCEGFIATLPPVNATCDVILALWLLSKEPGDQRPLGTYPDEHFTEEAPRRSIATFQSRLAQISRGIQERNQGLVLPYTYLDPPLIENSVSI

SEQ ID NO: 5697 - protein, 1040 aa, Homo sapiens
MVSSAQMGFNLQALLEQLSQDELSKFKYLITTFSLAHELQKIPHKEVDKADGKQLVEILTTHCDSYWVEMASLQVFEKMHRMDLSERAKDEVREAALKSFNKRKPLSLGITRKERPPLDVDEMLERFKTEAQDKDNRCRYILKTKFREMWKSWPGDSKEVQVMAERYKMLIPFSNPRVLPGPFSYTVVLYGPAGLGKTTLAQKLMLDWAEDNLIHKFKYAFYLSCRELSRLGPCSFAELVFRDWPELQDDIPHILAQARKILFVIDGFDELGAAPGALIEDICGDWEKKKPVPVLLGSLLNRVMLPKAALLVTTRPRALRDLRILAEEPIYIRVEGFLEEDRRAYFLRHFGDEDQAMRAFELMRSNAALFQLGSAPAVCWIVCTTLKLQMEKGEDPVPTCLTRTGLFLRFLCSRFPQGAQLRGALRTLSLLAAQGLWAQTSVLHREDLERLGVQESDLRLFLDGDILRQDRVSKGCYSFIHLSFQQFLTALFYTLEKEEEEDRDGHTWDIGDVQKLLSGVERLRNPDLIQAGYYSFGLANEKRAKELEATFGCRMSPDIKQELLRCDISCKGGHSTVTDLQELLGCLYESQEEELVKEVMAQFKEISLHLNAVDVVPSSFCVKHCRNLQKMSLQVIKENLPENVTASESDAEVERSQDDQHMLPFWTDLCSIFGSNKDLMGLAINDSFLSASLVRILCEQIASDTCHLQRVVFKNISPADAHRNLCLALRGHKTVTYLTLQGNDQDDMFPALCEVLRHPECNLRYLGLVSCSATTQQWADLSLALEVNQSLTCVNLSDNELLDEGAKLLYTTLRHPKCFLQRLSLENCHLTEANCKDLAAVLVVSRELTHLCLAKNPIGNTGVKFLCEGLRYPECKLQTLVLWNCDITSDGCCDLTKLLQEKSSLLCLDLGLNHIGVKGMKFLCEALRKPLCNLRCLWLWGCSIPPFSCEDLCSALSCNQSLVTLDLGQNPLGSSGVKMLFETLTCSSGTLRTLRLKIDDFNDELNKLLEEIEEKNPQLIIDTEKHHPWAERPSSHDFMI

SEQ ID NO: 5698 - protein, 1287 aa, Homo sapiens
MVPGEENQLVPKEAPLDHTSDKSLLDANFEPGKKNFLHLTDKDGEQPQILLEDSSAGEDSVHDRFIGPLPREGSGGSTSDYVSQSYSYSSILNKSETGYVGLVNQAMTCYLNSLLQTLFMTPEFRNALYKWEFEESEEDPVTSIPYQLQRLFVLLQTSKKRAIETTDVTRSFGWDSSEAWQQHDVQELCRVMFDALEQKWKQTEQADLINELYQGKLKDYVRCLECGYEGWRIDTYLDIPLVIRPYGSSQAFASVEEALHAFIQPEILDGPNQYFCERCKKKCDARKGLRFLHFPYLLTLQLKRFDFDYTTMHRIKLNDRMTFPEELDMSTFIDVEDEKSPQTESCTDSGAENEGSCHSDQMSNDFSNDDGVDEGICLETNSGTEKISKSGLEKNSLIYELFSVMVHSGSAAGGHYYACIKSFSDEQWYSFNDQHVSRITQEDIKKTHGGSSGSRGYYSSAFASSTNAYMLIYRLKDPARNAKFLEVDEYPEHIKNLVQKERELEEQEKRQREIERNTCKIKLFCLHPTKQVMMENKLEVHKDKTLKEAVEMAYKMMDLEEVIPLDCCRLVKYDEFHDYLERSYEGEEDTPMGLLLGGVKSTYMFDLLLETRKPDQVFQSYKPGEVMVKVHVVDLKAESVAAPITVRAYLNQTVTEFKQLISKAIHLPAETMRIVLERCYNDLRLLSVSSKTLKAEGFFRSNKVFVESSETLDYQMAFADSHLWKLLDRHANTIRLFVLLPEQSPVSYSKRTAYQKAGGDSGNVDDDCERVKGPVGSLKSVEAILEESTEKLKSLSLQQQQDGDNGDSSKSTETSDFENIESPLNERDSSASVDNRELEQHIQTSDPENFQSEERSDSDVNNDRSTSSVDSDILSSSHSSDTLCNADNAQIPLANGLDSHSITSSRRTKANEGKKETWDTAEEDSGTDSEYDESGKSRGEMQYMYFKAEPYAADEGSGEGHKWLMVHVDKRITLAAFKQHLEPFVGVLSSHFKVFRVYASNQEFESVRLNETLSSFSDDNKITIRLGRALKKGEYRVKVYQLLVNEQEPCKFLLDAVFAKGMTVRQSKEELIPQLREQCGLELSIDRFRLRKKTWKNPGTVFLDYHIYEEDINISSNWEVFLEVLDGVEKMKSMSQLAVLSRRWKPSEMKLDPFQEVVLESSSVDELREKLSEISGIPLDDIEFAKGRGTFPCDISVLDIHQDLDWNPKVSTLNVWPLYICDDGAVIFYRDKTEELMELTDEQRNELMKKESSRLQKTGHRVTYSPRKEKALKIYLDGAPNKDLTQD

SEQ ID NO: 5699 - protein, 139 aa, Homo sapiens
MPWRAGNGVGLEAQAGTQEAGPEEYCQEELGAEEEMAARAAWPVLRSVNSRELSRIIICNHSPRIVLPVWLNYYGKLLPYLTLLPGRDFRIHNFRSHPWLFRDARTHDKLLVNQTELFVPSSNVNGQPVFANITLQCIP

SEQ ID NO: 5700 - protein, 193 aa, Homo sapiens
MEGCVSNLMVCNLAYSGKLEELKESILADKSLATRTDQAGWSPLHIAASAGRDEIVKALLGKGAQVNAVNQNGCTPLHYAASKNRHEIAVMLLEGGANPDAKDHYEATAMHRAAAKGNLKMIHILLYYKASTNIQDTEGNTPLHLACDEERVEEAKLLVSQGASIYIENKEEKTPLQVAKGGLGLILKRMVEG

SEQ ID NO: 5701 - protein, 203 aa, Homo sapiens
MSENAAPGLISELKLAVPWGHIAAKAWGSLQGPPVLCLHGWLDNASSFDRLIPLLPQDFYYVAMDFGGHGLSSHYSPGVPYYLQTFVSEIRRVVAALKWNRFSILGHSFGGVVGGMFFCTFPEMVDKLILLDTPLFLLESDEMENLLTYKRRAIEHVLQVEASQEPSHVFSLKQLLQRQRTALTSSAGSCVRIPSGSCRPMSC

SEQ ID NO: 5702 - protein, 254 aa, Homo sapiens
MPAGSMSTTGYPGVCSTTSYRTHCYIPVTSSVTLSSSDLSPTFGHCLPSSYQGNLWLLDYCQESYGEAPTCKSPSCEPKTCSTTGCDPSNSSVPCNSPSAGQVFSVCETTNVSPSPSCSPSTQTNGYVCNCHIPTRNASKACQTLRNGSNCFGQLNCLSKSFQTLNHCRLSTLGYKSYQNPCFIPSYVSPLCYISNSCQPQSYLVRNYHYSSYRPTSCRPLSYLSRSFRSLSYIPSTFPPLRYLCSGSRPLKCY

SEQ ID NO: 5703 - protein, 445 aa, Homo sapiens
MREIVHLQAGQCGNQIGAKFWEVISDEHGIDPTGTYHGDSDLQLERINVYYNEATGGKYVPRAVLVDLEPGTMDSVRSGPFGQIFRPDNFVFGQSGAGNNWAKGHYTEGAELVDSVLDVVRKEAESCDCLQGFQLTHSLGGGTGSGMGTLLISKIREEYPDRIMNTFSVVPSPKVSDTVVEPYNATLSVHQLVENTDETYCIDNEALYDICFRTLKLTTPTYGDLNHLVSATMSGVTTCLRFPGQLNADLRKLAVNMVPFPRLHFFMPGFAPLTSRGSQQYRALTVPELTQQMFDAKNMMAACDPRHGRYLTVAAVFRGRMSMKEVDEQMLNVQNKNSSYFVEWIPNNVKTAVCDIPPRGLKMSATFIGNSTAIQELFKRISEQFTAMFRRKAFLHWYTGEGMDEMEFTEAESNMNDLVSEYQQYQDATAEEEGEFEEEAEEEVA

SEQ ID NO: 5704 - protein, 249 aa, Homo sapiens
MAERGELDLTGAKQNTGVWLVKVPKYLSQQWAKASGRGEVGKLRIAKTQGRTEVSFTLNEDLANIHDIGGKPASVSAPREHPFVLQSVGGQTLTVFTESSSDKLSLEGIVVQRAECRPAASENYMRLKRLQIEESSKPVRLSQQLDKVVTTNYKPVANHQYNIEYERKKKEDGKRARADKQHVLDMLFSAFEKHQYYNLKDLVDITKQPVVYLKEILKEIGVQNVKGIHKNTWELKPEYRHYQGEEKSD

SEQ ID NO: 5705 - protein, 836 aa, Homo sapiens
MWSLGCVIAELFLGWPLYPGASEYDQIRYISQTQGLPAEYLLSAGTKTTRFFNRDPNLGYPLWRLKTPEEHELETGIKSKEARKYIFNCLDDMAQVNMSTDLEGTDMLAEKADRREYIDLLKKMLTIDADKRITPLKTLNHQFVTMTHLLDFPHSNHVKSCFQNMEICKRRVHMYDTVSQIKSPFTTHVAPNTSTNLTMSFSNQLNTVHNQASVLASSSTAAAATLSLANSDVSLLNYQSALYPSSAAPVPGVAQQGVSLQPGTTQICTQTDPFQQTFIVCPPAFQTGLQATTKHSGFPVRMDNAVPIVPQAPAAQPLQIQSGVLTQGSCTPLMVATLHPQVATITPQYAVPFTLSCAAGRPALVEQTAAVLQAWPGGTQQILLPSTWQQLPGVALHNSVQPTAMIPEAMGSGQQLADWRNAHSHGNQYSTIMQQPSLLTNHVTLATAQPLNVGVAHVVRQQQSSSLPSKKNKQSAPVSSKSSLDVLPSQVYSLVGSSPLRTTSSYNSLVPVQDQHQPIIIPDTPSPPVSVITIRSDTDEEEDNKYKPSSSGLKPRSNVISYVTVNDSPDSDSSLSSPYSTDTLSALRGNSGSVLEGPGRVVADGTGTRTIIVPPLKTQLGDCTVATQASGLLSNKTKPVASVSGQSSGCCITPTGYRAQRGGTSAAQPLNLSQNQQSSAAPTSQERSSNPAPRRQQAFVAPLSQAPYTFQHGSPLHSTGHPHLAPAPAHLPSQAHLYTYAAPTSAAALGSTSSIAHLFSPQGSSRHAAAYTTHPSTLVHQVPVSVGPSLLTSASVAPAQYQHQFATQSYIGSSRGSTIYTGYPLSPTKISQYSYL

SEQ ID NO: 5706 - protein, 783 aa, Homo sapiens
MSQVKSSYSYDAPSDFINFSSLDDEGDTQNIDSWFEEKANLENKLLGKNGTGGLFQGKTPLRKANLQQAIVTPLKPVDNTYYKEAEKENLVEQSIPSNACSSLEVEAAISRKTPAQPQRRSLRLSAQKDLEQKEKHHVKMKAKRCATPVIIDEILPSKKMKVSNNKKKPEEEGSAHQDTAEKNASSPEKAKGRHTVPCMPPAKQKFLKSTEEQELEKSMKMQQEVVEMRKKNEEFKKLALAGIGQPVKKSVSQVTKSVDFHFRTDERIKQHPKNQEEYKEVNFTSELRKHPSSPARVTKGCTIVKPFNLSQGKKRTFDETVSTYVPLAQQVEDFHKRTPNRYHLRSKKDDIKTGSCSVTQAGVQWRDHGSLQCPTPGLKQSSCLSLPNLLPSKSSVTKICRDPQTPVLQTKHRARAVTCKSTAELEAEELEKLQQYKFKARELDPRILEGGPILPKKPPVKPPTEPIGFDLEIEKRIQERESKKKTEDEHFEFHSRPCPTKILEDVVGVPEKKVLPITVPKSPAFALKNRIRMPTKEDEEEDEPVVIKAQPVPHYGVPFKPQIPEARTVEICPFSFDSRDKERQLQKEKKIKELQKGEVPKFKALPLPHFDTINLPEKKVKNVTQIEPFCLETDRRGALKAQTWKHQLEEELRQQKEAACFKARPNTVISQEPFVPKKEKKSVAEGLSGSLVQEPFQLATEKRAKERQELEKRMAEVEAQKAQQLEEARLQEEEQKKEELARLRRELVHKANPIRKYQGLEIKSSDQPLTVPVSPKFSTRFHC

SEQ ID NO: 5707 - protein, 685 aa, Homo sapiens
MGSYLSVPAYFTSRDLFRCSECQDSLTNWYYEKDGKLYCPKDYWGKFGEFCHGCSLLMTGPFMVAGEFKYHPECFACMSCKVIIEDGDAYALVQHATLYCGKCHNEVVLAPMFERLSTESVQEQLPYSVTLISMPATTEGRRGFSVSVESACSNYATTVQVKEVNRMHISPNNRNAIHPGDRILEINGTPVRTLRVEEVEDAISQTSQTLQLLIEHDPVSQRLDQLRLEARLAPHMQNAGHPHALSTLDTKENLEGTLRRRSLRRSNSISKSPGPSSPKEPLLFSRDISRSESLRCSSSYSQQIFRPCDLIHGEVLGKGFFGQAIKVTHKATGKVMVMKELIRCDEETQKTFLTEVKVMRSLDHPNVLKFIGVLYKDKKLNLLTEYIEGGTLKDFLRSMDPFPWQQKVRFAKGIASGMAYLHSMCIIHRDLNSHNCLIKLDKTVVVADFGLSRLIVEERKRAPMEKATTKKRTLRKNDRKKRYTVVGNPYWMAPEMLNGKSYDETVDIFSFGIVLCEIIGQVYADPDCLAALDFGLNVKLFWEKFVPTDCPPAFFPLAAICCRLEPESRAPPGAAGEGPGCADDEGPVRRQGKVTIKYDPKELRKHLNLEEWILEQLTRLYDCQEEEISELEIDVDELLDMESDDAWASRVKELLVDCYKPTEAFISGLLDKIRAMQKLSTPQKK

SEQ ID NO: 5708 - protein, 279 aa, Homo sapiens
MRALTVQRVKFAMDLPLLKRAGQDLAEKTKNFVSRSLVIGEVLSMADMATGVKCGIIYWLFGGAIRNLGSPEHVTKWFQPLQEQKYTGMFAMTERGHGSNARGIQTEATFDLSAQEFVIDTPCENAEKMYIGNAMYGNYAAVFAQLIIDGRSQGPHCFIVPVRDENGSLYPGVTAIDMMYKEGLHGVDNGILIFDKVRIPRENLLDKFGSVAPDGQYHSPIRNKSARFNAMLAALTPSRLAVAFQAMGAMKLGLTIAIRYSHRSRIISQNCCSAPAGLY

SEQ ID NO: 5709 - protein, 198 aa, Homo sapiens
MTLRCLEPSGNGGEGTRSQWGTAGSAEEPSPQAARLAKALRELGQTGWYWGSMTVNEAKEKLKEAPEGTFLIRDSSHSDYLLTISVKTSAGPTNLRIEYQDGKFRLDSIICVKSKLKQFDSVVHLIDYYVQMCKDKRTGPEAPRNGTVHLYLTKPLYTSAPSLQHLCRLTINKCTGAIWGLPLPTRLKDYLEEYKFQV

SEQ ID NO: 5710 - protein, 189 aa, Homo sapiens
MEADGDGEELARLRSVFAACDANRSGRLEREEFRALCTELRVRPADAEAVFQRLDADRDGAITFQEFARGFLGSLRGGRRRDWGPLDPAPAVSEAGPETHDSEEDEGDEDAAAALATSCGPASPGRAWQDFQARLGDEAKFIPRFGYTISKPAFVFVRHLITLCALSWAKKEGRETLWTIEEGGAKMAE

SEQ ID NO: 5711 - protein, 99 aa, Homo sapiens
ALDVAVKTFPPERHVAVKCFGKKKEKKNNANSPASVSNPTVTKHAFGMEEELQREGSIETLSNSSGSTSGSIPRNFDGYRSPLPTNESQPLSLFPTGFP

SEQ ID NO: 5712 - protein, 389 aa, Homo sapiens
MERKDFETWLDNISVTFLSLTDLQKNETLDHLISLSGAVQLRHLSNNLETLLKRDFLKLLPLELSFYLLKWLDPQTLLTCCLVSKQWNKVISACTEVWQTACKNLGWQIDDSVQDALHWKKVYLKAILRMKQLEDHEAFETSSLIGHSARVYALYYKDGLLCTVFSVDYNDELDILVSGSADFTVKVWALSAGTCLNTLTGHTEWVTKVVLQKCKVKSLLHSPGDYILLSADKYEIKIWPIGREINCKCLKTLSVSEDRSICLQPRLHFDGKYIVCSSALGLYQWDFASYDILRVIKTPEIANLALLGFGDIFALLFDNRYLYIMDLRTESLISRWPLPEYRKSKRGSSFLAGEASWLNGLDGHNDTGLVFATSMPDHSIHLVLWKEHG

SEQ ID NO: 5713 - protein, 812 aa, Homo sapiens
MKKQFNRMRQLANQTVGRAEKTEVLSEDLLQVEKRLELVKQVSHSTHKKLTACLQGQQGAEADKRSKKLPLTTLAQCLMEGSAILGDDTLLGKMLKLCGETEDKLAQELIHFELQVERDVIEPLFLLAEVEIPNIQKQRKHLAKLVLDMDSSRTRWQQTSKSSGLSSSLQPAGAKADALREEMEEAANRVEICRDQLSADMYSFVAKEIDYANYFQTLIEVQAEYHRKSLTLLQAVLPQIKAQQEAWVEKPSFGKPLEEHLTISGREIAFPIEACVTMLLECGMQEEGLFRVAPSASKLKKLKAALDCCVVDVQEYSADPHAIAGALKSYLRELPEPLMTFELYDEWIQASNVQEQDKKLQALWNACEKLPKANHNNIRYLIKFLSKLSEYQDVNKMTPSNMAIVLGPNLLWPQAEGNITEMMTTVSLQIVGIIEPIIQHADWFFPGEIEFNITGNYGSPVHVNHNANYSSMPSPDMDPADRRQPEQARRPLSVATDNMMLEFYKKDGMGVRVMDTNWVARRGSSAGRKVSCAPPSMQPPAPPAELAAPLPSPLPEQPLDSPAAPALSPSGLGLQPGPERTSTTKSKELSPGSAQKGSPGSSQGTACAGTQPGAQPGAQPGASPSPSQPPADQSPHTLRKVSKKLAPIPPKVPFGQPGAMADQSAGQPSPVSLSPTPPSTPSPYGLSYPQGYSLASGQLSPAAAPPLASPSVFTSTLSKSRPTPKPRQRPTLPPPQPPTVNLSASSPQSTEAPMLDGMSPGESMSTDLVHFDIPSIHIELGSTLRLSPLEHMRRHSVTDKRDSEEESESTAL

SEQ ID NO: 5714 - protein, 372 aa, Homo sapiens
MSKSESPKEPEQLRKLFIGGLSFETTDESLRSHFEQWGTLTDCVVMRDPNTKRSRGFGFVTYATVEEVDAAMNARPHKVDGRVVEPKRAVSREDSQRPGAHLTVKKIFVGGIKEDTEEHHLRDYFEQYGKIEVIEIMTDRGSGKKRGFAFVTFDDHDSVDKIVIQKYHTVNGHNCEVRKALSKQEMASASSSQRGRSGSGNFGGGRGGGFGGNDNFGRGGNFSGRGGFGGSRGGGGYGGSGDGYNGFGNDGGYGGGGPGYSGGSRGYGSGGQGYGNQGSGYGGSGSYDSYNNGGGGGFGGGSGSNFGGGGSYNDFGNYNNQSSNFGPMKGGNFGGRSSGPYGGGGQYFAKPRNQGGYGGSSSSSSYGSGRRF

SEQ ID NO: 5715 - protein, 495 aa, Homo sapiens
MKLGKKPMYKPVDPYSRMQSTYNYNMRGGAYPPRYFYPFPVPPLLYQVELSVGGQQFNGKGKTRQAAKHDAAAKALRILQNEPLPERLEVNGRESEEENLNKSEISQVFEIALKRNLPVNFEVARESGPPHMKNFVTKVSVGEFVGEGEGKSKKISKKNAAIAVLEELKKLPPLPAVERVKPRIKKKTKPIVKPQTSPEYGQGINPISRLAQIQQAKKEKEPEYTLLTERGLPRRREFVMQVKVGNHTAEGTGTNKKVAKRNAAENMLEILGFKVPQAQPTKPALKSEEKTPIKKPGDGRKVTFFEPGSGDENGTSNKEDEFRMPYLSHQQLPAGILPMVPEVAQAVGVSQGHHTKDFTRAAPNPAKATVTAMIARELLYGGTSPTAETILKNNISSGHVPHGPLTRPSEQLDYLSRVQGFQVEYKDFPKNNKNEFVSLINCSSQPPLISHGIGKDVESCHDMAALNILKLLSELDQQSTEMAAGNGPMSVCGRC

SEQ ID NO: 5716 - protein, 1944 aa, Homo sapiens
MSNFYEERTTMIAARDLQEFVPFGRDHCKHHPNALNLQLRQLQPASELWSSDGAAGLVGSLQEVTIHEKQKESWQLRKGVSEIGEDVDYDEELYVAGNMVIWSKGSKSQALAVYKAFTVDSPVQQALWCDFIISQDKSEKAYSSNEVEKCICILQSSCINMHSIEGKDYIASLPFQVANVWPTKYGLLFERSASSHEVPPGSPREPLPTMFSMLHPLDEITPLVCKSGSLFGSSRVQYVVDHAMKIVFLNTDPSIVMTYDAVQNVHSVWTLRRVKSEEENVVLKFSEQGGTPQNVATSSSLTAHLRSLSKGDSPVTSPFQNYSSIHSQSRSTSSPSLHSRSPSISNMAALSRAHSPALGVHSFSGVQRFNISSHNQSPKRHSISHSPNSNSNGSFLAPETEPIVPELCIDHLWTETITNIREKNSQASKVFITSDLCGQKFLCFLVESQLQLRCVKFQESNDKTQLIFGSVTNIPAKDAAPVEKIDTMLVLEGSGNLVLYTGVVRVGKVFIPGLPAPSLTMSNTMPRPSTPLDGVSTPKPLSKLLGSLDEVVLLSPVPELRDSSKLHDSLYNEDCTFQQLGTYIHSIRDPVHNRVTLELSNGSMVRITIPEIATSELVQTCLQAIKFILPKEIAVQMLVKWYNVHSAPGGPSYHSEWNLFVTCLMNMMGYNTDRLAWTRNFDFEGSLSPVIAPKKARPSETGSDDDWEYLLNSDYHQNVESHLLNRSLCLSPSEASQMKDEDFSQNLSLDSSTLLFTHIPAIFFVLHLVYEELKLNTLMGEGICSLVELLVQLARDLKLGPYVDHYYRDYPTLVRTTGQVCTIDPGQTGFMHHPSFFTSEPPSIYQWVSSCLKGEGMPPYPYLPGICERSRLVVLSIALYILGDESLVSDESSQYLTRITIAPQKLQVEQEENRFSFRHSTSVSSLAERLVVWMTNVGFTLRDLETLPFGIALPIRDAIYHCREQPASDWPEAVCLLIGRQDLSKQACEGNLPKGKSVLSSDVPSGTETEEEDDGMNDMNHEVMSLIWSEDLRVQDVRRLLQSAHPVRVNVVQYPELSDHEFIEEKENRLLQLCQRTMALPVGRGMFTLFSYHPVPTEPLPIPKLNLTGRAPPRNTTVDLNSGNIDVPPNMTSWASFHNGVAAGLKIAPASQIDSAWIVYNKPKHAELANEYAGFLMALGLNGHLTKLATLNIHDYLTKGHEMTSIGLLLGVSAAKLGTMDMSITRLLSIHIPALLPPTSTELDVPHNVQVAAVVGIGLVYQGTAHRHTAEVLLAEIGRPPGPEMEYCTDRESYSLAAGLALGMVCLGHGSNLIGMSDLNVPEQLYQYMVGGHRRFQTGMHREKHKSPSYQIKEGDTINVDVTCPGATLALAMIYLKTNNRSIADWLRAPDTMYLLDFVKPEFLLLRTLARCLILWDDILPNSKWVDSNVPQIIRENSISLSEIELPCSEDLNLETLSQAHVYIIAGACLSLGFRFAGSENLSAFNCLHKFAKDFMTYLSAPNASVTGPHNLETCLSVVLLSLAMVMAGSGNLKVLQLCRFLHMKTGGEMNYGFHLAHHMALGLLFLGGGRYSLSTSNSSIAALLCALYPHFPAHSTDNRYHLQALRHLYVLAAEPRLLVPVDVDTNTPCYALLEVTYKGTQWYEQTKEELMAPTLLPELHLLKQIKVKGPRYWELLIDLSKGTQHLKSILSKDGVLYVKLRAGQLSYKEDPMGWQSLLAQTVANRNSEARAFKPETISAFTSDPALLSFAEYFCKPTVNMGQKQEILDLFSSVLYECVTQETPEMLPAYIAMDQAIRRLGRREMSETSELWQIKLVLEFFSSRSHQERLQNHPKRGLFMNSEFLPVVKCTIDNTLDQWLQVGGDMCVHAYLSGQPLEESQLSMLACFLVYHSVPAPQHLPPIGLEGSTSFAELLFKFKQLKMPVRALLRLAPLLLGNPQPMVM

SEQ ID NO: 5717 - protein, 420 aa, Homo sapiens; identical to SEQ ID NO: 5350

SEQ ID NO: 5718 - protein, 418 aa, Homo sapiens
MRECISIHVGQAGVQIGNACWELYCLEHGIQPDGQMPSDKTIGGGDDSFNTFFSETGAGKHVPRAVFVDLEPTVVDEVRTGTYRQLFHPEQLITGKEDAANNYARGHYTIGKEIVDLVLDRIRKLADLCTGLQGFLIFHSFGGGTGSGFASLLMERLSVDYGKKSKLEFAIYPAPQVSTAVVEPYNSILTTHTTLEHSDCAFMVDNEAIYDICRRNLDIERPTYTNLNRLIGQIVSSITASLRFDGALNVDLTEFQTNLVPYPRIHFPLATYAPVISAEKAYHEQLSVAEITNACFEPANQMVKCDPRHGKYMACCMLYRGDVVPKDVNAAIATIKTKRTIQFVDWCPTGFKVGINYQPPTVVPGGDLAKVQRAVCMLSNTTAIAEAWARLDLAALEKDYEEVGVDSVEAEAEEGEEY

SEQ ID NO: 5719 - protein, 138 aa, Homo sapiens
MQLPPFDMWKDYFNLSQVVWALIASRGQRLETQEIEEPSPGPPLGQDQGLGAPGANGGLGTLCNFCKHNGESRHVYSSHQLKTPDGVVVCPILRHYVCPVCGATGDQAHTLKYCPLNGGQQSLYRRSGRNSAGRRVKR

SEQ ID NO: 5720 - protein, 124 aa, Homo sapiens
MRASPCISQPAASWHPRPSALRPTAGSGPDTRTPGTVEDGSAPCPAFRSPAVSPCGEEPCCFQISPAEETLELGRLVSPGNCDTLSPRAAGFYACHVRSLIPCRSTKGRWPLTASAAGLSSFSG

SEQ ID NO: 5721 - protein, 120 aa, Homo sapiens
MAEPSSARRPVPLIESELYFLIARYLSAGPCRRAAQVLVQELEQYQLLPKRLDWEGNEHNRSYEELVLSNKHVAPDHLLQICQRIGPMLDKEIPPSISRVTSLLGAGRQSLLRTAKGTLI

SEQ ID NO: 5722 - protein, 867 aa, Homo sapiens
MIPKSLVQAAETQRGLCEPGGKGREGRSGGKGETRPRGVGTQEGKGTIPGSPREKRGERGEGDPALLPAEDLWRLPGSKDRLRSSLLPPPGPPSSDSGPGPPSSHSGKTAQGAALNWARKQSARTSSNLCAWSLAMATKMAEIPSSPYEPGQRGMKDTQRGDAPQRGSPEPRILQLARVGNVYLKEESSRSGRLEAKKWIPTKFLENLSVPHVDLGGNQLWSGGMEALTTQLGPGREGSSSPNSKQELQPYSGSSALKPNQVGETSLYGVPIVSLVIDGQERLCLAQISNTLLKNYSYNEIHNRRVALGITCVQCTPVQLEILRRAGAMPISSRRCGMITKREAERLCKSFLGEHKPPKLPENFAFDVVHECAWGSRGSFIPARYNSSRAKCIKCGYCSMYFSPNKFIFHSHRTPDAKYTQPDAANFNSWRRHLKLSDKSATDELSHAWEDRGLGLATGASGPAGPGGPGGGAGVRSYPVIPVPSKGFGLLQKLPPPLFPHPYGFPTAFGLCPKKDDPVLGAGEPKGGSYVSAFRPVVKDTESIAKLYGSAREAYGAGPARGPGPGAGSGGYVSPDFLSEGSSSYNSASPDVDTADEPEVDVESNRFPDDEDAQEETEPSAPSAGGGPDAGRPAFGDLAAEDLVRRPERSPPSGGGGYELREPCGPLGGPAPAKVFAPERDEHVKSAAVALGPAASYVCTPEAHEPDKEDNHSPADDLETRKSYPDQRSISQPSPANTDRGEDGLTLDVTGTHLVEKDIENLAREELQKLLLEQMELRKKLEREFQSLKDNFQDQMKRELAYREEMVQQLQIVRDTLCNELDQERKARYAIQQKLKEAHDALHHFSCKMLTPRHCTGNCSFKPPLLP

SEQ ID NO: 5723 - protein, 1195 aa, Homo sapiens
MHDLPPDSGARRGGRGLADHSFPAGARAPGQPPSRGAAYRRACPRDGERGGGGRPRQQVSPPRSPQREPRGGQLRTPRMRPSCSRSLESLRVGAKPPPFQRWPSDSWIRCGAHRDWDEPPPRGGRMDGWSGDRARAAAPTGLQPPGCKDHGCSSGSPFRDPAGSSVIRSGKGDRQEGPSFLRPPAVTVKKLQKWMYKGRLLSLGMKGRARGTAPKVTGTQAASPNVGALKVRENRVLSVPPDQRITLTDLFENAYGSSMKGRELEELKDNIEFRGHKPLNSITVSKKRNWLYQSTLRPLNLEEENKKCQDRSHLSISPVSLPKHQLSQSFLKSSKEYCTYVVCNATNSSLSKNCALDFNEENDADDEGEIWYNPIPEDDDLGISSALSFGEADSAVLKLPAVNLSMLSGSDLMKAERHTEDSLCSSEHAGDIQTTRSNGMNPIHPAHSTEFVQQYKQKLGHKTQEGIMVEDSPMLKSPFAGSGILAATNSTELGIMEPSSPNPSPVKKGSSINWSLPDKIKSAAVRKLSMKMKKLPEFSRKLSVKGTLNYINSPDNTPSLSKYNCREVHHTDILPSGNTTTAAKRNVISRYHLDTSVSSQQSYQKKNSMSSKYSCKGGYLSDGDSPELTTKASKHGSENKFGKGKEIISNSCSKNEIDIDAFRHYSFSDQPKCSQYISGLMSVHFYGAEDLKPPRIDSKDVFCAIQVDSVNKARTALLTCRTTFLDMDHTFNIEIENAQHLKLVVFSWEPTPRKNRVCCHGTVVLPTLFRVTKTHQLAVKLEPRGLIYVKVTLMEQWENSLHGLDINQEPIIFGVDIQKVVEKENIGLMVPLLIQKCIMEIEKRGCQVVGLYRLCGSAAVKKELREAFERDSKAVGLCENQYPDINVITGVLKDYLRELPSPLITKQLYEAVLDAMAKSPLKMSSNGCENDPGDSKYTVDLLDCLPEIEKATLKMLLDHLKLVASYHEVNKMTCQNLAVCFGPVLLSQRQEPSTHNNRVFTDSEELASALDFKKHIEVLHYLLQLWPVQRLTVKKSTDNLFPEQKSSLNYLRQKKERPHMLNLSGTDSSGVLRPRQNRLDSPLSNRYAGDWSSCGENYFLNTKENLNDVDYDDVPSEDARGSIGENYSKMDGPEVMIEQPIPMSKECTFQTYLTMQTVESTVDRKNNLKDLQESIDTLIGNLERELNKNKLNMSF

SEQ ID NO: 5724 - protein, 450 aa, Homo sapiens
MDPGNENSATEAAAIIDLDPDFEPQSRPRSCTWPLPRPEIANQPSEPPEVEPDLGEKAIESAPEKRLTLAQIYEWMVRTVPYFKDKGDSNSSAGWKNSIRHNLSLHSKFIKVHNEATGKSSWWMLNPEGGKSGKAPRRRAASMDSSSKLLRGRSKAPKKKPSVLPAPPEGATPTSPVGHFAKWSGSPCSRNREEADMWTTFRPRSSSNASSVSTRLSPLRPESEVLAEEIPASVSSYAGGVPPTLNEGLELLDGLNLTSSHSLLSRSGLSGFSLQHPGVTGPLHTYSSSLFSPAEGPLSAGEGCFSSSQALEALLTSDTPPPPADVLMTQVDPILSQAPTLLLLGGLPSSSKLATGVGLCPKPLEAPGPSSLVPTLSMIAPPPVMASAPIPKALGTPVLTPPTEAASQDRMPQDLDLDMYMENLECDMDNIISDLMDEGEGLDFNFEPDP

SEQ ID NO: 5725 - protein, 374 aa, Homo sapiens
MAGYLSESDFVMVEEGFSTRDLLKELTLGASQATTDEVAAFFVADLGAIVRKHFCFLKCLPRVRPFYAVKCNSSPGVLKVLAQLGLGFSCANKAEMELVQHIGIPASKIICANPCKQIAQIKYAAKHGIQLLSFDNEMELAKVVKSHPSAKFVQQRGTACLIRMVLCIATDDSHSLSCLSLKFGVSLKSCRHLLENAKKHHVEVVGVSFHIGSGCPDPQAYAQSIADARLVFEMGTELGHKMHVLDLGGGFPGTEGAKVRFEEIASVINSALDLYFPEGCGVDIFAELGRYYVTSAFTVAVSIIAKKEVLLDQPGREEENGSTSKTIVYHLDEGVYGIFNSVLFDNICPTPILQKSKNHSPCYMSLESIHFIAV

SEQ ID NO: 5726 - protein, 540 aa, Homo sapiens
MDRSKRNSIAGFPPRVERLEEFEGGGGGEGNVSQVGRVWPSSYRALISAFSRLTRLDDFTCEKIGSGFFSEVFKVRHRASGQVMALKMNTLSSNRANMLKEVQLMNRLSHPNILRFMGVCVHQGQLHALTEYINSGNLEQLLDSNLHLPWTVRVKLAYDIAVGLSYLHFKGIFHRDLTSKNCLIKRDENGYSAVVADFGLAEKIPDVSMGSEKLAVVGSPFWMAPEVLRDEPYNEKADVFSYGIILCEIIARIQADPDYLAAEMDPKLRPSFVEIGKTLEEILSRLQEEEQERDRKLQPTARGLLEKAPGVKRLSSLDDKIPHKSPCPRRTIWLSRSQSDIFSRKPAAVSVLDPYYRPRDGAARTPKVNPFSARQDLMGGKIKFFDLPSKSVISLVFDLDAPGPGTMPLADWQEPLAPPIRRWRSLPGSPEFLHQEACPFVGREESLSDGPPPRLSSLKYRVKEIPPFRASALPAAQAHEAMDCSILQEENGFGSRPQGTSPCPAGASEEMEVEERPAGSTPATFSTSGIGLQTQGKQDG

SEQ ID NO: 5727 - protein, 261 aa, Homo sapiens
MGSRKKEIALQVNISTQELWEEMLSSKGLTVVDVYQGWCGPCKPVVSLFQKMRIEVGLDLLHFALIKDEALSDEDECVSHGKNNGEDEDMVSSERTCTLAIIKPDAVAHGKTDEIIMKIQEAGFEILTNEERTMTEAEVRLFYQHKAGEEAFEKLVHHMCSGPSHLLILTRTEGFEDVVTTWRTVMGPRDPNVARREQPESLRAQYGTEMPFNAVHGSRDREDADRELALLFPSLKFSDKDTEAPQGESSTQPRLKITDLD

SEQ ID NO: 5728 - protein, 588 aa, Homo sapiens
MEAADASRSNGSSPEARDARSPSGPSGSLENGTKADGKDAKTTNGHGGEAAEGKSLGSALKPGEGRSALFAGNEWRRPIIQFVESGDDKNSNYFSMDSMEGKRSPYAGLQLGAAKKPPVTFAEKGELRKSIFSESRKPTVSIMEPGETRRNSYPRADTGLFSRSKSGSEEVLCDSCIGNKQKAVKSCLVCQASFCELHLKPHLEGAAFRDHQLLEPIRDFEARKCPVHGKTMELFCQTDQTCICYLCMFQEHKNHSTVTVEEAKAEKETELSLQKEQLQLKIIEIEDEAEKWQKEKDRIKSFTTNEKAILEQNFRDLVRDLEKQKEEVRAALEQREQDAVDQVKVIMDALDERAKVLHEDKQTREQLHSISDSVLFLQEFGALMSNYSLPPPLPTYHVLLEGEGLGQSLGNFKDDLLNVCMRHVEKMCKADLSRNFIERNHMENGGDHRYVNNYTNSFGGEWSAPDTMKRYSMYLTPKGGVRTSYQPSSPGRFTKETTQKNFNNLYGTKGNYTSRVWEYSSSIQNSDNDLPVVQGSSSFSLKGYPSLMRSQSPKAQPQTWKSGKQTMLSHYRPFYVNKGNGIGSNEAP

SEQ ID NO: 5729 - protein, 1188 aa, Homo sapiens
MKKKQTVQGTFSKLFGKKHTTTPSTSLYATNPPWIFTQEAPEEGTGGFDGIYYGDNRFNTVSESGTATLKARPRVRPLLTFLPLNAQENHGLAVPTPSVPDDFADKEVTGTSSLVNGNLRLYSSVGDLRPGQYGQDLLIPPPPPGPAPGPPQDISEPPGGSPLPSPPSTAPPPPPLLLEPPPPPSMAPPPPPVLEALSPPHTLSSPSIPTPPDFIPPAPPLAFLAPPPPPVPAPAPPAPASPHTVGTRLFPPGGVTKWKSDVALNGRQAEATRASPPRSPAEPKGSALGPNPEPHLTFPRSFKVPPPTPVRTSSIPVQEAQEAPRKEEGATKKAPSRLPLPPSFHIRPASQVYPDRAPEPDCPGELKATAPASPRLGQSQSQADERAGTPPPAPPLPPPAPPLPPPAPPLPPAAPPLPCAQKAAHPPAGFTKTPKSSSPALKPKPNPPSPENTASSAPVDWRDPSQMEKLRNELAAYLCGSRREDRFLSHRPGPTVAPQSKEGKKGPRLPEKETLLSLPAKDTPPGVPEKSLGGSSLTETEAAPSLTLPSVDYIPQDSPTPSVRQIRNELEARLSSAAEKEAKPSIGSLPPKPRLEGGRICENGADDDKLSKPVAKNLPPQSTTLLPTTSLQPKAMLGPAIPPKATPEPAIPPKATLWPATPPKATLGPATPLKATSGPTTPLKATSGPAIASTATTLPTTTSQLMAEKDSGPAGQPEKPASQEVSTPSQARGEGSPSEATRLPTQGARSSAAFPPKTSPGGGEVPCLYKPHCHQSSLSREVAVVMPTLARGGAAGPGEPVEVKEPPGLPAKPPASAQPTDELLRHPVTGEVVERGSPMALLLAARQRAQKGRSVGAALGRSSLPGSLRDHSHQAEASSDSIFHSQGTPNSFTVVPKLPKEAEKDSPLTTEIPNKWGPRLGRDAEGTELSRRHNWTKPEPQAPVAWERVAPSNLPQGHPLPKSFSSPPSPSNKREEEEEEFNFEVIPPPPEFSNDPEPPAPALQYLGRQSSPPRNNYSDLRQLPNAGPGAPPALGFSRFPAGARYAGAGGLERFSGGGRSLIKKRLYVGEPHRGPGLPHGGTGRSLSSPNCFGPQPGGPEMRRVNSAGRAPPGGLHAPRLSLEGAARGAAEAKHKAPGSADYGFAPAAGRSPYTTTRYGSPINTFTVRPGTRHPISYVCSGAHRKATS

SEQ ID NO: 5730 - protein, 865 aa, Homo sapiens
MAVARVDAALPPGEGSVVNWSGQGLQKLGPNLPCEADIHTLILDKNQIIKLENLEKCKRLIQLSVANNRLVRMMGVAKLTLLRVLNLPHNSIGCVEGLKELVHLEWLNLAGNNLKAMEQINSCTALQHLDLSDNNISQIGDLSKLVSLKTLLLHGNIITSLRMAPAYLPRSLAILSLAENEIRDLNEISFLASLTELEQLSIMNNPCVMATPSIPGFDYRPYIVSWCLNLRVLDGYVISQKESLKAEWLYSQGKGRAYRPGQHIQLVQYLATVCPLTSTLGLQTAEDAKLEKILSKQRFHQRQLMNQSQNEELSPLVPVETRASLIPEHSSPVQDCQISQESEPVIQVNSWVGINSNDDQLFAVKNNFPASVHTTRYSRNDLHLEDIQTDEDKLNCSLLSSESTFMPVASGLSPLSPTVELRLQGINLGLEDDGVADESVKGLESQVLDKEEEQPLWAANENSVQMMRSEINTEVNEKAGLLPCPEPTIISAILKDDNHSLTFFPESTEQKQSDIKKPENTQPENKETISQATSEKLPMILTQRSVALGQDKVALQKLNDAATKLQACWRGFYARNYNPQAKDVRYEIRLRRMQEHIVCLTDEIRRLRKERDEERIKKFVQEEAFRFLWNQVRSLQVWQQTVDQRLSSWHTDVPPISSTLVPSKHPLFTQSQESSCDQNADWFIASDVAPQEKSLPEFPDSGFHSSLTEQVHSLQHSLDFEKSSTEGSESSIMGNSIDTVRYGKESDLGDVSEEHGEWNKESSNNEQDNSLLEQYLTSVQQLEDADERTNFDTETRDSKLHIACFPVQLDTLSDGASVDESHGISPPLQGEISQTQENSKLNAEVQGQQPECDSTFQLLHVGVTV

SEQ ID NO: 5731 - protein, 424 aa, Homo sapiens
MSVGCPEPEPPRSLTCCGPGTAPGPGAGVPLLTEDMQALTLRTLAASDVTKHYELVRELGKGTYGKVDLVVYKGTGTKMALKFVNKSKTKLKNFLREVSITNSLSSSPFIIKVFDVVFETEDCYVFAQEYAPAGDLFDIIPPQVGLPEDTVKRCVQQLGLALDFMHGRQLVHRDIKPENVLLFDRECRRVKLADFGMTRRVGCRVKRVSGTIPYTAPEVCQAGRADGLAVDTGVDVWAFGVLIFCVLTGNFPWEAASGADAFFEEFVRWQRGRLPGLPSQWRRFTEPALRMFQRLLALEPERRGPAKEVFRFLKHELTSELRRRPSHRARKPPGDRPPAAGPLRLEAPGPLKRTVLTESGSGSRPAPPAVGSVPLPVPVPVPVPVPVPVPEPGLAPQGPPGRTDGRADKSKGQVVLATAIEICV

SEQ ID NO: 5732 - protein, 543 aa, Homo sapiens
MATRRLGVGETLGALNAALGPGGPVWIKETRTRHLRSRDFLAPHRALQARFDDGQVPEHLLHALACLQGPGVAPVLRCAPTPAGLSLQLQRSAVFERVLSAVAAYATPASPASLGQRVLLHCPALRSSPCALRLSQLRTVLVADHLARALRAHGVCVRLVPAVRDPHMLTFLQQLRVDWPAASERASSHTLRSHALEELTSANDGRTLSPGILGRLCLKELVEEQGRTAGYDPNLDNCLVTEDLLSVLAELQEALWHWPEDSHPGLAGASDTGTGGCLVVHVVSCEEEFQQQKLDLLWQKLVDKAPLRQKHLICGPVKVAGAPGTLMTAPEYYEFRHTQVCKASALKHGGDLAQDPAWTEIFGVLSVATIKFEMLSTAPQSQLFLALADSSISTKGTKSGTFVMYNCARLATLFESYKCSMEQGLYPTFPPVSSLDFSLLHDEGEWLLLFNSILPFPDLLSRTAVLDCTAPGLHIAVRTEMICKFLVQLSMDFSSYYNRVHILGEPRPHLFGQMFVRLQLLRAVREVLHTGLAMLGLPPLSHI

SEQ ID NO: 5733 - protein, 450 aa, Homo sapiens
MGKSFANFMCKKDFHPASKSNIKKVWMAEQKISYDKKKQEELMQQYLKEQESYDNRLLMGDERVKNGLNFMYEAPPGAKKENKEKEETEGETEYKFEWQKGAPREKYAKDDMNIRDQPFGIQVRNVRCIKCHKWGHVNTDRECPLFGLSGINASSVPTDGSGPSMHPSELIAEMRNSGFALKRNVLGRNLTANDPSQEYVASEGEEDPEVEFLKSLTTKQKQKLLRKLDRLEKKKKKKDRKKKKFQKSRSKHKKHKSSSSSSSSSSSSSSTETSESSSESESNNKEKKIQRKKRKKNKCSGHNNSDSEEKDKSKKRKLHEELSSSHHNREKAKEKPRFLKHESSREDSKWSHSDSDKKSRTHKHSPEKRGSERKEGSSRSHGREERSRRSRSRSPGSYKQRETRKRAQRNPGEEQSRRNDSRSHGTDLYRGEKMYREHPGGTHTKVTQRE

SEQ ID NO: 5734 - protein, 383 aa, Homo sapiens
MSPEVALNRISPMLSPFISSVVRNGKVGLDATNCLRITDLKSGCTSLTPGPNCDRFKLHIPYAGETLKWDIIFNAQYPELPPDFIFGEDAEFLPDPSALQNLASWNPSNPECLLLVVKELVQQYHQFQCSRLRESSRLMFEYQTLLEEPQYGENMEIYAGKKNNWTGEFSARFLLKLPVDFSNIPTYLLKDVNEDPGEDVALLSVSFEDTEATQVYPKLYLSPRIEHALGGSSALHIPAFPGGGCLIDYVPQVCHLLTNKVQYVIQGYHKRREYIAAFLSHFGTGVVEYDAEGFTKLTLLLMWKDFCFLVHIDLPLFFPRDQPTLTFQSVYHFTNSGQLYSQAQKNYPYSPRWDGNEMAKRAKAYFKTFVPQFQEAAFANGKL

SEQ ID NO: 5735 - protein, 224 aa, Homo sapiens
MPNRCGIIHVRGPMPPNRISHGEVLEWQKTFEEKLTPLLSVRESLSEEEAQKMGRKDPEQEVEKFVTSNTQELGKDKWLCPLSGKKFKGPEFVRKHIFNKHAEKIEEVKKEVAFFNNFLTDAKRPALPEIKPAQPPGPAQILPPGLTPGLPYPHQTPQGLMPYGQPRPPIGLWSWCCPPCSPQEALHTPMPRMVLVEGTMMPSEAREVILGNLATGWFVETQGP

SEQ ID NO: 5736 - protein, 1603 aa, Homo sapiens
MEAGSVVRAIFDFCPSVSEELPLFVGDIIEVLAVVDEFWLLGKKEDVTGQFPSSFVEIVTIPSLKEGERLFVCICEFTSQELDNLPLHRGDLVILDGIPTAGWLQGRSCWGARGFFPSSCVRELCLSSQSRQWHSQSALFQIPEYSMGQARALMGLSAQLDEELDFREGDVITIIGVPEPGWFEGELEGRRGIFPEGFVELLGPLRTVDESVSSGNQDDCIVNGEVDTPVGEEEIGPDEDEEEPGTYGVALYRFQALEPNELDFEVGDKIRILATLEDGWLEGSLKGRTGIFPYRFVKLCPDTRVEETMALPQEGSLARIPETSLDCLENTLGVEEQRHETSDHEAEEPDCIISEAPTSPLGHLTSEYDTDRNSYQDEDTAGGPPRSPGVEWEMPLATDSPTSDPTEVVNGISSQPQVPFHPNLQKSQYYSTVGGSHPHSEQYPDLLPLEARTRDYASLPPKRMYSQLKTLQKPVLPLYRGSSVSASRVVKPRQSSPQLHNLASYTKKHHTSSVYSISERLEMKPGPQAQGLVMEAATHSQGDGSTDLDSKLTQQLIEFEKSLAGPGTEPDKILRHFSIMDFNSEKDIVRGSSKLITEQELPERRKALRPPPPRPCTPVSTSPHLLVDQNLKPAPPLVVRPSRPAPLPPSAQQRTNAVSPKLLSRHRPTCETLEKEGPGHMGRSLDQTSPCPLVLVRIEEMERDLDMYSRAQEELNLMLEEKQDESSRAETLEDLKFCESNIESLNMELQQLREMTLLSSQSSSLVAPSGSVSAENPEQRMLEKRAKVIEELLQTERDYIRDLEMCIERIMVPMQQAQVPNIDFEGLFGNMQMVIKVSKQLLAALEISDAVGPVFLGHRDELEGTYKIYCQNHDEAIALLEIYEKDEKIQKHLQDSLADLKSLYNEWGCTNYINLGSFLIKPVQRVMRYPLLLMELLNSTPESHPDKVPLTNAVLAVKEINVNINEYKRRKDLGKNSIIAEKEYAHAEESAFLTYSLVLKYRKGDEDSLMEKISKLNIHSIIKKSNRVSSHLKHLTGFAPQIKDEVFEETEKNFRMQERLIKSFIRDLSLYLQHIRESACVKVVAAVSMWDVCMERGHRDLEQFERVHRYISDQLFTNFKERTERLVISPLNQLLSMFTGPHKLVQKRFDKLLDFYNCTERAEKLKDKKTLEELQSARNNYEALNAQLLDELPKFHQYAQGLFTNCVHGYAEAHCDFVHQALEQLKPLLSLLKVAGREGNLIAIFHEEHSRVLQQLQVFTFFPESLPATKKPFEARGSTIDRQSARKPLLGLPSYMLQSEELRASLLARYPPEKLFQAERNFNAAQDLDVSLLEGDLVGVIKKKDPMGSQNRWLIDNGVTKGFVYSSFLKPYNPRRSHSDASVGSHSSTESEHGSSSPRFPRQNSGSTLTFNPSSMAVSFTSGSCQKQPQDASPPPKECDQGTLSASLNPSNSESSPSRCPSDPDSTSQPRSGDSADVARDVKQPTATPRSYRNFRHPEIVGYSVPGRNGQSQDLVKGCARTAQAPEDRSTEPDGSEAEGNQVYFAVYTFKARNPNELSVSANQKLKILEFKDVTGNTEWWLAEVNGKKGYVPSNYIRKTEYT

SEQ ID NO: 5737 - protein, 531 aa, Homo sapiens
MKCHYEALGVRRDASEEELKKAYRKLALKWHPDKNLDNAAEAAEQFKLIQAAYDVLSDPQERAWYDNHREALLKGGFDGEYQDDSLDLLRYFTVTCYSGYGDDEKGFYTVYRNVFEMIAKEELESVLEEEVDDFPTFGDSQSDYDTVVHPFYAYWQSFCTQKNFAWKEEYDTRQASNRWEKRAMEKENKKIRDKARKEKNELVRQLVAFIRKRDKRVQAHRKLVEEQNAEKARKAEEMRRQQKLKQAKLVEQYREQSWMTMANLEKELQEMEARYEKEFGDGSDENEMEEHELKDEEDGKDSDEAEDAELYDDLYCPACDKSFKTEKAMKNHEKSKKHREMVALLKQQLEEEEENFSRPQIDENPLDDNSEEEMEDAPKQKLSKKQKKKKQKPAQNYDDNFNVNGPGEGVKVDPEDTNLNQDSAKELEDSPQENVSVTEIIKPCDDPKSEAKSVPKPKGKKTKDMKKPVRVPAEPQTMSVLISCTTCHSEFPSRNKLFDHLKATGHARAPSSSSLNSATSSQSKKEKRKNR

SEQ ID NO: 5738 - protein, 450 aa, Homo sapiens
MVVQAAVAPNRSQRLLLKIPYGSLRRRSVERMTEGRRCQVHLLDDRKLELLVQPKLLAKELLDLVASHFNLKEKEYFGIAFTDETGHLNWLQLDRRVLEHDFPKKSGPVVLYFCVRFYIESISYLKDNATIELFFLNAKSCIYKELIDVDSEVVFELASYILQEAKGDFSSNEVVRSDLKKLPALPTQALKEHPSLAYCEDRVIEHYKKLNGQTRGQAIVNYMSIVESLPTYGVHYYAVKDKQGIPWWLGLSYKGIFQYDYHDKVKPRKIFQWRQLENLYFREKKFSVEVHDPRRASVTRRTFGHSGIAVHTWYACPALIKSIWAMAISQHQFYLDRKQSKSKIHAARSLSEIAIDLTETGTLKTSKLANMGSKGKIISGSSGSLLSSGRQRPAGGTPPEHGWDPRGDPGRWGELQLGRLQGKLLQSWLCFPDQGWDPNANLRKLLPGIK

SEQ ID NO: 5739 - protein, 339 aa, Homo sapiens
MEGEPPPVEERRRLQEELNEFVESGCRTLEEVTASLGWDLDSLDPGEEEAAEDEVVICPYDSNHHMPKSSLAKHMASCRLRKMGYTKEEEDEMYNPEFFYENVKIPSITLNKDSQFQIIKQARTAVGKDSDCYNQRIYSSLPVEVPLNHKRFVCDLTQADRLALYDFVVEETKKKRSDSQIIENDSDLFVDLAAKINQDNSRKSPKSYLEILAEVRDYKRRRQSYRAKNVHITKKSYTEVIRDVINVHMEELSNHWQEEQEKAEDDAEKNEERRSASVDSRQSGGSYLDAECSRHRRDRSRSPHKRKRNKDKDKNCESRRRKERDGERHHSHKRRKQKI

SEQ ID NO: 5740 - protein, 2279 aa, Homo sapiens
MAEPSSARRPVPLIESELYFLIARYLSAGPCRRAAQVLVQELEQYQLLPKRLDWEGNEHNRSYEELVLSNKHVAPDHLLQICQRIGPMLDKEIPPSISRVTSLLGAGRQSLLRTAKDCRHTVWKGSAFAALHRGRPPEMPVNYGSPPNLVEIHRGKQLTGCSTFSTAFPGTMYQHIKMHRRILGHLSAVYCVAFDRTGHRIFTGSDDCLVKIWSTHNGRLLSTLRGHSAEISDMAVNYENTMIAAGSCDKIIRVWCLRTCAPVAVLQGHTGSITSLQFSPMAKGSQRYMVSTGADGTVCFWQWDLESLKFSPRPLKFTEKPRPGVQMLCSSFSVGGMFLATGSTDHVIRMYFLGFEAPEKIAELESHTDKVDSIQFCNNGDRFLSGSRDGTARIWRFEQLEWRSILLDMATRISGDLSSEEERFMKPKVTMIAWNQNDSIVVTAVNDHVLKVWNSYTGQLLHNLMGHADEVFVLETHPFDSRIMLSAGHDGSIFIWDITKGTKMKHYFNMIEGQGHGAVFDCKFSQDGQHFACTDSHGHLLIFGFGCSKPYEKIPDQMFFHTDYRPLIRDSNNYVLDEQTQQAPHLMPPPFLVDVDGNPHPTKYQRLVPGRENSADEHLIPQLGYVATSDGEVIEQIISLQTNDNDERSPESSILDGMIRQLQQQQDQRMGADQDTIPRGLSNGEETPRRGFRRLSLDIQSPPNIGLRRSGQVEGVRQMHQNAPRSQIATERDLQAWKRRVVVPEVPLGIFRKLEDFRLEKGEEERNLYIIGRKRKTLQLSHKSDSVVLVSQSRQRTCRRKYPNYGRRNRSWRELSSGNESSSSVRHETSCDQSEGSGSSEEDEWRSDRKSESYSESSSDSSSRYSDWTADAGINLQPPLRTSCRRRITRFCSSSEDEISTENLSPPKRRRKRKKENKPKKENLRRMTPAELANMEHLYEFHPPVWITDTTLRKSPFVPQMGDEVIYFRQGHEAYIEAVRRNNIYELNPNKEPWRKMDLRDQELVKIVGIRYEVGPPTLCCLKLAFIDPATGKLMDKSFSIRYHDMPDVIDFLVLRQFYDEARQRNWQSCDRFRSIIDDAWWFGTVLSQEPYQPQYPDSHFQCYIVRWDNTEIEKLSPWDMEPIPDNVDPPEELGASISVTTDELEKLLYKPQAGEWGQKSRDEECDRIISGIDQLLNLDIAAAFAGPVDLCTYPKYCTVVAYPTDLYTIRMRLVNRFYRRLSALVWEVRYIEHNARTFNEPESVIARSAKKITDQLLKFIKNQHCTNISELSNTSENDEQNAEDLDDSDLPKTSSGRRRVHDGKKSIRATNYVESNWKKQCKELVNLIFQCEDSEPFRQPVDLVEYPDYRDIIDTPMDFGTVRETLDAGNYDSPLEFCKDIRLIFSNAKAYTPNKRSKIYSMTLRLSALFEEKMKKISSDFKIGQKFNEKLRRSQRFKQRQNCKGDSQPNKSIRNLKPKRLKSQTKIIPELVGSPTQSTSSRTAYLGTHKTSAGISSGVTSGDSSDSAESSERARGSRNRPITNGSTLSESEVEDSLATSLSSSASSSSEESKESSRARESSSRSGLSRSSNLRVTRTRAAQRKTGPVSLANGCGARGSATRKRVYLSDSDNNSLETGEILKARAGNNRKVLARGSCAAVAANKIKLMSDVEENSSSESVCSGRKLPHRNASAVARKKLLHNSEDEQSLKSEIEEEELKDENQLLPVSSSHTAQSNVDESENRDSESESDLRVAARGSNWHANGYKSHTPAPSKTKFLKIESSEEDSKSHDSDHACNRTAGPSTSVQKLKAESISEEADSEPGRSGGRKYNTFHKNASFFKKTKILSDSEDSESEEQDREDGKCHKMEMNPISGNLNCDPIAMSQCSSDHGCETDLDSDDDKIEKPNNFMKDSASQDNGLSARGSISRKRVCSSDSDSSLQVVKKSSKARTGLLRITRRCAATAANKIKLMSDVEDVSLENVHTRSKNGRKKPLHLACTTAKKKLSDCEGSVHCEVPSEQYACEGKPPDPDSEGSTKVLSQALNGDSDSEDMLNSEHKHRHTNIHKIDAPSKRKSSSVTSSGEDSKSHIPGSETDRTFSSESTLAQKATAENNFEVELNYGLRRWNGRRLRTYGKAPFSKTKVIHDSQETAEKEVKRKRSHPELENVKISETTGNSKFRPDTSSKSSDLGSVTESDIDCTDNTKTKRRKTKGKAKVVRKGKTFTANISKTVRRQRQSKRPRLSVDDNDWEDLDYAKSKRVLRRSKIKTRNQGRRTVRYHDGDDDRSLENVLDFNGCTL

SEQ ID NO: 5741 - protein, 163 aa, Homo sapiens
MTAPSCAFPVQFRQPSVSGLSQITKSLYISNGVAANNKLMLSSNQITMVINVSVEVVNTLYEDIQYMQVPVADSPNSRLCDFFDPIADHIHSVEMKQGRTLLHCAAGVSRSAALCLAYLMKYHAMSLLDAHTWTKSCRPIIRPNSGFWEQLIHYEFQLFGKNT

SEQ ID NO: 5742 - protein, 251 aa, Homo sapiens
MISTTSKETKKDTKLYCICKTPYDESKFYIGCDLCTNWYHGECVGITEKEAKKMDVYICNDCKRAQEGSSEELYCICRTPYDESQFYIGCDRCQNWYHGRCVGILQSEAELIDEYVCPQCQSTEDAMTVLTPLTEKDYEGLKRVLRSLQAHKMAWPFLEPVDPNDAPDYYGVIKEPMDLATMEERVQRRYYEKLTEFVADMTKIFDNCRYYNPSDSPFYQCAEVLESFFVQKLKGFKASRSHNNKLQSTAS

SEQ ID NO: 5743 - protein, 166 aa, Homo sapiens
MYSLNQEIKAFSRNNLRKQCTRVTTLTGKKIIETWKDARIHVVEEVEPSSGGGCGYVQDLSSDLQVGVIKPWLLLGSQDAAHDLDTLKKNKDGVVLVHCNAGVSRAAAIVIGFLMNSEQTSFTSAFSLVKNARPSICPNSGFMEQLRTYQEGKESNKCDRIQENSS

SEQ ID NO: 5744 - protein, 320 aa, Homo sapiens
MSKSASPKEPEQLRKLFIGGLSFETTDESLRSHFEQWGTLTDCVVMRDPNTKRSRGFGFVTYATVEEVDAAMNTTPHKVDGRVVEPKRAVSREDSQRPGAHLTVKKIFVGGIKEDTEEHHLRDYFEQYGKIEVIEIMTDRGSGKKRGFAFVTFDDHDSVDKIVIQKYHTVKGHNCEVRKALPKQEMASASSSQRGRRGSGNFGGGRGDGFGGNDNFGRGGNFSGRGGFGGSCGGGGYGGSGDGYNGFGNDGSNFGGGGSYNDFGNYNNQSSNFGPMKGGNFGGRSSGPYGGGGQYFAKPQNQGGYGVSSSSSSYGSGRRF

SEQ ID NO: 5745 - protein, 118 aa, Homo sapiens
MSLLNKPKSEMTPEELQKREEEEFNTGPLSVLTQSVKNNTQVLINCRNNKKLLGRVKAFDRHCNMVLENVKEMWTEVPKSGKGKKKSKPVNKDRYISKMFLRGDSVIVVLRNPLIAGK

SEQ ID NO: 5746 - protein, 392 aa, Homo sapiens
MKDTLGQAQQRVAELEPLKEQLRGAQELAASSQQKATLLGEELASAAAARDRTIAELHRSRLEVAEVNGRLAELGLHLKEEKCQWSKERAGLLQSVEAEKDKILKLSAEILRLEKAVQEERTQNQVFKTELAREKDSSLVQLSESKRELTELRSALRVLQKEKEQLQEEKQELLEYMRKLEARLEKVADEKWNEDATTEDEEAAVGLSCPAALTDSEDESPEDMRLPPYGLCERGDPGSSPAGPREASPLVVISQPAPISPHLSGPAEDSSSDSEAEDEKSVLMAAVQSGGEEANLLLPELGSAFYDMASTIFCRAQIALLPLSPASTPSPTTSGFTVGTLSETSTGGPATPTWKECPICKERFPAESDKDALEDHMDGHFFFSTQDPFTFE

SEQ ID NO: 5747 - protein, 199 aa, Homo sapiens
MTPLAPWDPKYEAKAGPRPVWGANCSSGASFSGRTLCHPSFWPLYEAASGRGLRPVAPATGHWNGQQAPPDAGFPVVCCEDVFLSDPLLPRGQRVPLYLSKAPQQMMGSLKLLPPPPIMSARVLPRPSPSRGPSTAWLSGPELIALTGLLQMSQGEPRPSSSAVGPPDHTSDPPSPCGSPSSSQGADLSLPQTPDTHCP

SEQ ID NO: 5748 - protein, 384 aa, Homo sapiens
MEGLGRSCLWLRRELSPPRPRLLLLDCRSRELYESARIGGALSVALPALLLRRLRRGSLSVRALLPGPPLQPPPPAPVLLYDQGGGRRRRGEAEAEAEEWEAESVLGTLLQKLREEGYLAYYLQGGFSRFQAECPHLCETSLAGRAGSSMAPVPGPVPVVGLGSLCLGSDCSDAESEADRDSMSCGLDSEGATPPPVGLRASFPVQILPNLYLGSARDSANLESLAKLGIRYILNVTPNLPNFFEKNGDFHYKQIPISDHWSQNLSRFFPEAIEFIDEALSQNCGVLVHCLAGVSRSVTVTVAYLMQKLHLSLNDAYDLVKRKKSNISPNFNFMGQLLDFERSLRLEERHSQEQGSGGQASAASNPPSFFTTPTSDGAFELAPT

SEQ ID NO: 5749 - protein, 735 aa, Homo sapiens
MAEPLLRKTFSRLRGREKLPRKKSDAKERGHPAQRPEPSPPEPEPQAPEGSQAGAEGPSSPEASRSPARGAYLQSLEPSSRRWVLGGAKPAEDTSLGPGVPGTGEPAGEIWYNPIPEEDPRPPAPEPPGPQPGSAESEGLAPQGAAPASPPTKASRTKSPGPARRLSIKMKKLPELRRRLSLRGPRAGRERERAAPAGSVISRYHLDSSVGGPGPAAGPGGTRSPRAGYLSDGDSPERPAGPPSPTSFRPYEVGPAARAPPAALWGRLSLHLYGLGGLRPAPGATPRDLCCLLQVDGEARARTGPLRGGPDFLRLDHTFHLELEAARLLRALVLAWDPGVRRHRPCAQGTVLLPTVFRGCQAQQLAVRLEPQGLLYAKLTLSEQQEAPATAEPRVFGLPLPLLVERERPPGQVPLIIQKCVGQIERRGLRVVGLYRLCGSAAVKKELRDAFERDSAAVCLSEDLYPDINVITGILKDYLRELPTPLITQPLYKVVLEAMARDPPNRVPPTTEGTRGLLSCLPDVERATLTLLLDHLRLVSSFHAYNRMTPQNLAVCFGPVLLPARQAPTRPRARSSGPGLASAVDFKHHIEVLHYLLQSWPDPRLPRQSPDVAPYLRPKRQPPLHLPLADPEVVTRPRGRGGPESPPSNRYAGDWSVCGRDFLPCGRDFLSGPDYDHVTGSDSEDEDEEVGEPRVTGDFEDDFDAPFNPHLNLKDFDALILDLERELSKQINVCL

SEQ ID NO: 5750 - protein, 219 aa, Homo sapiens
MPRGRKSRRRRNARAAEENRNNRKIQASEASETPMAASVVASTPEDDLSGPEEDPSTPEEASTTPEEASSTAQAQKPSVPRSNFQGTKKSLLMSILALIFIMGNSAKEALVWKVLGKLGMQPGRQHSIFGDPKKIVTEEFVRRGYLIYKPVPRSSPVEYEFFWGPRAHVESSKLKVMHFVARVRNRCSKDWPCNYDWDSDDDAEVEAILNSGARGYSAP

SEQ ID NO: 5751 - protein, 233 aa, Homo sapiens
MNLNFTSPLHPASSQRPTSFFIEDILLHKPKPLREVAPDHFASSLASRVPLLDYGYPLMPTPTLLAPHAHHPLHKGDHHHPYFLTTSGMPVPALFPHPQHAELPGKHCRRRKARTVFSDSQLSGLEKRFEIQRYLSTPERVELATALSLSETQVKTWFQNRRMKHKKQLRKSQDEPKAPDGPESPEGSPRGSEAATAAEARLSLPAGPFVLTEPEDEVDIGDEGELGSGPHVL

SEQ ID NO: 5752 - protein, 290 aa, Homo sapiens
MELPAVGEHVFAVESIEKKRIRKGRVEYLVKWRGWSPKYNTWEPEENILDPRLLIAFQNRERQEQLMGYRKRGPKPKPLVVQVPTFARRSNVLTGLQDSSTDNRAKLDLGAQGKGQGHQYELNSKKHHHHAVGLNLSHVRKRCLSETHGEREPCKKRLTARSISTPTCLGGSPAAERPADLPPAAALPQPEVILLDSDLDEPIDLRCVKTRSEAGEPPSSLQVKPETPASAAVAVAAAAAPTTTAEKPPAEAQDEPAESLSEFKPFFGNIIITDVTANCLTVTFKEYVTV

SEQ ID NO: 5753 - protein, 247 aa, Homo sapiens
MTEDSQRNFRSVYYEKVGFRGVEEKKSLEILLKDDRLDTEKLCTFSQRFPLPSMYRALVWKVLLGILPPHHESHAKVMMYRKEQYLDVLHALKVVRFVSDATPQAEVYLRMYQLESGKLPRSPSFPLPKAFEQYLNLEDGRLLTHLRMCSAAPKLPYDLWFKRCFAGCLPESSLQRVWDKVVSGSCKILVFVAVEILLTFKIKVMALNSAEKITKFLENIPQDSSDAIVSKAIDLWHKHCGTPVHSS

SEQ ID NO: 5754 - protein, 181 aa, Homo sapiens
MVSSCCGSVSSEQSCGLENCCRPSCCQTTCCRTTCCRPSCCKPQCCQSVCYQPTCCHPSCCISSCCRPYCCESSCCRPCCCQTTCCRTTCCRTTCCCPSCCVSSCCRPQCCQSVCCQPTCCRPSCCISSCCHPSCCESSCCRPCCCVRPVCGRVSCHTTCYRPTCVISTCPRPLCCASSCC

SEQ ID NO: 5755 - protein, 361 aa, Homo sapiens
MALNVAPVRDTKWLTLEVCRQFQRGTCSRSDEECKFAHPPKSCQVENGRVIACFDSLKGRCSRENCKYLHPPTHLKTQLEINGRNNLIQQKTAAAMLAQQMQFMFPGTPLHPVPTFPVGPAIGTNTAISFAPYLAPVTPGVGLVPTEILPTTPVIVPGSPPVTVPGSTATQKLLRTDKLEVCREFQRGNCARGETDCRFAHPADSTMIDTSDNTVTVCMDYIKGRCMREKCKYFHPPAHLQAKIKAAQHQANQAAVAAQAAAAAATVMAFPPGALHPLPKRQALEKSNGTSAVFNPSVLHYQQALTSAQLQQHAAFIPTDNSEIISRNGMECQESALRITKHCYCTYYPVSSSIELPQTAC

SEQ ID NO: 5756 - protein, 338 aa, Homo sapiens
MLKNKGHSSKKDNLAVNAVALQDHILHDLQLRNLSVADHSKTQVQKKENKSLKRDTKAIIDTGLKKTTQCPKLEDSEKEYVLDPKPPPLTLAQKLGLIGPPPPPLSSDEWEKVKQRSLLQGDSVQPCPICKEEFELRPQVFSIRGKNQYQTRVIHDGARLFRIKCVTRIQAYWRGCVVRKWYRNLRKTVPPTDAKLRKKFFEKKFTEISHRILCSYNTNIEELFAEIDQCLAINRSVLQQLEEKCGHEITEEEWEKIQVQALRRETHECSICLAPLSAAGGQRVGAGRRSREMALLSCSHVFHHACLLALEEFSVGDRPPFHACPLCRSCYQKKILEC

SEQ ID NO: 5757 - protein, 365 aa, Homo sapiens
MAAAAAGTATSQRFFQSFSDALIDEDPQAALEELTKALEQKPDDAQYYCQRAYCHILLGNYCVAVADAKKSLELNPNNSTAMLRKGICEYHEKNYAAALETFTEGQKLDIETGFHRVGQAGLQLLTSSDPPALDSQSAGITGADANFSVWIKRCQEAQNGSESEVWTHQSKIKYDWYQTESQVVITLMIKNVQKNDVNVEFSEKELSALVKLPSGEDYNLKLELLHPIIPEQSTFKVLSTKIEIKLKKPEAVRWEKLEGQGDVPTPKQFVADVKNLYPSSSPYTRNWDKLVGEIKEEEKNEKLEGDAALNRLFQQIYSDGSDEVKRAMNKSFMESGGTVLSTNWSDVGKRKVEINPPDDMEWKKY

SEQ ID NO: 5758 - protein, 462 aa, Homo sapiens
MDKDSQGLLDSSLMASGTASRSEDEESLAGQKRASSQALGTIPKRRSSSRFIKRKKFDDELVESSLAKSSTRAKGASGVEPGRCSGSEPSSSEKKKVSKAPSTPVPPSPAPAPGLTKRVKKSKQPLQVTKDLGRWKPADDLLLINAVLQTNDLTSVHLGVKFSCRFTLREVQERWYALLYDPVISKLACQAMRQLHPEAIAAIQSKALFSKAEEQLLSKVGSTSQPTLETFQDLLHRHPDAFYLARTAKALQAHWQLMKQYYLLEDQTVQPLPKGDQVLNFSDAEDLIDDSKLKDMRDEVLEHELMVADRRQKREIRQLEQELHKWQVLVDSITGMSSPDFDNQTLAVLRGRMVRYLMRSREITLGRATKDNQIDVDLSLEGPAWKISRKQGVIKLKNNGDFFIANEGRRPIYIDGRPVLCGSKWRLSNNSVVEIASLRFVFLINQDLIALIRAEAAKITPQ

SEQ ID NO: 5759 - protein, 320 aa, Homo sapiens
MSVGFIGAGQLAYALARGFTAAGILSAHKIIASSPEMNLPTVSALRKMGVNLTRSNKETVKHSDVLFLAVKPHIIPFILDEIGADVQARHIVVSCAAGVTISSVEKKLMAFQPAPKVIRCMTNTPVVVQEGATVYATGTHALVEDGQLLEQLMSSVGFCTEVEEDLIDAVTGLSGSGPAYAFMALDALADGGVKMGLPRRLAIQLGAQALLGAAKMLLDSEQHPCQLKDNVCSPGGATIHALHFLESGGFRSLLINAVEASCIRTRELQSMADQEKISPAALKKTLLDRVKLESPTVSTLTPSSPGKLLTRSLALGGKKD

SEQ ID NO: 5760 - protein, 789 aa, Homo sapiens
MEDGPSNNASCFRRLTECFLSPSLTDEKVKAYLSLHPQVLDEFVSESVSAETVEKWLKRKNNKSEDESAPKEVSRYQDTNMQGVVYELNSYIEQRLDTGGDNQLLLYELSSIIKIATKADGFALYFLGECNNSLCIFTPPGIKEGKPRLIPAGPITQGTTVSAYVAKSRKTLLVEDILGDERFPRGTGLESGTRIQSVLCLPIVTAIGDLIGILELYRHWGKEAFCLSHQEVATANLAWASVAIHQVQVCRGLAKQTELNDFLLDVSKTYFDNIVAIDSLLEHIMIYAKNLVNADRCALFQVDHKNKELYSDLFDIGEEKEGKPVFKKTKEIRFSIEKGIAGQVARTGEVLNIPDAYADPRFNREVDLYTGYTTRNILCMPIVSRGSVIGVVQMVNKISGSAFSKTDENNFKMFAVFCALALHCANMYHRIRHSECIYRVTMEKLSYHSICTSEEWQGLMQFTLPVRLCKEIELFHFDIGPFENMWPGIFVYMVHRSCGTSCFELEKLCRFIMSVKKNYRRVPYHNWKHAVTVAHCMYAILQNNHTLFTDLERKGLLIACLCHDLDHRGFSNSYLQKFDHPLAALYSTSTMEQHHFSQTVSILQLEGHNIFSTLSSSEYEQVLEIIRKAIIATDLALYFGNRKQLEEMYQTGSLNLNNQSHRDRVIGLMMTACDLCSVTKLWPVTKLTANDIYAEFWAEGDEMKKLGIQPIPMMDRDKKDEVPQGQLGFYNAVAIPCYTTLTQILPPTEPLLKACRDNLSQWEKVIRGEETATWISSPSVAQKAAASED

SEQ ID NO: 5761 - protein, 214 aa, Homo sapiens
MDDSETGFNLKVVLVSFKQCLDEKEEVLLDPYIASWKGLVRFLNSLGTIFSFISKDVVSKLRIMERLRGGPQSEHYRSLQAMVAHELSNRLVDLERRSHHPESGCRTVLRLHRALHWLQLFLEGLRTSPEDARTSALCADSYNASLAAYHPWVVRRAVTVAFCTLPTREVFLEAMNVGPPEQAVQMLGEALPFIQRVYNVSQKLYAEHSLLDLP

SEQ ID NO: 5762 - protein, 1432 aa, Homo sapiens
MTSAAEIKKPPVAPKPKFVVANNKPAPPPIAPKPDIVISSVPQSTKKMKPAIAPKPKVLKTSPVREIGQSPSRKIMLNLEGHKQELAESTDNFNCKYEGNQSNDYISPMCSCSSECIHKLGHRENLCVKQLVLEPLEMNENLENSKIDETLTIKTRSKCDLYGEKAKNQGGVVLKASVLEEELKDALIHQMPPFISAQKHRPTDSPEMNGGCNSNGQFRIEFADLSPSPSSFEKVPDHHSCHLQLPSDECEHFETCQDDSEKSNNCFQSSELEALENGKRSTLISSDGVSKKSEVKDLGPLEIHLVPYTPKFPTPKPRKTRTARLLRQKCVDTPSESTEEPGNSDSSSSCLTENSLKINKISVLHQNVLCKQEQVDKMKLGNKSELNMESNSDAQDLVNSQKAMCNETTSFEKMAPSFDKDSNLSSDSTTVDGSSMSLAVDEGTGFIRCTVSMSLPKQLKLTCNEHLQSGRNLGVSAPQMQKESVIKEENSLRIVPKKPQRHSLPATGVLKKAASEELLEKSSYPSSEEKSSEKSLERNHLQHLCAQNRGVSSSFDMPKRASEKPVWKLPHPILPFSGNPEFLKSVTVSSNSEPSTALTKPRAKSLSAMDVEKCTKPCKDSTKKNSFKKLLSMKLSICFMKSDFQKFWSKSSQLGDTTTGHLSSGEQKGIESDWQGLLVGEEKRSKPIKAYSTENYSLESQKKRKKSRGQTSAANGLRAESLDDQMLSRESSSQAPYKSVTSLCAPEYENIRHYEEIPEYENLPFIMAIRKTQELEWQNSSSMEDADANVYEVEEPYEAPDGQLQLGPRHQHSSSGASQEEQNDLGLGDLPSDEEEIINSSDEDDVSSESSKGEPDPLEDKQDEDNGMKSKVHHIAKEIMSSEKVFVDVLKLLHIDFRDAVAHASRQLGKPVIEDRILNQILYYLPQLYELNRDLLKELEERMLHWTEQQRIADIFVKKGPYLKMYSTYIKEFDKNIALLDEQCKKNPGFAAVVREFEMSPRCANLALKHYLLKPVQRIPQYRLLLTDYLKNLIEDAGDYRDTQDALAVVIEVANHANDTMKQGDNFQKLMQIQYSLNGHHEIVQPGRVFLKEGILMKLSRKVMQPRMFFLFNDALLYTTPVQSGMYKLNNMLSLAGMKVRKPTQEAYQNELKIESVERSFILSASSATERDEWLEAISRAIEEYAKKRITFCPSRSLDEADSENKEEVSPLGSKAPIWIPDTRATMCMICTSEFTLTWRRHHCRACGKIVCQACSSNKYGLDYLKNQPARVCEHCFQELQKLDHQHSPRIGSPGNHKSPSSALSSVLHSIPSGARGSQKKIPAALKEVSANTEDSSMSGYLYRSKGNKKPWKHFWFVIKNKVLYTYAASEDVAALESQPLLGFTVIQVKDENSESKVFQLLHKNMLFYVFKAEDAHSAQKWIEAFQEGTIL

SEQ ID NO: 5763 - protein, 546 aa, Homo sapiens
MGAYLSQPNTVKCSGDGVGAPRLPLPYGFSAMQGWRVSMEDAHNCIPELDSETAMFSVYDGHGGEEVALYCAKYLPDIIKDQKAYKEGKLQKALEDAFLAIDAKLTTEEVIKELAQIAGRPTEDEDEKEKVADEDDVDNEEAALLHEEATMTIEELLTRYGQNCHKGPPHSKSGGGTGEEPGSQGLNGEAGPEDSTRETPSQENGPTAKAYTGFSSNSERGTEAGQVGEPGIPTGEAGPSCSSASDKLPRVAKSKFFEDSEDESDEAEEEEEDSEECSEEEDGYSSEEAENEEDEDDTEEAEEDDEEEEEEMMVPGMEGKEEPGSDSGTTAVVALIRGKQLIVANAGDSRCVVSEAGKALDMSYDHKPEDEVELARIKNAGGKVTMDGRVNGGLNLSRAIGDHFYKRNKNLPPEEQMISALPDIKVLTLTDDHEFMVIACDGIWNVMSSQEVVDFIQSKISQRDENGELRLLSSIVEELLDQCLAPDTSGDGTGCDNMTCIIICFKPRNTAELQPESGKRKLEEVLSTEGAEENGNSDKKKKAKRD

SEQ ID NO: 5764 - protein, 90 aa, Homo sapiens
MSTAMNFGTKSFQPRPPDKGSFPLDHLGECKSFKEKFMKCLHNNNFENALCRKESKEYLECRMERKLMLQEPLEKLGFGDLTSGKSEAKK

SEQ ID NO: 5765 - protein, 241 aa, Homo sapiens
MNSGRPETMENLPALYTIFQGEVAMVTDYGAFIKIPGCRKQGLVHRTHMSSCRVDKPSEIVDVGDKVWVKLIGREMKNDRIKVSLSMKVVNQGTGKDLDPNNVIIEQEERRRRSFQDYTGQKITLEAVLNTTCKKCGCKGHFAKDCFMQPGGTKYSLIPDEEEEKEEAKSAEFEKPDPTRNPSRKRKKEKKKKKHRDRKSSDSDSSDSESDTGKRARHTSKDSKAAKKKKKKKKHKKKHKE

SEQ ID NO: 5766 - protein, 585 aa, Homo sapiens
MAAAAAAVGPGAGGAGSAVPGGAGPCATVSVFPGARLLTIGDANGEIQRHAEQQALRLEVRAGPDSAGIALYSHEDVCVFKCSVSRETECSRVGKQSFIITLGCNSVLIQFATPNDFCSFYNILKTCRGHTLERSVFSERTEESSAVQYFQFYGYLSQQQNMMQDYVRTGTYQRAILQNHTDFKDKIVLDVGCGSGILSFFAAQAGARKIYAVEASTMAQHAEVLVKSNNLTDRIVVIPGKVEEVSLPEQVDIIISEPMGYMLFNERMLESYLHAKKYLKPSGNMFPTIGDVHLAPFTDEQLYMEQFTKANFWYQPSFHGVDLSALRGAAVDEYFRQPVVDTFDIRILMAKSVKYTVNFLEAKEGDLHRIEIPFKFHMLHSGLVHGLAFWFDVAFIGSIMTVWLSTAPTEPLTHWYQVRCLFQSPLFAKAGDTLSGTCLLIANKRQSYDISIVAQVDQTGSKSSNLLDLKNPFFRYTGTTPSPPPGSHYTSPSENMWNTGSTYNLSSGMAVAGMPTAYDLSSVIASGSSVGHNNLIPLGSSGAQGSGGGSTSAHYAVNSQFTMGGPAISMASPMSIPTNTMHYGS

SEQ ID NO: 5767 - protein, 256 aa, Homo sapiens
MASGRPEELWEAVVGAAERFRARTGTELVLLTAAPPPPPRPGPCAYAAHGRGALAEAARRCLHDIALAHRAATAARPPAPPPAPQPPSPTPSPPRPTLAREDNEEDEDEPTETETSGEQLGISDNGGLFVMDEDATLQDLPPFCESDPESTDDGSLSEETPAGPPTCSVPPASALPTQQYAKSLPVSVPVWGFKEKRTEARSSDEENGPPSSPDLDRIAASMRALVLREAEDTQVFGDLPRPRLNTSDFQKLKRKY

SEQ ID NO: 5768 - protein, 1430 aa, Homo sapiens
MCLESNLSSCKHLPCCGKLHFQSCHGNVHKLHQFPSLQGCTSAGYFPCSDFTSGAPGHLEEHISQSELTPHLCTNSLHLNVVPPVCLKGSLYCEDCLNKPARNSIIDAAKVWPNIPPPNTQPAPLAVPLCNGCGTKGTGKETTLLLATSLGKAASKFGSPEVAVAGQVLENLPPIGVFWDIENCSVPSGRSATAVVQRIREKFFKGHREAEFICVCDISKENKEVIQELNNCQVTVAHINATAKNAADDKLRQSLRRFANTHTAPATVVLVSTDVNFALELSDLRHRHGFHIILVHKNQASEALLHHANELIRFEEFISDLPPRLPLKMPQCHTLLYVYNLPANKDGKSVSNRLRRLSDNCGGKVLSITGCSAILRFINQDSAERAQKRMENEDVFEKKDKEETVFQVSYPSAFSKLVASRQVSPLLASQSWSSRASPLAFNIANSSSEADCPDPFANGADVQVSNIDYRLSRKELQQLLQEAFARHGKVKSVELSPHTDYQLKAVVQMENLQDAIGAVNSLHRYKIGSKKILVSLATGAASKSLSLLRFGHKLNVSDLYKLTDTVAIREQGNGRLVCLLPSSQARQSPLGSSQSHDGSSTNCSPIIFEELEYHEPVCRQHCSNKDFSFPDCYIAEFGDLEVVQENQGGVPLEHFITCVPGVNIATAQNGIKVVKWIHNKPPPPNTDPWLLRSKSPVGNPQLIQFSREVIDLLKSQPSCVIPISHFIPSYHHHFAKQCRVSDYGYSKLIELLEAVPHVLQILGMGSKRLLTLTHRAQVKRFTQDLLKLLKSQASKQVIVREFSQAYHWCFSKDWDVTEYGVCELIDIVSEIPDTTICLSQQDNEMVICIPKRERTQDEIERTKQFSKDVVDLLRHQPHFRMPFNKFIPSYHHHFGRQCKLAYYGFTKLLELFEAIPDTLQVLECGEEKILTLTEVERFKALAAQFVKLLRSQKDNCLMMTDLLTEYAKTFGYTFRLQDYDVSSISALTQKLCHVVKVADIESGRQIQLINRKSLRSLTAQLLVLLMSWEGTTHLSVEELKRHYESTHNTPLNPCEYGFMTLTELLKSLPYLVETAAAFDLQIELKFAGGYSLLLEEILEYIPPPFLSPLPSFLPPPPFFFFVFFVIFIFFIFVFVQFVVFVFFIVVFVFFIVVFVFTNDKMEECVKLTSLYLFAKNVRSLLHTYHYQQIFLHEFSMAYTKYVGETLQPKTYGHSSVEELLGAIPQVVVQFLQKNGKELSCENYLNLYAKAGRLSSLSLSPANHENQPSEGERILEVPESHTASELKLGADGSGPSHTEQELLRLTDDSPVDLLCAPVPSCLPSPQLRPDPVILQSADLIQFEERPQEPSEIMILNQEEKMEIPIPGKSKTLTSDSSSSCISAAVPVPPCPSSETSESLLSKDPVESPAKKQPKNRVKLAANFSLAPITKL

SEQ ID NO: 5769 - protein, 780 aa, Homo sapiens
MGQLRDWFPNTQDLAGNDQENIRHADRNNSDDNHLASEDTSAKQSGKPGIYEDRDPLRVSISREQSFFGSPLAHDPFSCLQLVGQENVCGDDYDEAVKLKESVVENHAVLSYAVEEEHAYLGPTVKPDDKAKTLSYEPLSSATVSTGSLLSYENTDLSLTDPESFSEHMDDSKQESTTSKEEETNIISSIVPSTQDIYQRQNSSDVHKSLLPAVDETTCGHTHFQQMIDKYINEANLIPEKTDLQELEHIFPNLHHQLFKPLEPHPDFDLSSSSSGISPDNRDFYQRSDSSSESHCATGLSKSTVYFTALRRTSMHSSLNTSPNQQPDTNLAHVGAHSFATENIIGGSEQCFEQLQPEYSSQEESQHADLPSIFSIEARDSSQGMKNQNYPSEEHTEILQNKKKIVHFQLSIGNLSSVYSSSDEANVFDQLNVQHSTPCGSNSSECSTKHQLESRKESMGFEELSKRGVVTMLQSQGLIEDNKNETCRVLDINPQVEETDSRLCVRTVEMGTSIQAPYSLTTQNEKYFENSAETDIPKITKKLSQLGESELFASSGSFSLQSSIPVWETETGHGIMEEPELTLISTTDTSIAEMDFANLTLEEKSENEAKCFFQVSEFLPLVSATEASDYPAVSELSIEKAAASTETPRRLTPVPGSLQEAFIKRKKSFMERSHQRQKEIRNKIHVSENSQIKTVKEKPSISSSVSRLKGVNKVRASFPEDRKTTQALRHQRGLRLYNQLAEVKQQKEEKTKQEAYAQNRARAKEFHKKTLEKLRAKNTC

SEQ ID NO: 5770 - protein, 170 aa, Homo sapiens
MGKRYFCDYCDRSFQDNLHNRKKHLNGLQHLKAKKVWYDMFRDAAAILLDEQNKRPCRKFLLTGQCDFGSNCRFSHMSERDLQELSIQVEEERRAREWLLDAPELPEGHLEDWLEKRAKRLSSAPSSRAEPIRTTVFQYPVGWPPVQELPPSLRAPPPGGWPLQPRVQWG

SEQ ID NO: 5771 - protein, 513 aa, Homo sapiens
MASVLSRRLGKRSLLGARVLGPSASEGPSAAPPSEPLLEGAAPQPFTTSDDTPCQEQPKEVLKAPSTSGLQQVAFQPGQKVYVWYGGQECTGLVEQHSWMEGQVTVWLLEQKLQVCCRVEEVWLAELQGPCPQAPPLEPGAQALAYRPVSRNIDVPKRKSDAVEMDEMMAAMVLTSLSCSPVVQSPPGTEANFSASRAACDPWKESGDISDSGSSTTSGHWSGSSGVSTPSPPHPQASPKYLGDAFGSPQTDHGFETDPDPFLLDEPAPRKRKNSVKVMYKCLWPNCGKVLRSIVGIKRHVKALHLGDTVDSDQFKREEDFYYTEVQLKEESAAAAAAAAAGTPVPGTPTSEPAPTPSMTGLPLSALPPPLHKAQSSGPEHPGPESSLPSGALSKSAPGSFWHIQADHAYQALPSFQIPVSPHIYTSVSWAAAPSAACSLSPVRSRSLSFSEPQQPAPAMKSHLIVTSPPRAQSGARKARGEAKKCRKVYGIEHRDQWCTACRWKKACQRFLD

SEQ ID NO: 5772 - protein, 184 aa, Homo sapiens
MGNGMNKILPGLYIGNFKDARDAEQLSKNKVTHILSVHDSARPMLEGVKYLCIPAADSPSQNLTRHFKESIKFIHECRLRGESCLVHCLAGVSRSVTLVIAYIMTVTDFGWEDALHTVRAGRSCANPNVGFQRQLQEFEKHEVHQYRQWLKEEYGESPLQDAEEAKNILAAPGILKFWAFLRRL

SEQ ID NO: 5773 - protein, 213 aa, Homo sapiens
MLQLRDSVDSAGTSPTAVLAAGEEVGAGGGPGGGRPGAGTPLRQTLWPLSIHDPTRRARVKEYFVFRPGSIEQAVEEIRVVVRPVEDGEIQGVWLLTEREGFGIRIQWDKQSRPSFINRWNPWSTNVPYATFTEHPMAGADEKTASLCQLESFKALLIQAVKKAQKESPLPGQANGVLILERPLLIETYVGLMSFINNEAKLGYSMTRGKIGF

SEQ ID NO: 5774 - protein, 295 aa, Homo sapiens; identical to SEQ ID NO: 5678

SEQ ID NO: 5775 - protein, 1288 aa, Homo sapiens
MPRKGTQPSTARRREEGPPPPSPDGASSDAEPEPPSGRTESPATAAETASEELDNRSLEEILNSIPPPPPPAMTNEAGAPRLMITHIVNQNFKSYAGEKILGPFHKRFSCIIGPNGSGKSNVIDSMLFVFGYRAQKIRSKKLSVLIHNSDEHKDIQSCTVEVHFQKIIDKEGDDYEVIPNSNFYVSRTACRDNTSVYHISGKKKTFKDVGNLLRSHGIDLDHNRFLILQGEVEQIAMMKPKGQTEHDEGMLEYLEDIIGCGRLNEPIKVLCRRVEILNEHRGEKLNRVKMVEKEKDALEGEKNIAIEFLTLENEIFRKKNHVCQYYIYELQKRIAEMETQKEKIHEDTKEINEKSNILSNEMKAKNKDVKDTEKKLNKITKFIEENKEKFTQLDLEDVQVREKLKHATSKAKKLEKQLQKDKEKVEEFKSIPAKSNNIINETTTRNNALEKEKEKEEKKLKEVMDSLKQETQGLQKEKESREKELMGFSKSVNEARSKMDVAQSELDIYLSRHNTAVSQLTKAKEALIAASETLKERKAAIRDIEGKLPQTEQELKEKEKELQKLTQEETNFKSLVHDLFQKVEEAKSSLAMNRSRGKVLDAIIQEKKSGRIPGIYGRLGDLGAIDEKYDVAISSCCHALDYIVVDSIDIAQECVNFLKRQNIGVATFIGLDKMAVWAKKMTEIQTPENTPRLFDLVKVKDEKIRQAFYFALRDTLVADNLDQATRVAYQKDRRWRVVTLQGQIIEQSGTMTGGGSKVMKGRMGSSLVIEISEEEVNKMESQLQNDSKKAMQIQEQKVQLEERVVKLRHSEREMRNTLEKFTASIQRLIEQEEYLNVQVKELEANVLATAPDKKKQKLLEENVSAFKTEYDAVAEKAGKVEAEVKRLHNTIVEINNHKLKAQQDKLDKINKQLDECASAITKAQVAIKTADRNLQKAQDSVLRTEKEIKDTEKEVDDLTAELKSLEDKAAEVVKNTNAAEESLPEIQKEHRNLLQELKVIQENEHALQKDALSIKLKLEQIDGHIAEHNSKIKYWHKEISKISLHPIEDNPIEEISVLSPEDLEAIKNPDSITNQIALLEARCHEMKPNLGAIAEYKKKEELYLQRVAELDKITYERDSFRQAYEDLRKQRLNEFMAGFYIITNKLKENYQMLTLGGDAELELVDSLDPFSEGIMFSVRPPKKSWKKIFNLSGGEKTLSSLALVFALHHYKPTPLYFMDEIDAALDFKNVSIVAFYIYEQTKNAQFIIISLRNNMFEISDRLIGIYKTYNITKSVAVNPKEIASKGLC

SEQ ID NO: 5776 - protein, 951 aa, Homo sapiens
MLGSMARKKPRNTSRLPLALNPLKSKDVLAVLAERNEAIVPVGAWVEPASPGSSEIPAYTSAYLIEEELKEQLRKKQEALKHFQKQVKYRVNQQIRLRKKQQLQKSYERAQKEGSIAMQSSATHLTSKRTSVFPNNLNVAIGSSRLPPSLMPGDGIEDEENQNELFQQQAQALSETMKQARHRLASFKTVIKKKGSVFPDDGRKSFLTREEVLSRKPASTGINTGIRGELPIKVHQGLLAAVPYQNYMENQELDYEEPDYEESSSLVTDEKGKEDLFGRGQQDQQAIHSEDKNKPFSRVQKVKFKNPLFVLMEEEEQKQLHFEGLQDILPEAQDYFLEAQGDLLETQGDLTGIQSVKPDTQAVEMKVQVTEPEGQAIEPEGQPIKTETQGIMLKAQSIELEEGSIVLKTQDFLPTNQALLTKNQDVLLKDHCVLPKDQSILLKYQDQDFLPRDQHVLHKDQDILPKYQDQNFLPKDQNFLSRDQHVLPKDQDILPKYQDQNFLPKDQNFLSRDQHVLPKDQNILPKYQGQDFLPKDQDFLSRDQHVLPKDWNILPKCQDQDFLPRDQGVLPKDQNILPICQDQDFLPRDQGYLPKDQNILPICQDRDFLPRDLHVLSNDQNILPKCQDQDFLPKYQKVHFKEPYSDMTDEKGREDFSLADYQCLPPKSQDQDDIKNQQPASFMREERVREELPLDYHQYVVPKIQDQDSPREQNKHIKLPSSFEKWEIARGNTPGVPLAYDRYQSGLSTEFQAPLAFQSDVDKEEDKKERQKQYLRHRRLFMDIEREQVKEQQRQKEQKKKIEKIKKKREQECYAAEQRILRMNFHEDPYSGEKLSEILAQLQLQEIKGTREKQQREKEYLRYVEALRAQIQEKMQLYNITLPPLCCCGPDFWDAHPDTCANNCIFYKNHRAYTRALHSFINSCDVPGGNSTLRVAIHNFASAHRRTLKNL

SEQ ID NO: 5777 - protein, 415 aa, Homo sapiens
MSPEVALNRISPMLSPFISSVVRNGKVGLDATNCLRITDLKSGCTSLTPGPNCDRFKLHIPYAGETLKWDIIFNAQYPELPPDFIFGEDAEFLPDPSALQNLASWNPSNPECLLLVVKELVQQYHQFQCSRLRESSRLMFEYQTLLEEPQYGENMEIYAGKKNNWTGEFSARFLLKLPVDFSNIPTYLLKDVNEDPGEDVALLSVSFEDTEATQVYPKLYLSPRIEHALGGSSALHIPAFPGGGCLIDYVPQVCHLLTNKVQYVIQGYHKRREYIAAFLSHFGTGVVEYDAEGFTKLTLLLMWKDFCFLVHIDLPLFFPRDQPTLTFQSVYHFTNSGQLYSQAQKNYPYSPRWDGNEMAKRAKGCQGSRDACSPWEQVLAFAVAKTGCKLLQPQRNWPSSRGPPWRASEGERTAQ

SEQ ID NO: 5778 - protein, 300 aa, Homo sapiens
MLSAVARGYQGWFHPCARLSVRMSSTGIDRKGVLANRVAVVTGSTSGIGFAIARRLARDGAHVVISSRKQQNVDRAMAKLQGEGLSVAGIVCHVGKAEDREQLVAKALEHCGGVDFLVCSAGVNPLVGSTLGTSEQIWDKILSVNVKSPALLLSQLLPYMENRRGAVILVSSIAAYNPVVALGVYNVSKTALLGLTRTLALELAPKDIRVNCVVPGIIKTDFSKVVRIGFMGMSLSGRTSRNIISCRGLGSQRTVQESCPSCALQMPATSTGRTLRWQATPLGSERSGGGCVAVVPGPGA

SEQ ID NO: 5779 - protein, 337 aa, Homo sapiens
MRFDTLWENKLMQSRAVDGFHSEEQQLLLQVQQQHQPQQQQHHHHHHHQQAQPQQTVPQQAQTQQVLIPASQQATAPQVIVPDSKLIQHMNASNMSAAATAATLALPAGVTPVQQILTNSGQLLQVVRAANGAQYIFQPQQSVVLQQQVIPQMQPGGVQAPVIQQVLAPLPGGISPQTGVIIQPQQILFTGNKTQVIPTTVAAPTPAQAQITATGQQQPQAQPAQTQAPLVLQVDGTGDTSSEEDEDEEEDYDDDEEEDKEKDGAEDGQVEEEPLNSEDDVSDEEGQELFDTENVVVCQYDKIHRSKNKWKFHLKDGIMNLNGRDYIFSKAIGDAEW

SEQ ID NO: 5780 - protein, 93 aa, Homo sapiens
MAQSGGEARPGPKTAVQIRVAIQEAEDVDELEDEEEGAETRGAGDPARYLSPGWGSASEEEPSRGHRNRSSVNSRTMLASFIVSSAPSTAPST

SEQ ID NO: 5781 - protein, 84 aa, Homo sapiens
MKVKIKCWNGVATWLWVANDENCGICRMAFNGCCPDCKVPGDDCPLVWGQCSHCFHMHCILKWLHAQQVQQHCPMCRQEWKFKE

SEQ ID NO: 5782 - protein, 203 aa, Homo sapiens; identical to SEQ ID NO: 5304

SEQ ID NO: 5783 - protein, 597 aa, Homo sapiens
MPSPQLLVLFGSQTGTAQDVSERLGREARRRRLGCRVQALDSYPVVNLINEPLVIFVCATTGQGDPPDNMKNFWRFIFRKNLPSTALCQMDFAVLGLGDSSYAKFNFVAKKLHRRLLQLGGSALLPVCLGDDQHELGPDAAVDPWLRDLWDRVLGLYPPPPGLTEIPPGVPLPSKFTLLFLQEAPSTGSEGQRVAHPGSQEPPSESKPFLAPMISNQRVTGPSHFQDVRLIEFDILGSGISFAAGDVVLIQPSNSAAHVQRFCQVLGLDPDQLFMLQPREPDVSSPTRLPQPCSMRHLVSHYLDIASVPRRSFFELLACLSLHELEREKLLEFSSAQGQEELFEYCNRPRRTILEVLCDFPHTAAAIPPDYLLDLIPVIRPRAFSIASSLLTHPSRLQILVAVVQFQTRLKEPRRGLCSSWLASLDPGQGPVRVPLWVRPGSLAFPETPDTPVIMVGPGTGVAPFRAAIQERVAQGQTGNFLFFGCRWRDQDFYWEAEWQELEKRDCLTLIPAFSREQEQKVYVQHRLRELGSLVWELLDRQGAYFYLAGNAKSMPADVSEALMSIFQEEGGLCSPDAAAYLARLQQTRRFQTETWA

SEQ ID NO: 5784 - protein, 619 aa, Homo sapiens
MDDQQALNSIMQDLAVLHKASRPALSLQETRKAKSSSPKKQNDVRVKFEHRGEKRILQFPRPVKLEDLRSKAKIAFGQSMDLHYTNNELVIPLTTQDDLDKAVELLDRSIHMKSLKILLVINGSTQATNLEPLPSLEDLDNTVFGAERKKRLSIIGPTSRDRSSPPPGYIPDELHQVARNGSFTSINSEGEFIPESMDQMLDPLSLSSPENSGSGSCPSLDSPLDGESYPKSRMPRAQSYPDNHQEFSDYDNPIFEKFGKGGTYPRRYHVSYHHQEYNDGRKTFPRARRTQGTSLRSPVSFSPTDHSLSTSSGSSIFTPEYDDSRIRRRGSDIDNPTLTVMDISPPSRSPRAPTNWRLGKLLGQGAFGRVYLCYDVDTGRELAVKQVQFDPDSPETSKEVNALECEIQLLKNLLHERIVQYYGCLRDPQEKTLSIFMEYMPGGSIKDQLKAYGALTENVTRKYTRQILEGVHYLHSNMIVHRDIKGANILRDSTGNVKLGDFGASKRLQTICLSGTGMKSVTGTPYWMSPEVISGEGYGRKADIWSVACTVVEMLTEKPPWAEFEAMAAIFKIATQPTNPKLPPHVSDYTRDFLKRIFVEAKLRPSADELLRHMFVHYH

SEQ ID NO: 5785 - protein, 275 aa, Homo sapiens
MSTIGSFEGFQAVSLKQEGDDQPSETDHLSMEEEDPMPRQISRQSSVTESTLYPNPYHQPYISRKYFATRPGAIETAMEDLKGHVAETSGETIQGFWLLTKIDHWNNEKERILLVTDKTLLICKYDFIMLSCVQLQRIPLSAVYRICLGKFTFPGMSLDKRQGEGLRIYWGSPEEQSLLSRWNPWSTEVPYATFTEHPMKYTSEKFLEICKLSGFMSKLVPAIQNAHKNSTGSGRGKKLMVLTEPILIETYTGLMSFIGNRNKLGYSLARGSIGF

SEQ ID NO: 5786 - protein, 542 aa, Homo sapiens
MAAAAGAAAAPGSREPQDRPECGAGHPGPRYYRHPERWLLRPEAFLGPLRTRAPSAEDSQRERPAARSGPAMSRRVVRQSKFRHVFGQAAKADQAYEDIRVSKVTWDSSFCAVNPKFLAIIVEAGGGGAFIVLPLAKTGRVDKNYPLVTGHTAPVLDIDWCPHNDNVIASASDDTTIMVWQIPDYTPMRNITEPIITLEGHSKRVGILSWHPTARNVLLSAGGDNVIIIWNVGTGEVLLSLDDMHPDVIHSVCWNSNGSLLATTCKDKTLRIIDPRKGQVVAERFAAHEGMRPMRAVFTRQGHIFTTGFTRMSQRELGLWDPNNFEEPVALQEMDTSNGVLLPFYDPDSSIVYLCGKGDSSIRYFEITDEPPFVHYLNTFSSKEPQRGMGFMPKRGLDVSKCEIARFYKLHERKCEPIIMTVPRKSDLFQDDLYPDTPGPEPALEADEWLSGQDAEPVLISLRDGYVPPKHRELRVTKRNILDVRPPSGPRRSQSASDAPLSQHTLETLLEEIKALRERVQAQEQRITALENMLCELVDGTD

SEQ ID NO: 5787 - protein, 849 aa, Homo sapiens
MSDTRRRVKVYTLNEDRQWDDRGTGHVSSTYVEELKGMSLLVRAESDGSLLLESKINPNTAYQKQQDTLIVWSEAENYDLALSFQEKAGCDEIWEKICQVQGKDPSVEVTQDLIDESEEERFEEMPETSHLIDLPTCELNKLEEIADLVTSVLSSPIRREKLALALENEGYIKKLLQLFQACENLENTEGLHHLYEIIRGILFLNKATLFEVMFSDECIMDVVGCLEYDPALAQPKRHREFLTKTAKFKEVIPITDSELRQKIHQTYRVQYIQDIILPTPSVFEENFLSTLTSFIFFNKVEIVSMLQEDEKFLSEVFAQLTDEATDDDKRRELVNFFKEFCAFSQTLQPQNRDAFFKTLAKLGILPALEIVMGMDDLQVRSAATDIFSYLVEFSPSMVREFVMQEAQQSDDDILLINVVIEQMICDTDPELGGAVQLMGLLRTLIDPENMLATTNKTEKSEFLNFFYNHCMHVLTAPLLTNTSEDKCEKDFFLKHYRYSWSFICTPSHSHSHSTPSSSISQDNIVGSNKNNTICPDNYQTAQLLALILELLTFCVEHHTYHIKNYIMNKDLLRRVLVLMNSKHTFLALCALRFMRRIIGLKDEFYNRYITKGNLFEPVINALLDNGTRYNLLNSAVIELFEFIRVEDIKSLTAHIVENFYKALESIEYVQTFKGLKTKYEQEKDRQNQKLNSVPSILRSNRFRRDAKALEEDEEMWFNEDEEEEGKAVVAPVEKPKPEDDFPDNYEKFMETKKAKESEDKENLPKRTSPGGFKFTFSHSASAANGTNSKSVVAQIPPATSNGSSSKTTNLPTSVTATKGSLVGLVDYPDDEEEDEEEESSPRKRPRLGS

SEQ ID NO: 5788 - protein, 222 aa, Homo sapiens
MGDIPAVGLSSWKASPGKVTEAVKEAIDAGYRHFDCAYFYHNEREVGAGIRCKIKEGAVRREDLFIATKLWCTCHKKSLVETACRKSLKALKLNYLDLYLIHWPMGFKPPHPEWIMSCSELSFCLSHPRVQDLPLDESNMVIPSDTDFLDTWEILIRFQIQRNVIVIPGSITPSHIKENIQVFDFELTQHDMDNILSLNRNLRLAMFPITKNHKDYPFHIEY

SEQ ID NO: 5789 - protein, 359 aa, Homo sapiens
MPNPSSTSSPYPLPEEIRNLLADVETFVADILKGENLSKKAKEKRESLIKKIKDVKSIYLQEFQDKGDAEDGEEYDDPFAGPPDTISLASERYDKDDEAPSDGAQFPPIAAQDLPFVLKAGYLEKRRKDHSFLGFEWQKRWCALSKTVFYYYGSDKDKQQKGEFAIDGYSVRMNNTLRKDGKKDCCFEISAPDKRIYQFTAASPKDAEEWVQQLKFVLQDMESDIIPEDYDERGELYDDVDHPLPISNPLTSSQPIDDEIYEELPEEEEDSAPVKVEEQRKMSQDSVHHTSGDKSTDYANFYQGLWDCTGAFSDELSFKRGDVIYILSKEYNRYGWWVGEMKGAIGLVPKAYIMEMYDI

SEQ ID NO: 5790 - protein, 408 aa, Homo sapiens
MKCEHCTRKECSKKTKTDDQENVSADAPSPAQENGEKCDTSKHKVLVVSVCPQSLPYFAAKFNLSVTDASRRLCGFLKSLGVHYVFDTTIAADFSILESQKEFVRRYRQHSEEERTLPMLTSACPGWVRYAERVLGRPITAHLCTAKSPQQVMGSLVKDYFARQQNLSPEKIFHVIVAPCYDKKLEALQESLPPALHGSRGADCVLTSGEIAQIMEQGDLSVRDAAVDTLFGDLKEDKVTRHDGASSDGHLAHIFRHAAKELFNEDVEEVTYRALRNKDFQEVTLEKNGEVVLRFAAAYGFRNIQNMILKLKKGKFPFHFVEVLACAGGCLNGRGQAQTPDGHADKALLRQMEGIYADIPVRRPESSAHVQELYQEWLEGINSPKAREVLHTTYQSQERGTHSLDIKW

SEQ ID NO: 5791 - protein, 367 aa, Homo sapiens
MALNVAPVRDTKWLTLEVCRQFQRGTCSRSDEECKFAHPPKSCQVENGRVIACFDSLKGRCSRENCKYLHPPTHLKTQLEINGRNNLIQQKTAAAMLAQQMQFMFPGTPLHPVPTFPVGPAIGTNTAISFAPYLAPVTPGVGLVPTEILPTTPVIVPGSPPVTVPGSTATQKLLRTDKLEVCREFQRGNCARGETDCRFAHPADSTMIDTSDNTVTVCMDYIKGRCMREKCKYFHPPAHLQAKIKAAQHQANQAAVAAQAAAAAATVMAFPPGALHPLPKRQALEKSNGTSAVFNPSVLHYQQALTSAQLQQHAAFIPTGSVLCMTPATSIVPMMHSATSATVSAATTPATSVPFAATATANQIILK

SEQ ID NO: 5792 - protein, 1302 aa, Homo sapiens
MALRPGAGSGGGGAAGAGAGSAGGGGFMFPVAGGIRPPQAGLMPMQQQGFPMVSVMQPNMQGIMGMNYSSQMSQGPIAMQAGIPMGPMPAAGMPYLGQAPFLGMRPPGPQYTPDMQKQFAEEQQKRFEQQQKLLEEERKRRQFEEQKQKLRLLSSVKPKTGEKSRDDALEAIKGNLDGFSRDAKMHPTPASHPKKPGPSLEEKFLVSCDISTSGQEQIKLNTSEVGHKALGPGSSKKYPSLMASNGVAVDGCVSGTTTAEAENTSDQNLSIEESGVGVFPSQDPAQPRMPPWIYNESLVPDAYKKILETTMTPTGIDTAKLYPILMSSGLPRETLGQIWALANRTTPGKLTKEELYTVLAMIAVTQRGVPAMSPDALNQFPAAPIPTLSGFSMTLPTPVSQPTVIPSGPAGSMPLSLGQPVMGINLVGPVGGAAAQASSGFIPTYPANQVVKPEEDDFQDFQDASKSGSLDDSFSDFQELPASSKTSNSQHGNSAPSLLMPLPGTKALPSMDKYAVFKGIAADKSSENTVPPGDPGDKYSAFRELEQTAENKPLGESFAEFRSAGTDDGFTDFKTADSVSPLEPPTKDKTFPPSFPSGTIQQKQQTQVKNPLNLADLDMFSSVNCSSEKPLSFSAVFSTSKSVSTPQSTGSAATMTALAATKTSSLADDFGEFSLFGEYSGLAPVGEQDDFADFMAFSNSSISSEQKPDDKYDALKEEASPVPLTSNVGSTVKGGQNSTAASTKYDVFRQLSLEGSGLGVEDLKDNTPSGKSDDDFADFHSSKFSSINSDKSLGEKAVAFRHTKEDSASVKSLDLPSIGGSSVGKEDSEDALSVQFDMKLADVGGDLKHVMSDSSLDLPTVSGQHPPAADIEDLKYAAFGSYSSNFAVSTLTSYDWSDRDDATQGRKLSPFVLSAGSGSPSATSILQKKETSFGSSENITMTSLSKVTTFVSEDALPETTFPALASFKDTIPQTSEQKEYENRDYKDFTKQDLPTAERSQEATCPSPASSGASQETPNECSDDFGEFQSEKPKISKFDFLVATSQSKMKSSEEMIKSELATFDLSVQGSHKRSLSLGDKEISRSSPSPALEQPFRDRSNTLNEKPALPVIRDKYKDLTGEVEENERYAYEWQRCLGSALNVIKKANDTLNGISSSSVCTEVIQSAQGMEYLLGVVEVYRVTKRVELGIKATAVCSEKLQQLLKDIDKVWNNLIGFMSLATLTPDENSLDFSSCMLRPGIKNAQELACGVCLLNVDSRSRAFNSETDSFKLAYGGHQYHASCANFWINCVEPKPPGLVLPDLL

SEQ ID NO: 5793 - protein, 336 aa, Homo sapiens
MESVLSKYEDQITIFTDYLEEYPDTDELVWILGKQHLLKTEKSKLLSDISARLWFTYRRKFSPIGGTGPSSDAGWGCMLRCGQMMLAQALICRHLGRDWSWEKQKEQPKEYQRILQCFLDRKDCCYSIHQMAQMGVGEGKSIGEWFGPNTVAQVLKKLALFDEWNSLAVYVSMDNTVVIEDIKKMCRVLPLSADTAGDRPPDSLTASNQSDELIFLDPHTTQTFVDTEENGTVNDQTFHCLQSPQRMNILNLDPSVALGFFCKEEKDFDNWCSLVQKEILKENLRMFELVQKHPSHWPPFVPPAKPEVTTTGAEFIDSTEQLEEFDLEEDFEILSV

SEQ ID NO: 5794 - protein, 1004 aa, Homo sapiens
MLRTAGRDGLCRLSTYLEELEAVELKKFKLYLGTATELGEGKIPWGSMEKAGPLEMAQLLITHFGPEEAWRLALSTFERINRKDLWERGQREDLVRDTPPGGPSSLGNQSTCLLEVSLVTPRKDPQETYRDYVRRKFRLMEDRNARLGECVNLSHRYTRLLLVKEHSNPMQVQQQLLDTGRGHARTVGHQASPIKIETLFEPDEERPEPAAVVMQGAAGIGKSMLAHKVMLDWADGKLFQGRFDYLFYINCREMNQSATECSMQDLIFSCWPEPSAPLQELIRVPERLLFIIDGFDELKPSFHDPQGPWCLCWEEKRPTELLLNSLIRKKLLPELSLLITTRPTALEKLHRLLEHPRHVEILGFSEAERKEYFYKYFHNAEQAGQVFNYVRDNEPLFTMCFVPLVCWVVCTCLQQQLEGGGLLRQTSRTTTAVYMLYLLSLMQPKPGAPRLQPPPNQRGLCSLAADGLWNQKILFEEQDLRKHGLDGEDVSAFLNMNIFQKDINCERYYSFIHLSFQEFFAAMYYILDEGEGGAGPDQDVTRLLTEYAFSERSFLALTSRFLFGLLNEETRSHLEKSLCWKVSPHIKMDLLQWIQSKAQSDGSTLQQGSLEFFSCLYEIQEEEFIQQALSHFQVIVVSNIASKMEHMVSSFCLKRCRSAQVLHLYGATYSADGEDRARCSAGAHTLLVQLRPERTVLLDAYSEHLAAALCTNPNLIELSLYRNALGSRGVKLLCQGLRHPNCKLQNLRLKRCRISSSACEDLSAALIANKNLTRMDLSGNGVGFPGMMLLCEGLRHPQCRLQMIQLRKCQLESGACQEMASVLGTNPHLVELDLTGNALEDLGLRLLCQGLRHPVCRLRTLWLKICRLTAAACDELASTLSVNQSLRELDLSLNELGDLGVLLLCEGLRHPTCKLQTLRLGICRLGSAACEGLSVVLQANHNLRELDLSFNDLGDWGLWLLAEGLQHPACRLQKLWLFGMDLNKMTHSRLAALRVTKPYLDIGC

SEQ ID NO: 5795 - protein, 205 aa, Homo sapiens
MVSSCCGSVCSDQGCGLETCCRPSCCQTTCCRTTCCRPSCCVSSCCRPQCCQSVCCQPTCCRPSCCPSCCQTTCCRTTCCRPSCCVSSCCRPQCCQSVCCQPTCCRPSCSISSCCRPSCCVSRCCRSQCCQSVCCQPTCCRPSCCISSCCRPSCCESSCCRPCCCRPCCCLRPVCGRVSCHTTCYRPTCVISTCPRPLCCASSCC

SEQ ID NO: 5796 - protein, 190 aa, Homo sapiens
MQSCESSGDSADDPLSRGLRRRGQPRVVVIGAGLAGLAAAKALLEQGFTDVTVLEASSHIGGRVQSVKLGHATFELGATWIHGSHGNPIYHLAEANGLLEETTDGERSVGRISLYSKNGVACYLTNHGRRIPKDVVEEFSDLYNEPMQVLFSGEATHRKYYSTTHGALLSGQREAARLIEMYRDLFQQGT

SEQ ID NO: 5797 - protein, 1314 aa, Homo sapiens
MALRPGAGSGGGGAAGAGAGSAGGGGFMFPVAGGIRPPQAGLMPMQQQGFPMVSVMQPNMQGIMGMNYSSQMSQGPIAMQAGIPMGPMPAAGMPYLGQAPFLGMRPPGPQYTPDMQKQFAEEQQKRFEQQQKLLEEERKRRQFEEQKQKLRLLSSVKPKTGEKSRDDALEAIKGNLDGFSRDAKMHPTPASHPKKPGPSLEEKFLVSCDISTSGQEQIKLNTSEVGHKALGPGSSKKYPSLMASNGVAVDGCVSGTTTAEAENTSDQNLSIEESGVGVFPSQDPAQPRMPPWIYNESLVPDAYKKILETTMTPTGIDTAKLYPILMSSGLPRETLGQIWALANRTTPGKLTKEELYTVLAMIAVTQRGVPAMSPDALNQFPAAPIPTLSGFSMTLPTPVSQPTVIPSGPAGSMPLSLGQPVMGINLVGPVGGAAAQASSGFIPTYPANQVVKPEEDDFQDFQDASKSGSLDDSFSDFQELPASSKTSNSQHGNSAPSLLMPLPGTKALPSMDKYAVFKGIAADKSSENTVPPGDPGDKYSAFRELEQTAENKPLGESFAEFRSAGTDDGFTDFKTADSVSPLEPPTKDKTFPPSFPSGTIQQKQQTQVKNPLNLADLDMFSSVNCSSEKPLSFSAVFSTSKSVSTPQSTGSAATMTALAATKTSSLADDFGEFSLFGEYSGLAPVGEQDDFADFMAFSNSSISSEQKPDDKYDALKEEASPVPLTSNVGSTVKGGQNSTAASTKYDVFRQLSLEGSGLGVEDLKDNTPSGKSDDDFADFHSSKFSSINSDKSLGEKAVAFRHTKEDSASVKSLDLPSIGGSSVGKEDSEDALSVQFDMKLADVGGDLKHVMSDSSLDLPTVSGQHPPAADIEDLKYAAFGSYSSNFAVSTLTSYDWSDRDDATQGRKLSPFVLSAGSGSPSATSILQKKETSFGSSENITMTSLSKVTTFVSEDALPETTFPALASFKDTIPQTSEQKEYENRDYKDFTKQDLPTAERSQEATCPSPASSGASQETPNECSDDFGEFQSEKPKISKFDFLVATSQSKMKSSEEMIKSELATFDLSVQGSHKRSLSLGDKEISRSSPSPALEQPFRDRSNTLNEKPALPVIRDKYKDLTGEVEENERYAYEWQRCLGSALNVIKKANDTLNGISSSSVCTEVIQSAQGMEYLLGVVEVYRVTKRVELGIKATAVCSEKLQQLLKDIDKVWNNLIGFMSLATLTPDENSLDFSSCMLRPGIKNAQELACGVCLLNVDSRSRKEEKPAEEHPKKAFNSETDSFKLAYGGHQYHASCANFWINCVEPKPPGLVLPDLL

SEQ ID NO: 5798 - protein, 176 aa, Homo sapiens
MSDDDSRASTSSSSSSSSNQQTEKETNTPKKKESKVSMSKNSKLLSTSAKSAGPKGDNIYEWRSTILGPPGSVYEGGVFFLDITFTPEYPFKPPKVTFRTRIYHCNINSQGVICLDILKDNWSPALTISKVLLSICSLLTDCNPADPLVGSIATQYMTNRAEHDRMARQWTKRYAT

SEQ ID NO: 5799 - protein, 2344 aa, Homo sapiens
MDGVSSEANEENDNIERPVRRRHSSILKPPRSPLQDLRGGNERVQESNALRNKKNSRRVSFADTIKVFQTESHMKIVRKSEMEGCSAMVPSQLQLLPPGFKRFSCLSLPETETGENLLLIQNKKLEDNYCEITGMNTLLSAPIHTQMQQKEFSIIEHTRERKHANDQTVIFSDENQMDLTSSHTVMITKGLLDNPISEKSTKIDTTSFLANLKLHTEDSRMKKEVNFSVDQNTSSENKIDFNDFIKRLKTGKCSAFPDVPDKENFEIPIYSKEPNSASSTHQMHVSLKEDENNSNITRLFREKDDGMNFTQCHTANIQTLIPTSSETNSRESKGNDITIYGNDFMDLTFNHTLQILPATGNFSEIENQTQNAMDVTTGYGTKASGNKTVFKSKQNTAFQDLSINSADKIHITRSHIMGAETHIVSQTCNQDARILAMTPESIYSNPSIQGCKTVFYSSCNDAMEMTKCLSNMREEKNLLKHDSNYAKMYCNPDAMSSLTEKTIYSGEENMDITKSHTVAIDNQIFKQDQSNVQIAAAPTPEKEMMLQNLMTTSEDGKMNVNCNSVPHVSKERIQQSLSNPLSISLTDRKTELLSGENMDLTESHTSNLGSQVPLAAYNLAPESTSESHSQSKSSSDECEEITKSRNEPFQRSDIIAKNSLTDTWNKDKDWVLKILPYLDKDSPQSADCNQEIATSHNIVYCGGVLDKQITNRNTVSWEQSLFSTTKPLFSSGQFSMKNHDTAISSHTVKSVLGQNSKLAEPLRKSLSNPTPDYCHDKMIICSEEEQNMDLTKSHTVVIGFGPSELQELGKTNLEHTTGQLTTMNRQIAVKVEKCGKSPIEKSGVLKSNCIMDVLEDESVQKPKFPKEKQNVKIWGRKSVGGPKIDKTIVFSEDDKNDMDITKSYTIEINHRPLLEKRDCHLVPLAGTSETILYTCRQDDMEITRSHTTALECKTVSPDEITTRPMDKTVVFVDNHVELEMTESHTVFIDYQEKERTDRPNFELSQRKSLGTPTVICTPTEESVFFPGNGESDRLVANDSQLTPLEEWSNNRGPVEVADNMELSKSATCKNIKDVQSPGFLNEPLSSKSQRRKSLKLKNDKTIVFSENHKNDMDITQSCMVEIDNESALEDKEDFHLAGASKTILYSCGQDDMEITRSHTTALECKTLLPNEIAIRPMDKTVLFTDNYSDLEVTDSHTVFIDCQATEKILEENPKFGIGKGKNLGVSFPKDNSCVQEIAEKQALAVGNKIVLHTEQKQQLFAATNRTTNEIIKFHSAAMDEKVIGKVVDQACTLEKAQVESCQLNNRDRRNVDFTSSHATAVCGSSDNYSCLPNVISCTDNLEGSAMLLCDKDEEKANYCPVQNDLAYANDFASEYYLESEGQPLSAPCPLLEKEEVIQTSTKGQLDCVITLHKDQDLIKDPRNLLANQTLVYSQDLGEMTKLNSKRVSFKLPKDQMKVYVDDIYVIPQPHFSTDQPPLPKKGQSSINKEEVILSKAGNKSLNIIENSSAPICENKPKILNSEEWFAAACKKELKENIQTTNYNTALDFHSNSDVTKQVIQTHVNAGEAPDPVITSNVPCFHSIKPNLNNLNGKTGEFLAFQTVHLPPLPEQLLELGNKAHNDMHIVQATEIHNINIISSNAKDSRDEENKKSHNGAETTSLPPKTVFKDKVRRCSLGIFLPRLPNKRNCSVTGIDDLEQIPADTTDINHLETQPVSSKDSGIGSVAGKLNLSPSQYINEENLPVYPDEINSSDSINIETEEKALIETYQKEISPYENKMGKTCNSQKRTWVQEEEDIHKEKKIRKNEIKFSDTTQDREIFDHHTEEDIDKSANSVLIKNLSRTPSSCSSSLDSIKADGTSLDFSTYRSSQMESQFLRDTICEESLREKLQDGRITIREFFILLQVHILIQKPRQSNLPGNFTVNTPPTPEDLMLSQYVYRPKIQIYREDCEARRQKIEELKLSASNQDKLLVDINKNLWEKMRHCSDKELKAFGIYLNKIKSCFTKMTKVFTHQGKVALYGKLVQSAQNEREKLQIKIDEMDKILKKIDNCLTEMETETKNLEDEEKNNPVEEWDSEMRAAEKELEQLKTEEEELQRNLLELEVQKEQTLAQIDFMQKQRNRTEELLDQLSLSEWDVVEWSDDQAVFTFVYDTIQLTITFEESVVGFPFLDKRYARGSIVDVNFQSLLDEDQAPPSSLLVHKLIFQYVEEKESWKKTCTTQHQLPKMLEEFSLVVHHCRLLGEEIEYLKRWGPNYNLMNIDINNNELRLLFSSSAAFAKFEITLFLSAYYPSVPLPSTIQNHVGNTSQDDIATILSKVPLENNYLKNVVKQIYQDLFQDCHFYH

SEQ ID NO: 5800 - protein, 545 aa, Homo sapiens
MSSCVSSQPSSNRAAPQDELGGRGSSSSESQKPCEALRGLSSLSIHLGMESFIVVTECEPGCAVDLGLARDRPLEADGQEVPLDTSGSQARPHLSGRKLSLQERSQGGLAAGGSLDMNGRCICPSLPYSPVSSPQSSPRLPRRPTVESHHVSITGMQDCVQLNQYTLKDEIGKGSYGVVKLAYNENDNTYYAMKVLSKKKLIRQAGFPRRPPPRGTRPAPGGCIQPRGPIEQVYQEIAILKKLDHPNVVKLVEVLDDPNEDHLYMVFELVNQGPVMEVPTLKPLSEDQARFYFQDLIKGIEYLHYQKIIHRDIKPSNLLVGEDGHIKIADFGVSNEFKGSDALLSNTVGTPAFMAPESLSETRKIFSGKALDVWAMGVTLYCFVFGQCPFMDERIMCLHSKIKSQALEFPDQPDIAEDLKDLITRMLDKNPESRIVVPEIKILVKTMIRKRSFGNPFEGSRREERSLSAPGNLLTKKPTRECESLSELKEARQRRQPPGHRPAPRGGGGSALVRGSPCVESCWAPAPGSPARMHPLRPEEAMEPE

SEQ ID NO: 5801 - protein, 110 aa, Homo sapiens
MPKRSCPFADVAPLQLKVRVSQRELSRGVCAERYSQEVFDPSGVASIACSSCVRAVDGKAVCGQCERALCGQCVRTCWGCGSVACTLCGLVDCSDMYEKVLCTSCAMFET

SEQ ID NO: 5802 - protein, 750 aa, Homo sapiens
MEDLFETFQDEMGFSNMEDDGPEEEERVAEPQANFNTPQALRFEELLANLLNEQHQIAKELFEQLKMKKPSAKQQKEVEKVKPQCKEVHQTLILDPAQRKRLQQQMQQHVQLLTQIHLLATCNPNLNPEASSTRICLKELGTFAQSSIALHHQYNPKFQTLFQPCNLMGAMQLIEDFSTHVSIDCSPHKTVKKTANEFPCLPKQVAWILATSKVFMYPELLPVCSLKAKNPQDKILFTKAEDNLLALGLKHFEGTEFLNPLISKYLLTCKTARQLTVRIKNLNMNRAPDNIIKFYKKTKQLPVLGKCCEEIQPHQWKPPIEREEHRLPFWLKASLPSIQEELRHMADGAREVGNMTGTTEINSDQGLEKDNSELGSETRYPLLLPKGVVLKLKPVADRFPKKAWRQKRSSVLKPLLIQPSPSLQPSFNPGKTPAQSTHSEAPPSKMVLRIPHPIQPATVLQTVPGVPPLGVSGGESFESPAALPAMPPEARTSFPLSESQTLLSSAPVPKVMMPSPASSMFRKPYVRRRPSKRRGARAFRCIKPAPVIHPASVIFTVPATTVKIVSLGGGCNMIQPVNAAVAQSPQTIPIATLLVNPTSFPCPLNQPLVASSVSPLIVSGNSVNLPIPSTPEDKAHMNVDIACAVADGENAFQGLEPKLEPQELSPLSATVFPKVEHSPGPPPVDKQCQEGLSENSAYRWTVVKTEEGRQALEPLPQGIQESLNNSSPGDLEEVVKMEPEDATEEISGFL

SEQ ID NO: 5803 - protein, 867 aa, Homo sapiens
MQAEAADWFSSMPFQKHVYYPLASGPEGPDVAVAAAAAGAASMACAPPSAASGPLPFFQFRPRLESVDWRRLSAIDVDKVAGAVDVLTLQENIMNITFCKLEDEKCPHCQSGVDPVLLKLIRLAQFTIEYLLHSQEFLTSQLHTLEERLRLSHCDGEQSKKLLTKQAGEIKTLKEECKRRKKMISTQQLMIEAKANYYQCHFCDKAFMNQAFLQSHIQRRHTEENSHFEYQKNAQIEKLRSEIVVLKEELQLTRSELEAAHHASAVRFSKEYEMQKTKEEDFLKLFDRWKEEEKEKLVDEMEKVKEMFMKEFKELTSKNSALEYQLSEIQKSNMQIKSNIGTLKDAHEFKEDRSPYPQDFHNVMQLLDSQESKWTARVQAIHQEHKKEKGRLLSHIEKLRTSMIDDLNASNVFYKKRIEELGQRLQEQNELIITQRQQIKDFTCNPLNSISEPKGNPLAWQAFESQPAAPAVPMNAPALHTLETKSSLPMVHEQAFSSHILEPIEELSEEEKGRENEQKLNNNKMHLRKALKSNSSLTKGLRTMVEQNLMEKLETLGINADIRGISSDQLHRVLKSVESERHKQEREIPNFHQIREFLEHQVSCKIEEKALLSSDQCSVSQMDTLSTGEVPKMIQLPSKNRQLIRQKAVSTDRTSVPKIKKNVMEDPFPRKSSTITTPPFSSEEEQEDDDLIRAYASPGPLPVPPPQNKGSFGKNTVKSDADGTEGSEIEDTDDSPKPAGVAVKTPTEKVEKMFPHRKNVNKPVGGTNVPEMFIKKEELQELKCADVEDEDWDISSLEEEISLGKKSGKEQKEPPPAKNEPHFAHVLNAWGAFNPKGPKGEGLQENESSTLKSSLVTVTDWSDTSDV

SEQ ID NO: 5804 - protein, 619 aa, Homo sapiens
MSGLVLGQRDEPAGHRLSQEEILGSTRLVSQGLEALRSEHQAVLQSLSQTIECLQQGGHEEGLVHEKARQLRRSMENIELGLSEAQVMLALASHLSTVESEKQKLRAQVRRLCQENQWLRDELAGTQQRLQRSEQAVAQLEEEKKHLEFLGQLRQYDEDGHTSEEKEGDATKDSLDDLFPNEEEEDPSNGLSRGQGATAAQQGGYEIPARLRTLHNLVIQYAAQGRYEVAVPLCKQALEDLERTSGRGHPDVATMLNILALVYRDQNKYKEAAHLLNDALSIRESTLGPDHPAVAATLNNLAVLYGKRGKYKEAEPLCQRALEIREKVLGTNHPDVAKQLNNLALLCQNQGKYEAVERYYQRALAIYEGQLGPDNPNVARTKNNLASCYLKQGKYAEAETLYKEILTRAHVQEFGSVDDDHKPIWMHAEEREEMSKSRHHEGGTPYAEYGGWYKACKVSSPTVNTTLRNLGALYRRQGKLEAAETLEECALRSRRQGTDPISQTKVAELLGESDGRRTSQEGPGDSVKFEGGEDASVAVEWSGDGSGTLQRSGSLGKIRDVLRRSSELLVRKLQGTEPRPSSSNMKRAASLNYLNQPSAAPLQVSRGLSASTMDLSSSS

SEQ ID NO: 5805 - protein, 378 aa, Homo sapiens
MKEQLPDLHSHFSDLNLEAHMYASQWFLTLFTAKFPLCMVFHIIDLLLCEGLNIIFHVALALLKTSKEDLLQADFEGALKFFRVQLPKRYRAEENARRLMEQACNIKVPTKKLKKYEKEYQTMRESQLQQEDPMDRYKRENRRLQEASMRLEQENDDLAHELVTSKIALRNDLDQAEDKADVLNKELLLTKQRLVETEEEKRKQEEETAQLKEVFRKQLEKAEYEIKKTTAIIAEYKQICSQLSTRLEKQQAASKEELEVVKGKMMACKHCSDIFSKEGALKLAATGREDQGIETDDEKDSLKKQLREMELELAQTKLQLVEAKCKIQELEHQRGALMNEIQAAKNSWFSKTLNSIKTATGTQPLQPAPVTQPPKEST

SEQ ID NO: 5806 - protein, 876 aa, Homo sapiens
MGDSDDEYDRRRRDKFRRERSDYDRSRERDERRRGDDWNDREWDRGRERRSRGEYRDYDRNRRERFSPPRHELSPPQKRMRRDWDEHSSDPYHSGYEMPYAGGGGGPTYGPPQPWGHPDVHIMQHHVLPIQARLGSIAEIDLGVPPPVMKTFKEFLLSLDDSVDETEAVKRYNDYKLDFRRQQMQDFFLAHKDEEWFRSKYHPDEVGKRRQEARGALQNRLRVFLSLMETGWFDNLLLDIDKADAIVKMLDAAVIKMEGGTENDLRILEQEEEEEQAGKPGEPSKKEEGRAGAGLGDGERKTNDKDEKKEDGKQAENDSSNDDKTKKSEGDGDKEEKKEDSEKEAKKSSKKRNRKHSGDDSFDEGSVSESESESESGQAEEEKEEAEEALKEKEKPKEEEWEKPKDAAGLECKPRPLHKTCSLFMRNIAPNISRAEIISLCKRYPGFMRVALSEPQPERRFFRRGWVTFDRSVNIKEICWNLQNIRLRECELSPGVNRDLTRRVRNINGITQHKQIVRNDIKLAAKLIHTLDDRTQLWASEPGTPPLPTSLPSQNPILKNITDYLIEEVSAEEEELLGSSGGAPPEEPPKEGNPAEINVERDEKLIKVLDKLLLYLRIVHSLDYYNTCEYPNEDEMPNRCGIIHVRGPMPPNRISHGEVLEWQKTFEEKLTPLLSVRESLSEEEAQKMGRKDPEQEVEKFVTSNTQELGKDKWLCPLSGKKFKGPEFVRKHIFNKHAEKIEEVKKEVAFFNNFLTDAKRPALPEIKPAQPPGPAQILPPGLTPGLPYPHQTPQGLMPYGQPRPPILGYGAGAVRPAVPTGGPPYPHAPYGAGRGNYDAFRGQGGYPGKPRNRMVRGDPRAIVEYRDLDAPDDVDFF

SEQ ID NO: 5807 - protein, 495 aa, Homo sapiens; identical to SEQ ID NO: 5715

SEQ ID NO: 5808 - protein, 105 aa, Homo sapiens [sequence omitted]

SEQ ID NO: 5809 - protein, 1239 aa, Homo sapiens
MANDSPAKSLVDIDLSSLRDPAGIFELVEVVGNGTYGQVYKGRHVKTGQLAAIKVMDVTEDEEEEIKLEINMLKKYSHHRNIATYYGAFIKKSPPGHDDQLWLVMEFCGAGSITDLVKNTKGNTLKEDWIAYISREILRGLAHLHIHHVIHRDIKGQNVLLTENAEVKLVDFGVSAQLDRTVGRRNTFIGTPYWMAPEVIACDENPDATYDYRSDLWSCGITAIEMAEGAPPLCDMHPMRALFLIPRNPPPRLKSKKWSKKFFSFIEGCLVKNYMQRPSTEQLLKHPFIRDQPNERQVRIQLKDHIDRTRKKRGEKDETEYEYSGSEEEEEEVPEQEGEPSSIVNVPGESTLRRDFLRLQQENKERSEALRRQQLLQEQQLREQEEYKRQLLAERQKRIEQQKEQRRRLEEQQRREREARRQQEREQRRREQEEKRRLEELERRRKEEEERRRAEEEKRRVEREQEYIRRQLEEEQRHLEVLQQQLLQEQAMLLECRWREMEEHRQAERLQRQLQQEQAYLLSLQHDHRRPHPQHSQQPPPPQQERSKPSFHAPEPKAHYEPADRAREVEDRFRKTNHSSPEAQSKQTGRVLEPPVPSRSESFSNGNSESVHPALQRPAEPQVPVRTTSRSPVLSRRDSPLQGSGQQNSQAGQRNSTSIEPRLLWERVEKLVPRPGSGSSSGSSNSGSQPGSHPGSQSGSGERFRVRSSSKSEGSPSQRLENAVKKPEDKKEVFRPLKPADLTALAKELRAVEDVRPPHKVTDYSSSSEESGTTDEEDDDVEQEGADESTSGPEDTRAASSLNLSNGETESVKTMIVHDDVESEPAMTPSKEGTLIVRQTQSASSTLQKHKSSSSFTPFIDPRLLQISPSSGTTVTSVVGFSCDGMRPEAIRQDPTRKGSVVNVNPTNTRPQSDTPEIRKYKKRFNSEILCAALWGVNLLVGTESGLMLLDRSGQGKVYPLINRRRFQQMDVLEGLNVLVTISGKKDKLRVYYLSWLRNKILHNDPEVEKKQGWTTVGDLEGCVHYKVVKYERIKFLVIALKSSVEVYAWAPKPYHKFMAFKSFGELVHKPLLVDLTVEEGQRLKVIYGSCAGFHAVDVDSGSVYDIYLPTHIQCSIKPHAIIILPNTDGMELLVCYEDEGVYVNTYGRITKDVVLQWGEMPTSVAYIRSNQTMGWGEKAIEIRSVETGHLDGVFMHKRAQRLKFLCERNDKVFFASVRSGGSSQVYFMTLGRTSLLSW

SEQ ID NO: 5810 - protein, 948 aa, Homo sapiens
MYGSARSVGKVEPSSQSPGRSPRLPRSPRLGHRRTNSTGGSSGSSVGGGSGKTLSMENIQSLNAAYATSGPMYLSDHENVGSETPKSTMTLGRSGGRLPYGVRMTAMGSSPNIASSGVASDTIAFGEHHLPPVSMASTVPHSLRQARDNTIMDLQTQLKEVLRENDLLRKDVEVKESKLSSSMNSIKTFWSPELKKERALRKDEASKITIWKEQYRVVQEENQHMQMTIQALQDELRIQRDLNQLFQQDSSSRTGEPCVAELTEENFQRLHAEHERQAKELFLLRKTLEEMELRIETQKQTLNARDESIKKLLEMLQSKGLSAKATEEDHERTRRLAEAEMHVHHLESLLEQKEKENSMLREEMHRRFENAPDSAKTKALQTVIEMKDSKISSMERGLRDLEEEIQMLKSNGALSTEEREEEMKQMEVYRSHSKFMKNKIGQVKQELSRKDTELLALQTKLETLTNQFSDSKQHIEVLKESLTAKEQRAAILQTEVDALRLRLEEKETMLNKKTKQIQDMAEEKGTQAGEIHDLKDMLDVKERKVNVLQKKIENLQEQLRDKEKQMSSLKERVKSLQADTTNTDTALTTLEEALAEKERTIERLKEQRDRDEREKQEEIDNYKKDLKDLKEKVSLLQGDLSEKEASLLDLKEHASSLASSGLKKDSRLKTLEIALEQKKEECLKMESQLKKAHEAALEARASPEMSDRIQHLEREITRYKDESSKAQAEVDRLLEILKEVENEKNDKDKKIAELESLTSRQVKDQNKKVANLKHKEQVEKKKSAQMLEEARRREDNLNDSSQQLQVEELLMAMEKVKQELESMKAKLSSTQQSLAEKETHLTNLRAERRKHLEEVLEMKQEALLAAISEKDANIALLELSSSKKKTQEEVAALKREKDRLVQQLKQQTQNRMKLMADNYEDDHFKSSHSNQTNHKPSPDQDEEEGIWA

SEQ ID NO: 5811 - protein, 910 aa, Homo sapiens
MAATVEGPELEAAAAAGDASEDSDAGSRALPFLGGNRLSLDLYPGGCQQLLHLCVQQPLQLLQVEFLRLSTHEDPQLLEATLAQLPQSLSCLRSLVLKGGQRRDTLGACLRGALTNLPAGLSGLAHLAHLDLSFNSLETLPACVLQMRGLGALLLSHNCLSELPEALGALPALTFLTVTHNRLQTLPPALGALSTLQRLDLSQNLLDTLPPEIGGLGSLLELNLASNRLQSLPASLAGLRSLRLLVLHSNLLASVPADLARLPLLTRLDLRDNQLRDLPPELLDAPFVRLQGNPLGEASPDAPSSPVAALIPEMPRLFLTSDLDSFPVTPQGCSVTLACGVRLQFPAGATATPITIRYRLLLPEPGLVPLGPHDALLSHVLELQPHGVAFQQDVGLWLLFTPPQARRCREVVVRTRNDNSWGDLETYLEEEAPQRLWAHCQVPHFSWFLVVSRPVSNACLVPPEGTLLCSSGHPGVKVIFPPGATEEPRRVSMQVVRMAGRELQALLGEPEAAVSPLLCLSQSGPPSFLQPVTVQLPLPSGITGLSLDRSRLHLLYWAPPAATWDDITAQVVLELTHLYARFQVTHFSWYWLWYTTKNCVGGLARKAWERLRLHRVNLIALQRRRDPEQVLLQCLPRNKVDATLRRLLERYRGPEPSDTVEMFEGEEFFAAFERGIDVDADRPDCVEGRICFVFYSHLKNVKEVYVTTTLDREAQAVRGQVSFYRGAVPVRVPEEAEAARQRKGADALWMATLPIKLPRLRGSEGPRRGAGLSLAPLNLGDAETGFLTQSNLLSVAGRLGLDWPAVALHLGVSYREVQRIRHEFRDDLDEQIRHMLFSWAERQAGQPGAVGLLVQALEQSDRQDVAEEVRAVLELGRRKYQDSIRRMGLAPKDPALPGSSAPQPPEPAQA

SEQ ID NO: 5812 - protein, 985 aa, Homo sapiens
MSQWTPEYNELYTLKVDMKSEIPSDAPKTQESLKGILLHPEPIGAAKSFPAGVEMINSKVGNEFSHLCDDSQKQEKEMNGNQQEQEKSLVVRKKRKSQQAGPSYVQNCVKENQGILGLRQHLGTPSDEDNDSSFSDCLSSPSSSLHFGDSDTVTSDEDKEVSVRHSQTILNAKSRSHSARSHKWAAETESVSGLLMKRPCLHGSSLRRLPCRKRFVKNNSSQRTQKQKERILMQRKKREVLARRKYALLPSSSSSSENDLSSESSSSSSTEGEEDLFVSASENHQNNPAVPSGSIDEDVVVIEASSTPQVTANEEINVTSTDSEVEIVTVGESYRSRSTLGHSRSHWSQGSSSHASRPQEPRNRSRISTVIQPLRQNAAEVVDLTVDEDEPTVVPTTSARMESQATSASINNSNPSTSEQASDTASAVTSSQPSTVSETSATLTSNSTTGTSIGDDSRRTTSSAVTETGPPAMPRLPSCCPQHSPCGGSSQNHHALGHPHTSCFQQHGHHFQHHHHHHHTPHPAVPVSPSFSDPACPVERPPQVQAPCGANSSSGTSYHEQQALPVDLSNSGIRSHGSGSFHGASAFDPCCPVSSSRAAIFGHQAAAAAPSQPLSSIDGYGSSMVAQPQPQPPPQPSLSSCRHYMPPPYASLTRPLHHQASACPHSHGNPPPQTQPPPQVDYVIPHPVHAFHSQISSHATSHPVAPPPPTHLASTAAPIPQHLPPTHQPISHHIPATAPPAQRLHPHEVMQRMEVQRRRMMQHPTRAHERPPPHPHRMHPNYGHGHHIHVPQTMSSHPRQAPERSAWELGIEAGVTAATYTPGALHPHLAHYHAPPRLHHLQLGALPLMVPDMAGYPHIRYISSGLDGTSFRGPFRGNFEELIHLEERLGNVNRGASQGTIERCTYPHKYKKRKLHCKQDGEEGTEEDTEEKCTICLSILEEGEDVRRLPCMHLFHQVCVDQWLITNKKCPICRVDIEAQLPSES

SEQ ID NO: 5813 - protein, 123 aa, Homo sapiens [sequence omitted]

SEQ ID NO: 5814 - protein, 543 aa, Homo sapiens
MKIFCSRANPTTGSVEWLEEDEHYDYHQEIARSSYADMLHDKDRNVKYYQGIRAAVSRVKDRGQKALVLDIGTGTGLLSMMAVTAGADFCYAIEENCEAVPHRATVYAQLVESGRMWSWNKLFPIHVQTSLGEQVIVPPVDVESCPGAPSVCDIQLNQVSPADFTVLSDVLPMFSIDFSKQVSSSAACHSRRFEPLTSGRAQVVLSWWDIEMDPEGKIKCTMAPFWAHSDPEEMQWRDHWMQCVYFLPQEEPVVQGSALYLVAHHDDYCVWYSLQRTSPEKNERVRQMRPVCDCQAHLLWNRPRFGEINDQDRTDRYVQALRTVSLLLGEPFFTTSLLPWHNLYFWYVRTAVDQHLGPGAMVMPQAASLHAVVVEFRDLWRIRSPCGDCEGFDVHIMDDMIKRALDFRESREAEPHPLWEYPCRSLSEPWQILTFDFQQPVPLQPLCAEGTVELRRPGQSHAAVLWMEYHLTPECTLSTGLLEPADPEGGCCWNPHCKQAVYFFSPAPDPRALLGGAAVSYAVEFHPDTGDIIMEFRHADTPD

SEQ ID NO: 5815 - protein, 376 aa, Homo sapiens
MPLQVSDYSWQQTKTAVFLSLPLKGVCVRDTDVFCTENYLKVNFPPFLFEAFLYAPIDDESSKAKIGNDTIVFTLYKKEAAMWETLSVTGVDKEMMQRIREKSILQAQERAKEATEAKAAAKREDQKYALSVMMKIEEEERKKIEDMKENERIKATKALEAWKEYQRKAEEQKKIQREEKLCQKEKQIKEERKKIKYKSLTRNLASRNLAPKGRNSENIFTEKLKEDSIPAPRSVGSIKINFTPRVFPTALRESQVAEEEEWLHKQAEARRAMNTDIAELCDLKEEEKNPEWLKDKGNKLFATENYLAAINAYNLAIRLNNKMPLLYLNRAACHLKLKNLHKAIEDSSKAYRIMKRHLRLIHPTKLYKLMLRRFGM

SEQ ID NO: 5816 - protein, 1405 aa, Homo sapiens
MWSLTASEGESTTAHFFLGAGDEGLGTRGIGMRPEESDSELLEDEEDEVPPEPQIIVGICAMTKKSKSKPMTQILERLCRFDYLTVVILGEDVILNEPVENWPSCHCLISFHSKGFPLDKAVAYSKLRNPFLINDLAMQYYIQDRREVYRILQEEGIDLPRYAVLNRDPARPEECNLIEGEDQVEVNGAVFPKPFVEKPVSAEDHNVYIYYPSSAGGGSQRLFRKIGSRSSVYSPESSVRKTGSYIYEEFMPTDGTDVKVYTVGPDYAHAEARKSPALDGKVERDSEGKEIRYPVMLTAMEKLVARKVCVAFKQTVCGFDLLRANGHSFVCDVNGFSFVKNSMKYYDDCAKILGNTIMRELAPQFQIPWSIPTEAEDIPIVPTTSGTMMELRCVIAIIRHGDRTPKQKMKMEVKHPRFFALFEKHGGYKTGKLKLKRPEQLQEVLDITRLLLAELEKEPGGEIEEKTGKLEQLKSVLEMYGHFSGINRKVQLTYYPHGVKASNEGQDPQRETLAPSLLLVLKWGGELTPAGRVQAEELGRAFRCMYPGGQGDYAGFPGCGLLRLHSTFRHDLKIYASDEGRVQMTAAAFAKGLLALEGELTPILVQMVKSANMNGLLDSDGDSLSSCQHRVKARLHHILQQDAPFGPEDYDQLAPTRSTSLLNSMTIIQNPVKVCDQVFALIENLTHQIRERMQDPRSVDLQLYHSETLELMLQRWSKLERDFRQKSGRYDISKIPDIYDCVKYDVQHNGSLGLQGTAELLRLSKALADVVIPQEYGISREEKLEIAVGFCLPLLRKILLDLQRTHEDESVNKLHPLYSRGVLSPGRHVRTRLYFTSESHVHSLLSVFRYGGLLDETQDAQWQRALDYLSAISELNYMTQIVIMLYEDNTQDPLSEERFHVELHFSPGVKGVEEEGSAPAGCGFRPASSENEEMKTNQGSMENLCPGKASDEPDRALQTSPQPPEGPGLPRRSPLIRNRKAGSMEVLSETSSSRPGGYRLFSSSRPPTEMKQSGLGFEGCSMVPTIYPLETLHNALSLRQVSEFLSRVCQRHTDAQAQASAALFDSMHSSQASDNPFSPAALHSPPLQLQQRSEKPPWLETRFCHVGQAGLELLTSSDLPASASQSAGITGVSHRTQPDSSGPSSTVSSAGPSSPTTVDGNSQFGFSDQPSLNSHVAEEHQGLGLLQETPGSGAQELSIEGEQELFEPNQSPQVPPMETSQPYEEVSQPCQEVPDISQPCQDISEALSQPCQKVPDISQQCQENHDNGNHTCQEVPHISQPCQKSSQLCQKVSEEVCQLCLENSEEVSQPCQGVSVEVGKLVHKFHVGVGSLVQETLVEVGSPAEEIPEEVIQPYQEFSVEVGRLAQETSAINLLSQGIPEIDKPSQEFPEEIDLQAQEVPEEIN

SEQ ID NO: 5817 - protein, 444 aa, Homo sapiens
MVLEGNPEVGSAASDLQHRGNKGSCVLSSPGEDAQPGEEPIKYGELIVLGYNGCLASGDKGRRRSRLALSRRSHANGVKPDVMHHISTPLVSKALSNRGQHSISYTLSRSHSVIVEYTHDSDTDMFQIGRSTENMIDFVVTDTSPGGGAAEGPSAQSTISRYACRILCDRRPPYTARIYAAGFDASSNIFLGERAAKWRTPDGLMDGLTTNGVLVMHPAGGFSEDSAPGVWREISVCGNVYTLRDSRSAQQRGKLVENESNVLQDGSLIDLCGATLLWRTPAGLLRAPTLKQLEAQRQEANAARPQCPVGLSTLAFPSPARGRTAPDKQQPWVYVRCGHVHGYHGWGCRRERGPQERECPLCRLVGPYVPLWLGQEAGLCLDPGPPSHAFAPCGHVCSEKTARYWAQTPLPHGTHAFHAACPFCGAWLTGEHGCVRLIFQGPLD

SEQ ID NO: 5818 - protein, 649 aa, Homo sapiens
MGTALVYHEDMTATRLLWDDPECEIERPERLTAALDRLRQRGLEQRCLRLSAREASEEELGLVHSPEYVSLVRETQVLGKEELQALSGQFDAIYFHPSTFHCARLAAGAGLQLVDAVLTGAVQNGLALVRPPGHHGQRAAANGFCVFNNVAIAAAHAKQKHGLHRILVVDWDVHHGQGIQYLFEDDPSVLYFSWHRYEHGRFWPFLRESDADAVGRGQGLGFTVNLPWNQVGMGNADYVAAFLHLLLPLAFEGQMQATPECFAHLTQLLQVLAGGRVCAVLEGGYHLESLAESVCMTVQTLLGDPAPPLSGPMAPCQSALESIQSARAAQAPHWKSLQQQDVTAVPMSPSSHSPEGRPPPLLPGGPVCKAAASAPSSLLDQPCLCPAPSVRTAVALTTPDITLVLPPDVIQQEASALREETEAWARPHESLAREEALTALGKLLYLLDGMLDGQVNSGIAATPASAAAATLDVAVRRGLSHGAQRLLCVALGQLDRPPDLAHDGRSLWLNIRGKEAAALSMFHVSTPLPVMTGGFLSCILGLVLPLAYGFQPDLVLVALGPGHGLQGPHAALLAAMLRGLAGGRVLALLEENSTPQLAGILARVLNGEAPPSLGPSSVASPEDVQALMYLRGQLEPQWKMLQCHPHLVA

SEQ ID NO: 5819 - protein, 264 aa, Homo sapiens
MAGEQKPSSNLLEQFILLAKGTSGSALTALISQVLEAPGVYVFGELLELANVQELAEGANAAYLQLLNLFAYGTYPDYIANKESLPELSTAQQNKLKHLTIVSLASRMKCIPYSVLLKDLEMRNLRELEDLIIEAVYTDIIQGKLDQRNQLLEVDFCIGRDIRKKDINNIVKTLHEWCDGCEAVLLGIEQQVLRANQYKENHNRTQQQVEAEVTNIKKTLKATASSSAQEMEQQLAERECPPHAEQRQPTKKMSKVKGLVSSRH

SEQ ID NO: 5820 - protein, 241 aa, Homo sapiens
MSASLNYKSFSKEQQTMDNLEKQLICPICLEMFTKPVVILPCQHNLCRKCASDIFQASNPYLPTRGGTTMASGGRFRCPSCRHEVVLDRHGVYGLQRNLLVENIIDIYKQESTRPEKKSDQPMCEEHEEERINIYCLNCEVPTCSLCKVFGAHKDCQVAPLTHVFQRQKSELSDGIAILVGSNDRVQGVISQLEDTCKTIEIGFEAPPLQGQAAAPASGSGADSEPARHIFSFSWLNSLNE

SEQ ID NO: 5821 - protein, 1166 aa, Homo sapiens [sequence omitted]

SEQ ID NO: 5822 - protein, 821 aa, Homo sapiens
MVAPVLETSHVFCCPNRVRGVLNWSSGPRGLLAFGTSCSVVLYDPLKRVVVTNLNGHTARVNCIQWICKQDGSPSTELVSGGSDNQVIHWEIEDNQLLKAVHLQGHEGPVYAVHAVYQRRTSDPALCTLIVSAAADSAVRLWSKKGPEVTWKTGQVERGRAWKPPASLALCSRSCDSMVSCYASILCKALWKEKLHTFWHHNRISFLPSAFRPIPILACGNDDCRIHIFAQQNDQFQKVLSLCGHEDWIRGVEWAAFGRDLFLASCSQDCLIRIWKLYIKSTSLETQDDDNIRLKENTFTIENESVKIAFAVTLETVLAGHENWVNAVHWQPVFYKDGVLQQPVRLLSASMDKTMILWAPDEESGVWLEQREWTPEIVISGHFDGVQDLVWDPEGEFIITVGTDQTTRLFAPWKRKDQSQVTWHEIARPQIHGYDLKCLAMINRFQFVSGADEKVLRVFSAPRNFVENFCAITGQSLNHVLCNQDSDLPEGATVPALGLSNKAVFQGDIASQPSDEEELLTSTGFEYQQVAFQPSILTEPPTEDHLLQNTLWPEVQKLYGHGYEIFCVTCNSSKTLLASACKAAKKEHAAIILWNTTSWKQVQNLVFHSLTVTQMAFSPNEKFLLAVSRDRTWSLWKKQDTISPEFEPVFSLFAFTNKITSVHSRIIWSCDWSPDSKYFFTGSRDKKVVVWGECDSTDDCIEHNIGPCSSVLDVGGAVTAVSVCPVLHPSQRYVVAVGLECGKICLYTWKKTDQVPEINDWTHCVETSQSQSHTLAIRKLCWKNCSGKTEQKEAEGAEWLHFASCGEDHTVKIHRVNKCAL

SEQ ID NO: 5823 - protein, 322 aa, Homo sapiens
MVSVINTVDTSHEDMIHDAQMDYYGTRLATCSSDRSVKIFDVRNGGQILIADLRGHEGPVWQVAWAHPMYGNILASCSYDRKVIIWREENGTWEKSHEHAGHDSSVNSVCWAPHDYGLILACGSSDGAISLLTYTGEGQWEVKKINNAHTIGCNAVSWAPAVVPGSLIDHPSGQKPNYIKRFASGGCDNLIKLWKEEEDGQWKEEQKLEAHSDWVRDVAWAPSIGLPTSTIASCSQDGRVFIWTCDDASSNTWSPKLLHKFNDVVWHVSWSITANILAVSGGDNKVTLWKESVDGQWVCISDVNKGQGSVSASVTEGQQNEQ

SEQ ID NO: 5824 - protein, 448 aa, Homo sapiens
MSSRKLSGPKGRRLSIHVVTWNVASAAPPLDLSDLLQLNNRNLNLDIYVIGLQELNSGIISLLSDAAFNDSWSSFLMDVLSPLSFIKVSHVRMQGILLLVFAKYQHLPYIQILSTKSTPTGLFGYWGNKGGVNICLKLYGYYVSIINCHLPPHISNNYQRLEHFDRILEMQNCEGRDIPNILDHDLIIWFGDMNFRIEDFGLHFVRESIKNRCYGGLWEKDQLSIAKKHDPLLREFQEGRLLFPPTYKFDRNSNDYDTSEKKRKPAWTDRILWRLKRQPCAGPDTPIPPASHFSLSLRGYSSHMTYGISDHKPVSGTFDLELKPLVSAPLIVLMPEDLWTVENDMMVSYSSTSDFPSSPWDWIGLYKVGLRDVNDYVSYAWVGDSKVSCSDNLNQVYIDISNIPTTEDEFLLCYYSNSLRSVVGISRPFQIPPGSLREDPLGEAQPQI

SEQ ID NO: 5825 - protein, 546 aa, Homo sapiens; identical to SEQ ID NO: 5763

SEQ ID NO: 5826 - protein, 1279 aa, Homo sapiens
MLQALQLRTGFFCFRVLVALSPCALHDSGRLTTGSFNVVRDEEEEIKLEINMLKKYSHHRNIATYYGAFIKKSPPGHDDQLWLVMEFCGAGSITDLVKNTKGNTLKEDWIAYISREILRGLAHLHIHHVIHRDIKGQNVLLTENAEVKLVDFGVSAQLDRTVGRRNTFIGTPYWMAPEVIACDENPDATYDYRSDLWSCGITAIEMAEGAPPLCDMHPMRALFLIPRNPPPRLKSKKWSKKFFSFIEGCLVKNYMQRPSTEQLLKHPFIRDQPNERQVRIQLKDHIDRTRKKRGEKDETEYEYSGSEEEEEEVPEQEGEPSSIVNVPGESTLRRDFLRLQQENKERSEALRRQQLLQEQQLREQEEYKRQLLAERQKRIEQQKEQRRRLEEQQRREREARRQQEREQRRREQEEKRRLEELERRRKEEEERRRAEEEKRRVEREQEYIRRQLEEEQRHLEVLQQQLLQEQAMLLHDHRRPHPQHSQQPPPPQQERSKPSFHAPEPKAHYEPADRAREVQWSHLASLKNNVSPVSRSHSFSDPSPKFAHHHLRSQDPCPPSRSEVLSQSSDSKSEAPDPTQKAWSRSDSDEVPPRVPVRTTSRSPVLSRRDSPLQGSGQQNSQAGQRNSTSSIEPRLLWERVEKLVPRPGSGSSSGSSNSGSQPGSHPGSQSGSGERFRVRSSSKSEGSPSQRLENAVKKPEDKKEVFRPLKPAVRIDLTALAKELRAVEDVRPPHKVTDYSSSSEESGTTDEEDDDVEQEGADESTSGPEDTRAASSLNLSNGETESVKTMIVHDDVESEPAMTPSKEGTLIVRQSTVDQKRASHHESNGFAGRIHLLPDLLQQSHSSSTSSTSSSPSSSQPTPTMSPQTPQDKLTANETQSASSTLQKHKSSSSFTPFIDPRLLQISPSSGTTVTSVVGFSCDGMRPEAIRQDPTRKGSVVNVNPTNTRPQSDTPEIRKYKKRFNSEILCAALWGVNLLVGTESGLMLLDRSGQGKVYPLINRRRFQQMDVLEGLNVLVTISGKKDKLRVYYLSWLRNKILHNDPEVEKKQGWTTVGDLEGCVHYKVVKYERIKFLVIALKSSVEVYAWAPKPYHKFMAFKSFGELVHKPLLVDLTVEEGQRLKVIYGSCAGFHAVDVDSGSVYDIYLPTHIQCSIKPHAIIILPNTDGMELLVCYEDEGVYVNTYGRITKDVVLQWGEMPTSVAYIRSNQTMGWGEKAIEIRSVETGHLDGVFMHKRAQRLKFLCERNDKVFFASVRSGGSSQVYFMTLGRTSLLSW

SEQ ID NO: 5827 - protein, 662 aa, Homo sapiens
MASCPDSDNSWVLAGSESLPVETLGPASRMDPESERALQAPHSPSKTDGKELAGTMDGEGTLFQTESPQSGSILTEETEVKGTLEGDVCGVEPPGPGDTVVQGDLQETTVVTGLGPDTQDLEGQSPPQSLPSTPKAAWIREEGRCSSSDDDTDVDMEGLRRRRGREAGPPQPMVPLAVENQAGGEGAGGELGISLNMCLLGALVLLGLGVLLFSGGLSESETGPMEEVERQVLPDPEVLEAVGDRQDGLREQLQAPVPPDSVPSLQNMGLLLDKLAKENQDIRLLQAQLQAQKEELQSLMHQPKGLEEENAQLRGALQQGEAFQRALESELQQLRARLQGLEADCVRGPDGVCLSGGRGPQGDKAIREQGPREQEPELSFLKQKEQLEAEAQALRQELERQRRLLGSVQQDLERSLQDASRGDPAHAGLAELGHRLAQKLQGLENWGQDPGVSANASKAWHQKSHFQNSREWSGKEKWWDGQRDRKAEHWKHKKEESGRERKKNWGGQEDREPAGRWKEGRPRVEESGSKKEGKRQGPKEPPRKSGSFHSSGEKQKQPRWREGTKELPLSPAFFGEDGIFRHDRLRFRDFVDALEDSLEEVAVQQTGDDDEVDDFEDFIFSHFFGDKALKKRSGKKDKHSQSPRAAGPREGHSHSHHHHHRG

SEQ ID NO: 5828 - protein, 800 aa, Homo sapiens
MVAPVLETSHVFCCPNRVRGVLNWSSGPRGLLAFGTSCSVVLYDPLKRVVVTNLNGHTARVNCIQWICKQDGSPSTELVSGGSDNQVIHWEIEDNQLLKAVHLQGHEGPVYAVHAVYQRRTSDPALCTLIVSAAADSAVRLWSKKGPEVPILACGNDDCRIHIFAQQNDQFQKVLSLCGHEDWIRGVEWAAFGRDLFLASCSQDCLIRIWKLYIKSTSLETQDDDNIRLKENTFTIENESVKIAFAVTLETVLAGHENWVNAVHWQPVFYKDGVLQQPVRLLSASMDKTMILWAPDEESGVWLEQVRVGEVGGNTLGFYDCQFNEDGSMIIAHAFHGALHLWKQNTVNPREWTPEIVISGHFDGVQDLVWDPEGEFIITVGTDQTTRLFAPWKRKDQSQVTWHEIARPQIHGYDLKCLAMINRFQFVSGADEKVLRVFSAPRNFVENFCAITGQSLNHVLCNQDSDLPEGATVPALGLSNKAVFQGDIASQPSDEEELLTSTGFEYQQVAFQPSILTEPPTEDHLLQNTLWPEVQKLYGHGYEIFCVTCNSSKTLLASACKAAKKEHAAIILWNTTSWKQVQNLVFHSLTVTQMAFSPNEKFLLAVSRDRTWSLWKKQDTISPEFEPVFSLFAFTNKITSVHSRIIWSCDWSPDSKYFFTGSRDKKVVVWGECDSTDDCIEHNIGPCSSVLDVGGAVTAVSVCPVLHPSQRYVVAVGLECGKICLYTWKKTDQVPEINDWTHCVETSQSQSHTLAIRKLCWKNCSGKTEQKEAEGAEWLHFASCGEDHTVKIHRVNKCAL

SEQ ID NO: 5829 - protein, 186 aa, Homo sapiens
MAGENFATPFHGHVGRGAFSDVYEPAEDTFLLLNALEAAAAELAGVEICLEVGSGSGVVSAFLASMIGPQALYMCTDINPEAAACTLETARCNKVHIQPVITDLVGSHGIEAAWAGGKNGREVMDRFFPLVPDLLSPKGLFYLVTIKENNPEEILKIMKTKGLQGTTALSRQAGQETLSVLKFTKS

SEQ ID NO: 5830 - protein, 783 aa, Homo sapiens
MAKYNTGGNPTEDVSVNSRPFRVTGPNSSSGIQARKNLFNNQGNASPPAGPSNVPKFGSPKPPVAVKPSSEEKPDKEPKPPFLKPTGAGQRFGTPASLTTRDPEAKVGFLKPVGPKPINLPKEDSKPTFPWPPGNKPSLHSVNQDHDLKPLGPKSGPTPPTSENEQKQAFPKLTGVKGKFMSASQDLEPKPLFPKPAFGQKPPLSTENSHEDESPMKNVSSSKGSPAPLGVRSKSGPLKPAREDSENKDHAGEISSLPFPGVVLKPAASRGGPGLSKNGEEKKEDRKIDAAKNTFQSKINQEELASGTPPARFPKAPSKLTVGGPWGQSQEKEKGDKNSATPKQKPLPPLFTLGPPPPKPNRPPNVDLTKFHKTSSGNSTSKGQTSYSTTSLPPPPPSHPASQPPLPASHPSQPPVPSLPPRNIKPPFDLKSPVNEDNQDGVTHSDGAGNLDEEQDSEGETYEDIEASKEREKKREKEEKKRLELEKKEQKEKEKKEQEIKKKFKLTGPIQVIHLAKACCDVKGGKNELSFKQGEQIEIIRITDNPEGKWLGRTARGSYGYIKTTAVEIDYDSLKLKKDSLGAPSRPIEDDQEVYDDVAEQDDISSHSQSGSGGIFPPPPDDDIYDGIEEEDADDGFPAPPKQLDMGDEVYDDVDTSDFPVSSAEMSQGTNVGKAKTEEKDLKKLKKQEKEEKDFRKKFKYDGEIRVLYSTKVTTSITSKKWGTRDLQVKPGESLEVIQTTDDTKVLCRNEEGKYGYVLRSYLADNDGEIYDDIADGCIYDND

SEQ ID NO: 5831 - protein, 573 aa, Homo sapiens
MIPPQEASARRREIEDKLKQEEETLSFIRDSLEKSDQLTKNMVSILSSFESRLMKLENSIIPVHKQTENLQRLQENVEKTLSCLDHVISYYHVISGDDDLEAQEDVTLEHLPESVLQDVIRISRWLVEYGRNQDFMNVYYQIRSSQLDRSIKGLKEHFHKSSSSSGVPYSPAIPNKRKDTPTKKPVKRPGRDDMLDVETDAYIHCVSAFVKLAQSEYQLLADIIPEHHQKKTFDSLIQDALDGLMLEGENIVSAARKAIVRHDFSTVLTVFPILRHLKQTKPEFDQVLQGTAASTKNKLPGLITSMETIGAKALEDFADNIKNDPDKEYNMPKDGTVHELTSNAILFLQQLLDFQETAGAMLASQETSSSATSYSSEFSKRLLSTYICKVLGNLQLNLLSKSKVYEDPALSAIFLHNNYNYILKSLEKSELIQLVAVTQKTAERSYREHIEQQIQTYQRSWLKVTDYIAEKNLPVFQPGVKLRDKERQIIKERFKGFNDGLEELCKIQKAWAIPDTEQRDRIRQAQKTIVKETYGAFLQKFGSVPFTKNPEKYIKYGVEQVGDMIDRLFDTSA

SEQ ID NO: 5832 - protein, 824 aa, Homo sapiens
MMQNVHLAPETDEDDLYSGYNDYNPIYDIEELENDAAFQQAVRTSHGRRPPITAKISSTAVTRPIATGYGSKTSLASSIGRPMTGAIQDGVTRPMTAVRAAGFTKAALRGSAFDPLSQSRGPASPLEAKKKDSPEEKIKQLEKEVNELVEESCIANSCGDLKLALEKAKDAGRKERVLVRQREQVTTPENINLDLTYSVLFNLASQYSVNEMYAEALNTYQVIVKNKMFSNAGILKMNMGNIYLKQRNYSKAIKFYRMALDQVPSVNKQMRIKIMQNIGVTFIQAGQYSDAINSYEHIMSMAPNLKAGYNLTICYFAIGDREKMKKAFQKLITVPLEIDEDKYISPSDDPHTNLVTEAIKNDHLRQMERERKAMAEKYIMTSAKLIAPVIETSFAAGYDWCVEVVKASQYVELANDLEINKAVTYLRQKDYNQAVEILKVLEKKDSRVKSAAATNLSALYYMGKDFAQASSYADIAVNSDRYNPAALTNKGNTVFANGDYEKAAEFYKEALRNDSSCTEALYNIGLTYEKLNRLDEALDCFLKLHAILRNSAEVLYQIANIYELMENPSQAIEWLMQVVSVIPTDPQVLSKLGELYDREGDKSQAFQYYYESYRYFPCNIEVIEWLGAYYIDTQFWEKAIQYFERASLIQPTQVKWQLMVASCFRRSGNYQKALDTYKDTHRKFPENVECLRFLVRLCTDLGLKDAQEYARKLKRLEKMKEIREQRIKSGRDGSGGSRGKREGSASGDSGQNYSASSKGERLSARLRALPGTNEPYESSSNKEIDASYVDPLGPQIERPKTAAKKRIDEDDFADEELGDDLLPE

SEQ ID NO: 5833 - protein, 948 aa, Homo sapiens
MLRTAGRDGLCRLSTYLEELEAVELKKFKLYLGTATELGEGKIPWGSMEKAGPLEMAQLLITHFGPEEAWRLALSTFERINRKDLWERGQREDLVRDTPPGGPSSLGNQSTCLLEVSLVTPRKDPQETYRDYVRRKFRLMEDRNARLGECVNLSHRYTRLLLVKEHSNPMQVQQQLLDTGRGHARTVGHQASPIKIETLFEPDEERPEPAAVVMQGAAGIGKSMLAHKVMLDWADGKLFQGRFDYLFYINCREMNQSATECSMQDLIFSCWPEPSAPLQELIRVPERLLFIIDGFDELKPSFHDPQGPWCLCWEEKRPTELLLNSLIRKKLLPELSLLITTRPTALEKLHRLLEHPRHVEILGFSEAERKEYFYKYFHNAEQAGQVFNYVRDNEPLFTMCFVPLVCWVVCTCLQQQLEGGGLLRQTSRTTTAVYMLYLLSLMQPKPGAPRLQPPPNQRGLCSLAADGLWNQKILFEEQDLRKHGLDGEDVSAFLNMNIFQKDINCERYYSFIHLSFQEFFAAMYYILDEGEGGAGPDQDVTRLLTEYAFSERSFLALTSRFLFGLLNEETRSHLEKSLCWKVSPHIKMDLLQWIQSKAQSDGSTLQQGSLEFFSCLYEIQEEEFIQQALSHFQVIVVSNIASKMEHMVSSFCLKRCRSAQVLHLYGATYSADGEDRARCSAGAHTLLVQLPERTVLLDAYSEHLAAALCTNPNLIELSLYRNALGSRGVKLLCQGLRHPNCKLQNLRLKRCRISSSACEDLSAALIANKNLTRMDLSGNGVGFPGMMLLCEGLRHPQCRLQMIQLRKCQLESGACQEMASVLGTNPHLVELDLTGNALEDLGLRLLCQGLRHPVCRLRTLWLQLDSCGLTAKACENLYFTLGINQTLTDLYLTNNALGDTGVRLLCKRLSHPGCKLRVLWLFGMDLNKMTHSRLAALRVTKPYLDIGC

SEQ ID NO: 5834 - protein, 1931 aa, Homo sapiens
MAARSAPSCHLRLEWVYGYRGHQCRNNLYYTAAKEIVYFVAGVGVVYSPREHRQKFYRGHSDDIISLALHPERVLVATGQVGKEPYICIWDSYTVQTISVLKDVHTHGIACLAFDLDGQRLVSVGLDSKNAVCVWDWKRGKMLSMAPGHTDRIFDISWDLYQPNKLVSCGVKHIKFWSLCGNALTPKRGVFGKTGDLQTILCLACARDELTYSGALNGDIYVWKGINLIRTIQGAHAAGIFSMNACEEGFATGGRDGCIRLWDLTFKPITVIDLRETDQGYKGLSVRSVCWRGDHILVGTQDSEIFEIVVQERNKPFLIMQGHCEGELWALAVHPTKPLAVTGSDDRSVRIWSLVDHALIARCNMEEPIRCAAVNADGIHLALGMKDGSFTVLRVRDMTEVVHIKDRKEAIHELKYSPDGTYLAVGCNDSSVDIYGVAQRYKKVGECLGSLSFITHLDWSSDSRYLQTNDGNGKRLFYRMPGGKEVTSTEEIKGVHWASWTCVSGLEVNGIWPKYSDINDINSVDGNYIGQVLVTADDYGIIKLFRYPCLRKGAKFRKYIGHSAHVTNVRWSHDYQWVISIGGADHSVFQWKFIPERKLKDAVHIAPQESLADSHSDESDSDLSDVPELDSEIEQETQLTYRRQVYKEDLPQLKEQCKEKQKSATSKRRERAPGNSIRLHFVHGYRGYDCRSNLFYTQIGEIVYHVAAVGVIYNRQQNTQRFYLGHDDDILCLTIHPLKDYVATGQVGRDPSIHIWDTETIKPLSILKGHHQYGVSAVDFSADGKRLASVGIDDSHTVVLWDWKKGEKLSIARGSKDKIFVVKMNPYVPDKLITAGIKHMKFWRKAGDVCIWRDIFLVKTVKAHDGPVFSMHALEKGFVTGGKDGIVALWDDSFERCLKTYAIKRAALAPGSKGLLLEDNPSIRAISLGHGHILVGTKNGEILEVDKSGPITLLVQGHMEGEVWGLATHPYLPICATVSDDKTLRIWDLSPSHCMLAVRKLKKGGRCCCFSPDGKALAVGLNDGSFLMANADTLEDLVSFHHRKDMISDIRFSPGSGKYLAVASHDSFIDIYNVMSSKRVGICKGATSYITHIDWDIRGKLLQVNTGAKEQLFFEAPRGKKQTIPSVEVEKIAWASWTSVLGLCCEGIWPVIGEVTDVTASCLTSDKMVLATGDDLGFVKLFRYPTKGKFGKFKRYVAHSTHVTNVRWTYDDSMLVTLGGTDMSLMVWTNEMEGYREKRPCDSEESDIDSEEDGGYDSDVTRENEISYTIRALSTNIRPMLGIKPHLQQKEPSIDERPPVSRAPPQPEKLQTNNVGKKKRPIEDLVLELIFGYRGRDCRNNVHYLNDGDDIIYHTASVGILHNVATGSQSFYQEHNDDILCLTVNQHPKFINIVATGQVVLSCSLLTTAPSIHIWDAMNKQTLSILRCYHSKGVCSVSFSATGKLLLSVGLDPEHTITIWRWQEGAKIASRAGHNQRIFVAEFRPDSDTQFVSVGVKHVKFWTLAGRALLSKKGLLSTLEDARMQTMLAIAFGANNLTFTGTISGDVCVWKDHILCRIVARAHNGPVFAMYTTLRDGLIVTGGKERPSKEGGAVKLWDQELRRCRAFRLETGQATDCVRSVCRGKGKILVGTRNAEIIEVGEKNAACNILVNGHVDGPIWGLATHPSRDFFLSAAEDGTVRLWDIADKKMLNKVNLGHAARTVCYSPEGDMVAIGMKNGEFIILLVSSLKIWGKKRDRRCAIHDIRFSPDSRYLAVGSSENSVDFYDLTLGPTLNRISYCKDIPSFVIQMDFSADSSYLQVSSGCYKRHVYEVPSGKHLMDHAAIDRITWATWTSILGDEVLGIWSRHAEKADVNCACVSHSGISLVTGDDFGMVKLFDFPCPEKFAKHKRFLGHSPHVTNIRFTSGDRHVVSAGGDDCSLFVWKCVHTPH

SEQ ID NO: 5835 - protein, 142 aa, Homo sapiens
MSISSDEVNFLVYRYLQESGFSHSAFTFGIESHISQSNINGALVPPAALISIIQKGLQYVEAEVSINEDGTLFDGRPIESLSLIDAVMPDVVQTRQQAYRDKLAQQQAAAAAAAAAAASQQGSAKNGENTANGEENGAHTIA

SEQ ID NO: 5836 - protein, 566 aa, Homo sapiens
MEFFTMPAAWFMRQLQRMWFLRPSMAIMVFRMIEERPTHAITVRVSYLEIYNESLFDLLSTLPYVGPSVTPMTIVENPQGVFIKGLSVHLTSQEEDAFSLLFEGETNRIIASHTMNKNSSRSHCIFTIYLEAHSRTLSEEKYITSKINLVDLAGSERLGKSGSEGQVLKEATYINKSLSFLEQAIIALGDQKRDHIPFRQCKLTHALKDSLGGNCNMVLVTNIYGEAAQLEETLSSLRFASRMKLVTTEPAINEKYDAERMVKNLEKELALLKQELAIHDSLTNRTFVTYDPMDEIQIAEINSQVRRYLEGTLDEIDIISLRQIKEVFNQFRVVLSQQEQEVESTLRRKYTLIDRNDFAAISAIQKAGLVDVDGHLVGEPEGQNFGLGVAPFSTKPGKKAKSKKTFKEPLRPDTPPSKPVAFEEFKNEQGSEINRIFKENKSILNERRKRASETTQHINAIKREIDVTKEALNFQKSLREKQGKYENKGLMIIDEEEFLLILKLKDLKKQYRSEYQDLRDLRAEIQYCQHLVDQCRHRLLMGATVGKNLTSGTMSPLSSLRTCRWH

SEQ ID NO: 5837 - protein, 475 aa, Homo sapiens
MAEGSVMFSDVSIDFSQEEWDCLDPVQRDLYRDVMLENYGNLVSMGLYTPKPQVISLLEQGKEPWMVGRELTRGLCSDLESMCETKLLSLKKEVYEIELCQREIMGLTKHGLEYSSFGDVLEYRSHLAKQLGYPNGHFSQEIFTPEYMPTFIQQTFLTLHQIINNEDRPYECKKCGKAFSQNSQFIQHQRIHIGEKSYECKECGKFFSCGSHVTRHLKIHTGEKPFECKECGKAFSCSSYLSQHQRIHTGKKPYECKECGKAFSYCSNLIDHQRIHTGEKPYECKVCGKAFTKSSQLFQHARIHTGEKPYECKECGKAFTQSSKLVQHQRIHTGEKPYECKECGKAFSSGSALTNHQRIHTGEKPYDCKECGKAFTQSSQLRQHQRIHAGEKPFECLECGKAFTQNSQLFQHQRIHTDEKPYECNECGKAFNKCSNLTRHLRIHTGEKPYNCKECGKAFSSGSDLIRHQGIHTNK

SEQ ID NO: 5838 - protein, 153 aa, Homo sapiens; identical to SEQ ID NO: 4872

SEQ ID NO: 5839 - protein, 871 aa, Homo sapiens
MGEGGLPPAFQLLLRACDQGDTETARRLLEPGAAEPAERGAEPEAGAEPAGAEVAGPGAAAAGAVGAPVPVDCSDEAGNTALQFAAAGGHEPLVRFLLRRGASVNSRNHYGWSALMQAARFGHVSVAHLLLDHGADVNAQNRLGASVLTVASRGGHLGVVKLLLEAGAFVDHHHPSGEQLGLGGSRDEPLDITALMAAIQHGHEAVVRLLMEWGADPNHAARTVGWSPLMLAALTGRLGVAQQLVEKGANPDHLSVLEKTAFEVALDCKHRDLVDYLDPLTTVRPKTDEEKRRPDIFHALKMGNFQLVKEIADEDPSHVNLVNGDGATPLMLAAVTGQLALVQLLVERHADVDKQDSVHGWTALMQATYHGNKEIVKYLLNQGADVTLRAKNGYTAFDLVMLLNDPDTELVRLLASVCMQVNKDKGRPSHQPPLPHSKVRQPWSIPVLPDDKGGLKSWWNRMSNRFRKLKLMQTLPRGLSSNQPLPFSDEPEPALDSTMRAAPQDKTSRSALPDAAPVTKDNGPGSTRGEKEDTLLTTMLRNGAPLTRLPSDKLKAVIPPFLPPSSFELWSSDRSRTRHNGKADPMKTALPQRASRGHPVGGGGTDTTPVRPVKFPSLPRSPASSANSGNFNHSPHSSGGSSGVGVSRHGGELLNRSGGSIDNVLSQIAAQRKKAAGLLEQKPSHRSSPVGPAPGSSPSELPASPAGGSAPVGKKLETSKRPPSGTSTTSKSTSPTLTPSPSPKGHTAESSVSSSSSHRQSKSSGGSSSGTITDEDELTGILKKLSLEKYQPIFEEQEVDMEAFLTLTDGDLKELGIKTDGSRQQILAAISELNAGKGRERQILQETIHNFHSSFESSASNTRAPGNSPCA

SEQ ID NO: 5840 - protein, 452 aa, Homo sapiens
MSASLNYKSFSKEQQTMDNLEKQLICPICLEMFTKPVVILPCQHNLCRKCASDIFQASNPYLPTRGGTTMASGGRFRCPSCRHEVVLDRHGVYGLQRNLLVENIIDIYKQESTRPEKKSDQPMCEEHEEERINIYCLNCEVPTCSLCKVFGAHKDCQVAPLTHVFQRQKSELSDGIAILVGSNDRVQGVISQLEDTCKTIEECCRKQKQELCEKFDYLYGILEERKNEMTQVITRTQEEKLEHVRALIKKYSDHLENVSKLVESGIQFMDEPEMAVFLQNAKTLLKKISEASKAFQMEKIEHGYENMNHFTVNLNREEKIIREIDFYREDEDEEEEEGGEGEKEGEGEVGGEAVEVEEVENVQTEFPGEDENPEKASELSQVELQAAPGALPVSSPEPPPALPPAADAPVTQIGFEAPPLQGQAAAPASGSGADSEPARHIFSFSWLNSLNE

SEQ ID NO: 5841 - protein, 163 aa, Homo sapiens
MPSIKLQSSDGEIFEVDVEIAKQSVTIKTMLEDLGMDDEGDDDPVPLPNVNAAILKKVIQWCTHHKDDPPPPEDDENKEKRTDDIPVWDQEFLKVDQGTLFELILAANYLDIKGLLDVTCKTVANMIKGKTPEEIRKTFNIKNDFTEEEEAQVRKENQWCEEK

SEQ ID NO: 5842 - protein, 399 aa, Homo sapiens
MAAPSPSGGGGSGGGSGSGTPGPVGSPAPGHPAVSSMQGKRKALKLNFANPPFKSTARFTLNPNPTGVQNPHIERLRTHSIESSGKLKISPEQHWDFTAEDLKDLGEIGRGAYGSVNKMVHKPSGQIMAVKRIRSTVDEKEQKQLLMDLDVVMRSSDCPYIVQFYGALFREGDCWICMELMSTSFDKFYKYVYSVLDDVIPEEILGKITLATVKALNHLKENLKIIHRDIKPSNILLDRSGNIKLCDFGISGQLVDSIAKTRDAGCRPYMAPERIDPSASRQGYDVRSDVWSLGITLYELATGRFPYPKWNSVFDQLTQVVKGDPPQLSNSEEREFSPSFINFVNLCLTKDESKRPKYKELLKHPFILMYEERAVEVACYVCKILDQMPATPSSPMYVD

SEQ ID NO: 5843 - protein, 373 aa, Homo sapiens
MAQESPKNSAAEIPVTSNGEVDDSREHSFNRDLKHSLPSGLGLSETQITSHGFDNTKEGVIEAGAFQGSPAPPLPSVMSPSRVAASRLAQQGSDLIVPAGGQRTQTKSGPVILADEIKNPAMEKLELVRKWSLNTYKCTRQIISEKLGRGSRTVDLELEAQIDILRDNKKKYENILKLAQTLSTQLFQMVHTQRQLGDAFADLSLKSLELHEEFGYNADTQKLLAKNGETLLGAINFFIASVNTLVNKTIEDTLMTVKQYESARIEYDAYRTDLEELNLGPRDANTLPKIEQSQHLFQAHKEKYDKMRNDVSVKLKFLEENKVKVLHNQLVLFHNAIAAYFAGNQKQLEQTLKQFHIKLKTPGVDAPSWLEEQ

SEQ ID NO: 5844 - protein, 217 aa, Homo sapiens
MYSLNQEIKAFSRNNLRKQCTRVTTLTGKKIIETWKDARIHVVEEVEPSSGGGCGYVQDLSSDLQVGVIKPWLLLGSQDAAHDLDTLKKNKVTHILNVAYGVENAFLSDFTYKSISILDLPETNILSYFPECFEFIEEAKRKDGVVLVHCNAGVSRAAAIVIGFLMNSEQTSFTSAFSLVKNARPSICPNSGFMEQLRTYQEGKESNKCDRIQENSS

SEQ ID NO: 5845 - protein, 891 aa, Homo sapiens
MLRTAGRDGLCRLSTYLEELEAVELKKFKLYLGTATELGEGKIPWGSMEKAGPLEMAQLLITHFGPEEAWRLALSTFERINRKDLWERGQREDLVRDTPPGGPSSLGNQSTCLLEVSLVTPRKDPQETYRDYVRRKFRLMEDRNARLGECVNLSHRYTRLLLVKEHSNPMQVQQQLLDTGRGHARTVGHQASPIKIETLFEPDEERPEPAAVVMQGAAGIGKSMLAHKVMLDWADGKLFQGRFDYLFYINCREMNQSATECSMQDLIFSCWPEPSAPLQELIRVPERLLFIIDGFDELKPSFHDPQGPWCLCWEEKRPTELLLNSLIRKKLLPELSLLITTRPTALEKLHRLLEHPRHVEILGFSEAERKEYFYKYFHNAEQAGQVFNYVRDNEPLFTMCFVPLVCWVVCTCLQQQLEGGGLLRQTSRTTTAVYMLYLLSLMQPKPGAPRLQPPPNQRGLCSLAADGLWNQKILFEEQDLRKHGLDGEDVSAFLNMNIFQKDINCERYYSFIHLSFQEFFAAMYYILDEGEGGAGPDQDVTRLLTEYAFSERSFLALTSRFLFGLLNEETRSHLEKSLCWKVSPHIKMDLLQWIQSKAQSDGSTLQQGSLEFFSCLYEIQEEEFIQQALSHFQVIVVSNIASKMEHMVSSFCLKRCRSAQVLHLYGATYSADGEDRARCSAGAHTLLVQLPERTVLLDAYSEHLAAALCTNPNLIELSLYRNALGSRGVKLLCQGLRHPNCKLQNLRLKRCRISSSACEDLSAALIANKNLTRMDLSGNGVGFPGMMLLCEGLRHPQCRLQMIQLRKCQLESGACQEMASVLGTNPHLVELDLTGNALEDLGLRLLCQGLRHPVCRLRTLCWMLFGMDLNKMTHSRLAALRVTKPYLDIGC

SEQ ID NO: 5846 - protein, 314 aa, Homo sapiens
MQTFLKGKRVGYWLSEKKIKKLNFQAFAELCRKRGMEVVQLNLSRPIEEQGPLDVIIHKLTDVILEADQNDSQSLELVHRFQEYIDAHPETIVLDPLPAIRTLLDRSKSYELIRKIEAYMEDDRICSPPFMELTSLCGDDTMRLLEKNGLTFPFICKTRVAHGTNSHEMAIVFNQEGLNAIQPPCVVQNFINHNAVLYKVFVVGESYTVVQRPSLKNFSAGTSDRESIFFNSHNVSKPESSSVLTELDKIEGVFERPSDEVIRELSRALRQALGVSLFGIDIIINNQTGQHAVIDINAFPGDCQVCFIEGWKTD

SEQ ID NO: 5847 - protein, 209 aa, Homo sapiens
MPVAVMAESAFSFKKLLDQCENQELEAPGGIATPPVYGQLLALYLLHNDMNNARYLWKRIPPAIKSANSELGGIWSVGQRIWQRDFPGIYTTINAHQWSETVQPIMEALRDATRRRAFALVSQAYTSIIADDFAAFVGLPVEEAVKGILEQGWQADSTTRMVLPRKPVAGALDVSFNKFIPLSEPAPVPPIPNEQQLARLTDYVAFLEN

SEQ ID NO: 5848 - protein, 1644 aa, Homo sapiens
MFWCGTCFVTNNMKGSEVSLEKKKKIKMPVKRLREVVSQNHGDHLVLLKDELPCVPPALSANKRLPVGTGTSLNGTSRGSSDLTSARNCYQPLLENPMVSESDFSKDVAVQVLPLDKIEENNKQKANDIFISQYTMGQKDALRTVLKQNVSLCLTGWSDHSGVITTHCSLYLLRLMRSSHLSLPSSWDYRAQSMPVFKEVKVHLLEDAGIEKDAVTQETRISPSGIDSATTVAAATAAAIATAAPLIKVQSDLEAKVNSVTELLSKLQETDKHLQRVTEQQTSIQRKQEKLHCHDHEKQMNVFMEQHIRHLEKLQQQQIDIQTHFISAALKTSSFQPVSMPSSRAVEKYSVKPEHPNLGSCNPSLYNTFASKQAPLKEVEDTSFDKQKSPLETPAPRRFAPVPVSRDDELSKRENLLEEKENMEVSCHRGNVRLLEQILNNNDSLTRKSESSNTTSLTRSKIGWTPEKTNRFPSCEELETTKVTMQKSDDVLHDLGQKEKETNSMVQPKESLSMLKLPDLPQNSVKLQTTNTTRSVLKDAEKILRGVQNNKKVLEENLEAIIRAKDGAAMYSLINALSTNREMSEKIRIRKTVDEWIKTISAEIQDELSRTDYEQKRFDQKNQRTKKGQNMTKDIRTNTQDKTVNKSVIPRKHSQKQIEEHFRNLPMRGMPASSLQKERKEGLLKATTVIQDEDYMLQVYGKPVYQGHRSTLKKGPYLRFNSPSPKSRPQRPKVIERVKGTKVKSIRTQTDFYATKPKKMDSKMKHSVPVLPHGDQQYLFSPSREMPTFSGTLEGHLIPMAILLGQTQSNSDTMPPAGVIVSKPHPVTVTTSIPPSSRKVETGVKKPNIAIVEMKSEKKDPPQLTVQVLPSVDIDSISNSSADVLSPLSSPKEASLPPVQTWIKTPEIMKVDEEEVKFPGTNFDEIIDVIQEEEKCDEIPDSEPILEFNRSVKADSTKYNGPPFPPVASTFQPTADILDKVIERKETLENSLIQWVEQEIMSRIISGLFPVQQQIAPSISVSVSETSEPLTSDIVEGTSSGALQLFVDAGVPVNSNVIKHFVNEALAETIAVMLGDREAKKQGPVATGVSGDASTNETYLPARVCTPLPTPQPTPPCSPSSPAKECVLVKTPDSSPCDSDHDMAFPVKEICAEKGDDMPAIMLVNTPTVTPTTTPPPAAAVFTPTLSDISIDKLKVSSPELPKPWGDGDLPLEEENPNSPQEELHPRAIVMSVAKDEEPESMDFPAQPPPPEPVPFMPFPAGTKAPSPSQMPGSDSSTLESTLSVTVTETETLDKPISEGEILFSCGQKLAPKILEDIGLYLTNLNDSLSSTLHDAVEMEDDPPSEGQVIRMSHKKFHADAILSFAKQNQESAVSQQAVYHSEDLENSVGELSEGQRPQLTAAAENILMGHSLYMQPPVTNTQSLDQQCDPKPLSRQFDTVSGSIYEDSCASHGPMSLGELELEPNSKLVLPTTLLTAQENDVNLPVAAEDFSQYQLKQNQDVKQVEHKPSQSYLRVRNKSDIAPSQQQVSPGDMDRTQIELNPYLTCVFSGLGVHVKKVSCIGKLGLWRFVIQIISSPRWESSATLRFTDAPCQDVSDAAVSEPRGLLSVSESQHNAGGHGVFGGRYLLNGKRQPAQCLCHWF

SEQ ID NO: 5849 - protein, 1045 aa, Homo sapiens
MLTVQVKTSSAIELPDSLAFLWIIPMWYCEGKELENSPDIHIVQAGNLHSLTIAEAFEEDTGRYSCFASNIYGTDSTSAEIYIEGVSSSDSEGDPNKEEMNRIQKPNEVSSPPTTSAVIPPAVPQAQHLVAQPRVATIQQCQSPTNYLQGLDGKPIIAAPVFTKMLQNLSASEGQLVVFECRVKGAPSPKVEWYREGTLIEDSPDFRILQKKPRSMAEPEEICTLVIAEVFAEDSGCFTCTASNKYGTVSSIAQLHVRGNEDLSNNGSLHSANSTTNLAAIEPQPSPPHSEPPSVEQPPKPKLEGVLVNHNEPRSSSRIGLRVHFNLPEDDKGSEASSEAGVVTTRQTRPDSFQERFNGQATKTPEPSSPVKEPPPVLAKPKLDSTQLQQLHNQVLLEQHQLQNPPPSSPKEFPFSMTVLNSNAPPAVTTSSKQVKAPSSQTFSLARPKYFFPSTNTTAATVAPSSSPVFTLSSTPQTIQRTVSKESLLVSHPSVQTKSPGGLSIQNEPLPPGPTEPTPPPFTFSIPSGNQFQPRCVSPIPVSPTSRIQNPVAFLSSVLPSLPAIPPTNAMGLPRSAPSMPSQGLAKKNTKSPQPVNDDNIRETKNAVIRDLGKKITFSDVRPNQQEYKISSFEQRLMNEIEFRLERTPVDESDDEIQHDEIPTGKCIAPIFDKRLKHFRVTEGSPVTFTCKIVGIPVPKVYWFKDGKQISKRNEHCKMRREGDGTCSLHIESTTSDDDGNYTIMAANPQGRISCSGHLMVQSLPIRSRLTSAGQSHRGRSRVQERDKEPLQERFFRPHFLQAPGDMVAHEGRLCRLDCKVSGLPPPELTWLLNGQPVLPDASHKMLVRETGVHSLLIDPLTQRDAGTYKCIATNKTGQNSFSLELSVVAKEVKKAPVILEKLQNCGVPEGHPVRLECRVIGMPPPVFYWKKDNETIPCTRERISMHQDTTGYACLLIQPAKKSDAGWYTLSAKNEAGIVSCTARLDIYAQWHHQIPPPMSVRPSGSRYGSLTSKGLDIFSAFSSMESTMVYSCSSRSVVESDEL

SEQ ID NO: 5850 - protein, 316 aa, Homo sapiens
MTPSEGARAGTGRELEMLDSLLALGGLVLLRDSVEWEGRSLLKALVKKSALCGEQVHILGCEVSEEEFREGFDSDINNRLVYHDFFRDPLNWSKTEEAFPGGPLGALRAMCKRTDPVPVTIALDSLSWLLLRLPCTTLCQVLHAVSHQDSCPGDSSSVGKVSVLGLLHEELHGPGPVGALSSLAQTEVTLGGTMGQASAHILCRRPRQRPTDQTQWFSILPDFSLDLQEGPSVESQPYSDPHIPPVDPTTHLTFNLHLSKKEREARDSLILPFQFSSEKQQALLRPRPGQATSHIFYEPDAYDDLDQEDPDDDLDI

SEQ ID NO: 5851 - protein, 490 aa, Homo sapiens; identical to SEQ ID NO: 5369

SEQ ID NO: 5852 - protein, 475 aa, Homo sapiens
MEALLEGIQNRGHGGGFLTSCEAELQELMKQIDIMVAHKKSEWEGRTHALETCLKIREQELKSLRSQLDVTHKEVGMLHQQVEEHEKIKQEMTMEYKQELKKLHEELCILKRSYEKLQKKQMREFRGNTKNHREDRSEIERLTAKIEEFRQKSLDWEKQRLIYQQQVSSLEAQRKALAEQSEIIQAQLVNRKQKLESVELSSQSEIQHLSSKLERANDTICANELEIERLTMRVNDLVGTSMTVLQEQQQKEEKLRESEKLLEALQEEKRELKAALQSQENLIHEARIQKEKLQEKVKATNTQHAVEAISLESVSATCKQLSQELMEKYEELKRMEAHNNEYKAEIKKLKEQILQGEQSYSSALEGMKMEISHLTQELHQRDITIASTKGSSSDMEKRLRAEMQKAEDKAVEHKEILDQLESLKLENRHLSEMVMKLELGLHERWGFTMLSSLVLNFGIQAIRQPQRPKVLELQV

SEQ ID NO: 5853 - protein, 779 aa, Homo sapiens
MRIEERKSQHLTGLTDEKVKAYLSLHPQVLDEFVSESVSAETVEKWLKRKNNKSEDESAPKEVSRYQDTNMQGVVYELNSYIEQRLDTGGDNQLLLYELSSIIKIATKADGFALYFLGECNNSLCIFTPPGIKEGKPRLIPAGPITQGTTVSAYVAKSRKTLLVEDILGDERFPRGTGLESGTRIQSVLCLPIVTAIGDLIGILELYRHWGKEAFCLSHQEVATANLAWASVAIHQVQVCRGLAKQTELNDFLLDVSKTYFDNIVAIDSLLEHIMIYAKNLVNADRCALFQVDHKNKELYSDLFDIGEEKEGKPVFKKTKEIRFSIEKGIAGQVARTGEVLNIPDAYADPRFNREVDLYTGYTTRNILCMPIVSRGSVIGVVQMVNKISGSAFSKTDENNFKMFAVFCALALHCANMYHRIRHSECIYRVTMEKLSYHSICTSEEWQGLMQFTLPVRLCKEIELFHFDIGPFENMWPGIFVYMVHRSCGTSCFELEKLCRFIMSVKKNYRRVPYHNWKHAVTVAHCMYAILQNNHTLFTDLERKGLLIACLCHDLDHRGFSNSYLQKFDHPLAALYSTSTMEQHHFSQTVSILQLEGHNIFSTLSSSEYEQVLEIIRKAIIATDLALYFGNRKQLEEMYQTGSLNLNNQSHRDRVIGLMMTACDLCSVTKLWPVTKLTANDIYAEFWAEGDEMKKLGIQPIPMMDRDKKDEVPQGQLGFYNAVAIPCYTTLTQILPPTEPLLKACRDNLSQWEKVIRGEETATWISSPSVAQKAAASED

SEQ ID NO: 5854 - protein, 703 aa, Homo sapiens
MAAATGDPGLSKLQFAPFSSALDVGFWHELTQKKLNEYRLDEAPKDIKGYYYNGDSAGLPARLTLEFSAFDMSAPTPARCCPAIGTLYNTNTLESFKTADKKLLLEQAANEIWESIKSGTALENPVLLNKFLLLTFADLKKYHFYYWFCYPALCLPESLPLIQGPVGLDQRFSLKQIEALECAYDNLCQTEGVTALPYFLIKYDENMVLVSLLKHYSDFFQGQRTKITIGVYDPCNLAQYPGWPLRNFLVLAAHRWSSSFQSVEVVCFRDRTMQGARDVAHSIIFEVKLPEMAFSPDCPKAVGWEKNQKGGMGPRMVNLSECMDPKRLAESSVDLNLKLMCWRLVPTLDLDKVVSVKCLLLGAGTLGCNVARTLMGWGVRHITFVDNAKISYSNPVRQPLYEFEDCLGGGKPKALAAADRLQKIFPGVNARGFNMSIPMPGHPVNFSSVTLEQARRDVEQLEQLIESHDVVFLLMDTRESRWLPAVIAASKRKLVINAALGFDTFVVMRHGLKKPKQQGAGDLCPNHPVASADLLGSSLFANIPGYKLGCYFCNDVVAPGDSTRDRTLDQQCTVSRPGLAVIAGALAVELMVSVLQHPEGGYAIASSSDDRMNEPPTSLGLVPHQIRGFLSRFDNVLPVSLAFDKCTACSSKVLDQYEREGFNFLAKVFNSSHSFLEDLTGLTLLHQETQAAEIWDMSDDETI

SEQ ID NO: 5855 - protein, 1081 aa, Homo sapiens
MESAGLEQLLRELLLPDTERIRRATEQLQIVLRAPAALPALCDLLASAADPQIRQFAAVLTRRRLNTRWRRLAAEQRESLKSLILTALQRETEHCVSLSLAQLSATIFRKEGLEAWPQLLQLLQHSTHSPHSPEREMGLLLLSVVVTSRPEAFQPHHRELLRLLNETLGEVGSPGLLFYSLRTLTTMAPYLSTEDVPLARMLVPKLIMAMQTLIPIDEAKACEALEALDELLESEVPVITPYLSEVLTFCLEVARNVALGNAIRIRILCCLTFLVKVKSKALLKNRLLPPLLHTLFPIVAAEPPPGQLDPEDQDSEEEELEIELMGETPKHFAVQVVDMLALHLPPEKLCPQLMPMLEEALRSESPYQRKAGLLVLAVLSDGAGDHIRQRLLPPLLQIVCKGLEDPSQVVRNAALFALGQFSENLQPHISSYSREVMPLLLAYLKSVPLGHTHHLAKACYALENFVENLGPKVQPYLPELMECMLQLLRNPSSPRAKELAVSALGAIATAAQASLLPYFPAIMEHLREFLLTGREDLQPVQIQSLETLGVLARAVGEPMRPLAEECCQLGLGLCDQVDDPDLRRCTYSLFAALSGLMGEGLAPHLEQITTLMLLSLRSTEGIVPQYDGSSSFLLFDDESDGEEEEELMDEDVEEEDDSEISGYSVENAFFDEKEDTCAAVGEISVNTSVAFLPYMESVFEEVFKLLECPHLNVRKAAHEALGQFCCALHKACQSCPSEPNTAALQAALARVVPSYMQAVNRERERQVVMAVLEALTGVLRSCGTLTLKPPGRLAELCGVLKAVLQRKTACQDTDEEEEEEDDDQAEYDAMLLEHAGEAIPALAAAAGGDSFAPFFAGFLPLLVCKTKQGCTVAEKSFAVGTLAETIQGLGAASAQFVSRLLPVLLSTAQEADPEVRSNAIFGMGVLAEHGGHPAQEHFPKLLGLLFPLLARERHDRVRDNICGALARLLMASPTRKPEPQVLAALLHALPLKEDLEEWVTIGRLFSFLYQSSPDQVIDVAPELLRICSLILADNKIPPDTKAALLLLLTFLAKQHTDSFQAALGSLPVDKAQELQAVLGLS

SEQ ID NO: 5856 - protein, 2406 aa, Homo sapiens
MVGERHAGDLMVPLGPRLQAYPEELIRQRPGHDGHPEYLIRWSVLKCGEVGKVGVEEGKAEHILMWLSAPEVYANCPGLLGERALSKGLQHEPAGVSGSFPRDPGGLDEVAMGEMEADVQALVRRAARQLAESGTPSLTAAVLHTIHVLSAYASIGPLTGVFRETGALDLLMHMLCNPEPQIRRSAGKMLQALAAHDAGSRAHVLLSLSQQDGIEQHMDFDSRYTLLELFAETTSSEEHCMAFEGIHLPQIPGKLLFSLVKRYLCVTSLLDQLNSSPELGAGDQSSPCATREKSRGQRELEFSMAVGNLISELVRSMGWARNLSEQGMSPPRPTRSIFQPYISGPSLLLPTIVTTPRRQGWVFRQRSEFSSRSGYGEYVQQTLQPGMRVRMLDDYEEISAGDEGEFRQSNNGIPPVQTLGEKALGEISVSVEMAESLLQVLSSRFEGSTLNDLLNSQIYTKYGLLSNEPSSSSTSRNHSCTPDPEEESKSEASFSEEETESLKAKAEAPKTEAEPTKTRTETPMAQSDSQLFNQLLVTEGMTLPTEMKEAASEMARALRGPGPRSSLDQHVAAVVATVQISSLDTNLQLSGLSALSQAVEEVTERDHPLVRPDRSLREKLVKMLVELLTNQVGEKMVVVQALRLLYLLMTKHEWRPLFAREGGIYAVLVCMQEYKTSVLVQQAGLAALKMLAVASSSEIPTFVTGRDSIHSLFDAQMTREIFASIDSATRPGSESLLLTVPAAVILMLNTEGCSSAARNGLLLLNLLLCNHHTLGDQIITQELRDTLFRHSGIAAAEPMPTTRTILMMLLNRYSEPPGSPERAALETPIIQGQDGSPELLIRSLVGGPSAELLLDLERVLCREGSPGGAVRPLLKRLQQETQPFLLLLRTLDAPGPNKTLLLSVLRVITRLLDFPEAMVLPWHEVLEPCLNCLSGPSSDSEIVQELTCFLHRLASMHKDYAVVLCCLGAKEILSKVLDKHSAQLLLGCELRDLVTECEKYAQLYSNLTSSILAGCIQMVLGQIEDHRRTHQPINIPFFDVFLRHLCQGSSVEVKEDKCWEKVEVSSNPHRASKLTDHNPKTYWESNGSTGSHYITLHMHRGVLVRQLTLLVASEDSSYMPARVVVFGGDSTSCIGTELNTVNVMPSASRVILLENLNRFWPIIQIRIKRCQQGGIDTRVRGVEVLGPKPTFWPLFREQLCRRTCLFYTIRAQAWSRDIAEDHRRLLQLCPRLNRVLRHEQNFADRFLPDDEAAQALGKTCWEALVSPLVQNITSPDAEGVSALGWLLDQYLEQRETSRNPLSRAASFASRVRRLCHLLVHVEPPPGPSPEPSTRPFSKNSKGRDRSPAPSPVLPSSSLRNITQCWLSVVQEQVSRFLAAAWRAPDFVPRYCKLYEHLQRAGSELFGPRAAFMLALRSGFSGALLQQSFLTAAHMSEQFARYIDQQIQGGLIGGAPGVEMLGQLQRHLEPIMVLSGLELATTFEHFYQHYMADRLLSFGSSWLEGAVLEQIGLCFPNRLPQLMLQSLSTSEELQRQFHLFQLQRLDKLFLEQEDEEEKRLEEEEEEEEEEEAEKELFIEDPSPAISILVLSPRCWPVSPLCYLYHPRKCLPTEFCDALDRFSSFYSQSQNHPVLDMGPHRRLQWTWLGRAELQFGKQILHVSTVQMWLLLKFNQTEEVSVETLLKDSDLSPELLLQALVPLTSGNGPLTLHEGQDFPHGGVLRLHEPGPQRSGEALWLIPPQAYLNVEKDEGRTLEQKRNLLSCLLVRILKAHGEKGLHIDQLVCLVLEAWQKGPNPPGTLGHTVAGGVACTSTDVLSCILHLLGQGYVKRRDDRPQILMYAAPEPMGPCRGQADVPFCGSQSETSKPSPEAVATLASLQLPAGRTMSPQEVEGLMKQTVRQVQETLNLEPDVAQHLLAHSHWGAEQLLQSYSEDPEPLLLAAGLCVHQAQAVPVRPDHCPVCVSPLGCDDDLPSLCCMHYCCKSCWNEYLTTRIEQNLVLNCTCPIADCPAQPTGAFIRAIVSSPEVISKYEKALLRGYVESCSNLTWCTNPQGCDRILCRQGLGCGTTCSKCGWASCFNCSFPEAHYPASCGHMSQWVDDGGYYDGMSVEAQSKHLAKLISKRCPSCQAPIEKNEGCLHMTCAKCNHGFCWRCLKSWKPNHKDYYNCSAMVSKAARQEKRFQDYNERCTFHHQAREFAVNLRNRVSAIHEVPPPRSFTFLNDACQGLEQARKVLAYACVYSFYSQDAEYMDVVEQQTENLELHTNALQILLEETLLRCRDLASSLRLLRADCLSTGMELLRRIQERLLAILQHSAQDFRVGLQSPSVEAWEAKGPNMPGSQPQASSGPEAEEEEEDDEDDVPEWQQDEFDEELDNDSFSYDESENLDQETFFFGDEEEDEDEAYD

SEQ ID NO: 5857 - protein, 223 aa, Homo sapiens
MEDVKLEFPSLPQCKEDAEEWTYPMRREMQEILPGLFLGPYSSAMKSKLPVLQKHGITHIICIRQNIEANFIKPNFQQLFRYLVLDIADNPVENIIRFFPMTKEFIDGSLQMGGKVLVHGNAGISRSAAFVIAYIMETFGMKYRDAFAYVQERRFCINPNAGFVHQLQEYEAIYLAKLTIQMMSPLQIERSLSVHSGTTGSLKRTHEEEDDFGTMQVATAQNG

SEQ ID NO: 5858 - protein, 562 aa, Homo sapiens
MDDKGDPSNEEAPKAIKPTSKEFRKTWGFRRTTIAKREGAGDAEADPLEPPPPQQQLGLSLRRSGRQPKRTERVEQFLTIARRRGRRSMPVSLEDSGEPTSCPATDAETASEGSVESASETRSGPQSASTAVKERPASSEKVKGGDDHDDTSDSDSDGLTLKELQNRLRRKREQEPTERPLKGIQSRLRKKRREEGPAETVGSEASDTVEGVLPSKQEPENDQGVVSQAGKDDRESKLEGKAAQDIKDEEPGDLGRPKPECEGYDPNALYCICRQPHNNRFMICCDRCEEWFHGDCVGISEARGRLLERNGEDYICPNCTILQVQDETHSETADQQEAKWRPGDADGTDCTSIGTIEQKSSEDQGIKGRIEKAANPSGKKKLKIFQPVIEAPGASKCIGPGCCHVAQPDSVYCSNDCILKHAAATMKFLSSGKEQKPKPKEKMKMKPEKPSLPKCGAQAGIKISSVHKRPAPEKKETTVKKAVVVPARSEALGKEAACESSTPSWASDHNYNAVKPEKTAAPSPSLLYKCMYHLGVGLLDPSRSFWIAIPWACPGLGVAALC

SEQ ID NO: 5859 - protein, 119 aa, Homo sapiens
MILQQPLQRGPQGGAQRLPRAALGVTWGLDAREPLRKQFLSEENMATHFSQLSLHNDHPYCSPPMTFSPALPPLRSPCSELLLWRYPGSLIPEALRLLRLGDTPSPPYPATPAGDIMEL

SEQ ID NO: 5860 - protein, 597 aa, Homo sapiens
MVPEERRVGLSSDETSSDSLKSWHSICVLDSKEQPLACQQKQRQFVKPVTESEQPTVLELLLAELRTLFSAVLQDSSPAAWRYLHAVLGLLPPYRELLVGHLDLLPFLEQLYCWAPWVQTHLHLDLLGAIVQAFPPDSSLLDSASHADCCPQKRRLHHRPPCPACPFVQAQWSRQQVKEELATWLRPLTLPELQRCLGIVGAQVALEEAVWLDGLSLLPLALAADIPVRYESSDTDNAEVEPVGRKETRSQLDYEVPREKAFQKSSTGFSPETSFLDSQVMTALKMERYLKKIHFLYLNVAPSRYFRPYSLMVVPPDKVNPEHYIFSPFGILHVHPVEGSETMTLGTWHHHCVLWQQLQFIPFFKYCLLRKSFTCWKKNVRLQGLHRLQKFLENHLLLAVPHFGAGLLHISRLLQELHSVSWLPQELDRCYELLDLQTALAEEKHKALRLLHRCLNLCTSILRLVHEDTYHMQQCLQERVQNCDRIRTGQGSIYLQRVQHKQLEQKLKQAEAWWLQLGKFARLVDYMICQSLISVLEEQITSFVANILQAPRQKPFLSSQLVFDDHGQLSHVPCVENMIQTLTGGLQSVKTSALQVF

SEQ ID NO: 5861 - protein, 196 aa, Homo sapiens
MEDLFETFQDEMGFSNMEDDGPEEEERVAEPQANFNTPQALRFEELLANLLNEQHQIAKELFEQLKMKKPSAKQQKEVEKVKPQCKEVHQTLILDPAQRKRLQQQMQQHVQLLTQIHLLATCNPNLNPEASSTRICLKELGTFAQSSIALHHQYNPKFQTLFQPCNLMGAMQLIEDFSTHVSIDCSPHKTVKKTVC

SEQ ID NO: 5862 - protein, 295 aa, Homo sapiens; identical to SEQ ID NO: 5678

SEQ ID NO: 5863 - protein, 304 aa, Homo sapiens
MKRAHPEYSSSDSELDETIEVEKESADENGNLSSALGSMSPTTSSQILARKRRRGIIEKRRRDRINNSLSELRRLVPSAFEKQGSAKLEKAEILQMTVDHLKMLHTAGGKGYFDAHALAMDYRSLGFRECLAEVARYLSIIEGLDASDPLRVRLVSHLNNYASQREAASGAHAGLGHIPWGTVFGHHPHIAHPLLLPQNGHGNAGTTASPTEPHHQGRLGSAHPEAPALRAPPSGSLGPVLPVVTSASKLSPPLLSSVASLSAFPFSFGSFHLLSPNALSPSAPTQAANLGKPYRPWGTEIGAF

SEQ ID NO: 5864 - protein, 842 aa, Homo sapiens
MCGSERILQAGNILEIRVGQAGARRVATMTSPVLVDIREEVTCPICLELLTEPLSIDCGHSFCQACITPNGRESVIGQEGERSCPVCQTSYQPGNLRPNRHLANIVRRLREVVLGPGKQLKAVLCADHGEKLQLFCQEDGKVICWLCERSQEHRGHHTFLVEEVAQEYQEKFQESLKKLKNEEQEAEKLTAFIREKKTSWKNQMEPERCRIQTEFNQLRNILDRVEQRELKKLEQEEKKGLRIIEEAENDLVHQTQSLRELISDLERRCQGSTMELLQDVSDVTERSEFWTLRKPEALPTKLRSMFRAPDLKRMLRVCRELTDVQSYWAIQGSLTRRERRASGVRTRRSQGSSAMASKILLNVQEEVTCPICLELLTEPLSLDCGHSLCRACITVSNKEAVTSMGGKSSCPVCGISYSFEHLQANQHLANIVERLKEVKLSPDNGKKRDLCDHHGEKLLLFCKEDRKVICWLCERSQEHRGHHTVLTEEVFKECQEKLQAVLKRLKKEEEEAEKLEADIREEKTSWKYQVQTERQRIQTEFDQLRSILNNEEQRELQRLEEEEKKTLDKFAEAEDELVQQKQLVRELISDVECRSQWSTMELLQDMSGIMKWSEIWRLKKPKMVSKKLKTVFHAPDLSRMLQMFRELTAVRCYWVDVTLNSVNLNLNLVLSEDQRQVISVPIWPFQCYNYGVLGSQYFSSGKHYWEVDVSKKTAWILGVYCRTYSRHMKYVVRRCANRQNLYTKYRPLFGYWVIGLQNKCKYGVFEESLSSDPEVLTLSMAVPPCRVGVFLDYEAGIVSFFNVTSHGSLIYKFSKCCFSQPVYPYFNPWNCPAPMTLCPPSS

SEQ ID NO: 5865 - protein, 498 aa, Homo sapiens
MNGALDHSDQPDPDAIKMFVGQIPRSWSEKELKELFEPYGAVYQINVLRDRSQNPPQSKGCCFVTFYTRKAALEAQNALHNIKTLPGMHHPIQMKPADSEKSNAVEDRKLFIGMVSKKCNENDIRVMFSPFGQIEECRILRGPDGLSRGCAFVTFSTRAMAQNAIKAMHQSQTMEGCSSPIVVKFADTQKDKEQRRLQQQLAQQMQQLNTATWGNLTGLGGLTPQYLALLQQATSSSNLGAFSGIQQMAGMNALQLQNLATLAAAAAAAQTSATSTNANPLSTTSSALGALTSPVAASTPNSTAGAAMNSLTSLGTLQGLAGATVGLNNINALAAPRSKRLLLPKDNNGMAALNGGLGATGLTNGTAGTMDALTQAYSGIQQYAAAALPTLYSQSLLQQQSAAGSQKEGPEGANLFIYHLPQEFGDQDILQMFMPFGNVISAKVFIDKQTNLSKCFGFVSYDNPVSAQAAIQAMNGFQIGMKRLKVQLKRSKNDSKPY

SEQ ID NO: 5866 - protein, 859 aa, Homo sapiens
MLEVLEEIWSVRARRAHRPCPGPSLADDTDANSNGSSGNESNGHESRGASQRSSHSSSSGNGKDSALLETTESSKSTNSQSPSPPSSSIAYSLLSASSEQDNPSTSGCSSEQSARARTQKELMTALRELKLRLPPERRGKGRSGTLATLQYALACVKQVQANQEYYQQWSLEEGEPCSMDMSTYTLEELEHITSEYTLQNQDTFSVAVSFLTGRIVYISEQAAVLLRCKRDVFRGTRFSELLAPQDVGVFYGSTAPSRLPTWGTGASAGSGLRDFTQEKSVFCRIRGGPDRDPGPRYQPFRLTPYVTKIRVSDGAPAQPCCLLIAERIHSGYEAPRIPPDKRIFTTRHTPSCLFQDVDERAAPLLGYLPQDLLGAPVLLFLHPEDRPLMLAIHKKILQLAGQPFDHSPIRFCARNGEYVTMDTSWAGFVHPWSRKVAFVLGRHKVRTAPLNEDVFTPPAPSPAPSLDTDIQELSEQIHRLLLQPVHSPSPTGLCGVGAVTSPGPLHSPGSSSDSNGGDAEGPGPPAPVTFQQICKDVHLVKHQGQQLFIESRARPQSRPRLPATGTFKAKALPCQSPDPELEAGSAPVQAPLALVPEEAERKEASSCSYQQINCLDSILRYLESCNLPSTTKRKCASSSSYTTSSASDDDRQRTGPVSVGTKKDPPSAALSGEGATPRKEPVVGGTLSPLALANKAESVVSVTSQCSFSSTIVHVGDKKPPESDIIMMEDLPGLAPGPAPSPAPSPTVAPDPAPDAYRPVGLTKAVLSLHTQKEEQAFLSRFRDLGRLRGLDSSSTAPSALGERGSHLGPPGACPLPSLGLDCWGVGLKGGVSAPGTQAGVASTTRPCLGTGPSLASPH

SEQ ID NO: 5867 - protein, 421 aa, Homo sapiens
MASSSVPPATVSAATAGPGPGFGFASKTKKKHFVQQKVKVFRAADPLVGVFLWGVAHSINELSQVPPPVMLLPDDFKASSKIKVNNHLFHRENLPSHFKFKEYCPQVFRNLRDRFGIDDQDYLVSLTRNPPSESEGSDGRFLISYDRTLVIKEVSSEDIADMHSNLSNYHQYIVKCHGNTLLPQFLGMYRVSVDNEDSYMLVMRNMFSHRLPVHRKYDLKGSLVSREASDKEKVKELPTLKDMDFLNKNQKVYIGEEEKKIFLEKLKRDVEFLVQLKIMDYSLLLGIHDIIRGSEPEEEAPVREDESEVDGDCSLTGPPALVGSYGTSPEGIGGYIHSHRPLGPGEFESFIDVYAIRSAEGAPQKEVYFMGLIDILTQYDAKKKAAHAAKTVKHGAGAEISTVHPEQYAKRFLDFITNIFA

SEQ ID NO: 5868 - protein, 676 aa, Homo sapiens
MAAATGDPGLSKLQFAPFSSALDVGFWHELTQKKLNEYRLDEAPKDIKGYYYNGDSAGLPARLTLEFSAFDMSAPTPARCCPAIGTLYNTNTLESFKTADKKLLLEQAANEIWESIKSGTALENPVLLNKFLLLTFADLKKYHFYYWFCYPALCLPESLPLIQGPVGLDQRFSLKQIEALECAYDNLCQTEGVTALPYFLIKYDENMVLVSLLKHYSDFFQGQRTKITIGVYDPCNLAQYPGWPLRNFLVLAAHRWSSSFQSVEVVCFRDRTMQGARDVAHSIIFEVKLPEMAFSPDCPKAVGWEKNQKGGMGPRMVNLSECMDPKRLAESSVDLNLKLMCWRLVPTLDLDKVVSVKCLLLGAGTLGCNVARTLMGWGVRHITFVDNAKISYSNPVRQPLYEFEDCLGGGKPKALAAADRLQKIFPGVNARGFNMSIPMPGHPVNFSSVTLEQARRDVEQLEQLIESHDVVFLLMDTRESRWLPAVIAASKRKLVINAALGFDTFVVMRHGLKKPKQQGAGDLCPNHPVASADLLGSSLFANIPGYKLGCYFCNDVVAPGDSTRDRTLDQQCTVSRPGLAVIAGALAVELMVSVLQHPEGGYAIASSSDDRMNEPPTSLGLVPHQVLDQYEREGFNFLAKVFNSSHSFLEDLTGLTLLHQETQAAEIWDMSDDETI

SEQ ID NO: 5869 - protein, 442 aa, Homo sapiens
MASDGASALPGPDMSMKPSAAPSPSPALPFLPPTSDPPDHPPREPPPQPIMPSVFSPDNPLMLSAFPSSLLVTGDGGPCLSGAGAGKVIVKVKTEGGSAEPSQTQNFILTQTALNSTAPGTPCGGLEGPAPPFVTASNVKTILPSKAVGVSQEGPPGLPPQPPPPVAQLVPIVPLEKAWPGPHGTTGEGGPVATLSKPSLGDRSKISKDVYENFRQWQRYKALARRHLSQSPDTEAVKEYVDIMEWLVGTHLATGESDGKQEEEGQQQEEEGMYPDPGLLSYINELCSQKVFVSKVEAVIHPQFLADLLSPEKQRDPLALIEELEQEEGLTLAQLVQKRLMALEEEEDAEAPPSFSGAQLDSSPSGSVEDEDGDGRLRPSPGLQGAGGAACLGKVSSSGKRAREVHGGQEQALDSPRGMHRDGNTLPSPSSWDLPTNGESQC

SEQ ID NO: 5870 - protein, 221 aa, Homo sapiens
MQVQDDGVNLIPFAKCSRVVSRSPPPRLPSQSLRPMPQRYGDVFWKNLNQRPTPTWLEEQHIPPMLLPPPEMLWRRKKRRPCLEGMQQQGLGGVPARVRAVTYHLEDLRRRQSIINELKKAQWGSSGAASEPVVLGEEGCGFPSTNEYPDLEEERATYPQEEDRFLTPGRAQLLWSPWSPLDQEEACASRQLHSLASFSTVTARRNPLHNPWGMELAASEE

SEQ ID NO: 5871 - protein, 159 aa, Homo sapiens
MQRVGNTFSNESRVASRCPSVGLAERNRVATMPVRLLRDSPAAQEDNDHARDGFQMKLDAHGFAPEELVVQVDGQWLMVTGQQQLDVRDPERVSYRMSQKVHRKMLPSNLSPTAMTCCLTPSGQLWVRGQCVALALPEAQTGPSPRLGSLGSKASNLTR

SEQ ID NO: 5872 - protein, 592 aa, Homo sapiens
MEKLSALQEQKGELRKRLSYTTHKLEKLETEFDSTRHYLEIELRRAQEELEKVTEKLRRIQSNYMALQRINQELEDKLYRMGQHYEEEKRALSHEIVALNSHLLEAKVTIDKLSEDNELYRKDCNLAAQLLQCSQTYGRVHKVSELPSDFQERVSLHMEKHGCSLPSPLCHPAYADSVPTCVIAKVLEKPDPASLSSRLSDASARDLAFCDGVEKPGPRPPYKGDIYCSDTALYCPEERRRDRRPSVDAPVTDVGFLRAQNSTDSAAEEEEEAEAAAFPAGFQHEAFPSYAGSLPTSSSYSSFSATSEEKEHAQASTLTASQQAIYLNSRDELFDRKPPATTYEGSPRFAKATAAVAAPLEAEVAPGFGRTMSPYPAETFRFPASPGPQQALMPPNLWSLRAKPGTARLPGEDMRGQWRPLSVEDIGAYSYPVSAAGRASPCSFSERYYGGAGGSPGKKADGRASPLYASYKADSFSEGDDLSQGHLAEPCFLRAGGDLSLSPGRSADPLPGYAPSEGGDGDRLGVQLCGTASSPEPEQGSRDSLEPSSMEASPEMHPAARLSPQQAFAAGGSGLSRKDSLTKAQLYGTLLN

SEQ ID NO: 5873 - protein, 869 aa, Homo sapiens
MGNREMEELIPLVNRLQDAFSALGQSCLLELPQIAVVGGQSAGKSSVLENFVGRDFLPRGSGIVTRRPLVLQLVTSKAEYAEFLHCKGKKFTDFDEVRLEIEAETDRVTGMNKGISSIPINLRVYSPHVLNLTLIDLPGITKVPVGDQPPDIEYQIREMIMQFITRENCLILAVTPANTDLANSDALKLAKEVDPQGLRTIGVITKLDLMDEGTDARDVLENKLLPLRRGYVGVVNRSQKDIDGKKDIKAAMLAERKFFLSHPAYRHIADRMGTPHLQKVLNQQLTNHIRDTLPNFRNKLQGQLLSIEHEVEAYKNFKPEDPTRKTKALLQMVQQFAVDFEKRIEGSGDQVDTLELSGGAKINRIFHERFPFEIVKMEFNEKELRREISYAIKNIHGIRTGLFTPDMAFEAIVKKQIVKLKGPSLKSVDLVIQELINTVKKCTKKLANFPRLCEETERIVANHIREREGKTKDQVLLLIDIQVSYINTNHEDFIGFANAQQRSSQVHKKTTVGNQGTNLPPSRQIVIRKGWLTISNIGIMKGGSKGYWFVLTAESLSWYKDDEEKEKKYMLPLDNLKVRDVEKSFMSSKHIFALFNTEQRNVYKDYRFLELACDSQEDVDSWKASLLRAGVYPDKSVAENDENGQAENFSMDPQLERQVETIRNLVDSYMSIINKCIRDLIPKTIMHLMINNVKDFINSELLAQLYSSEDQNTLMEESAEQAQRRDEMLRMYQALKEALGIIGDISTATVSTPAPPPVDDSWIQHSRRSPPPSPTTQRRPTLSAPLARPTSGRGPAPAIPSPGPHSGAPPVPFRPGPLPPFPSSSDSFGAPPQVPSRPTRAPPSVPSRRPPPSPTRPTIIRPLESSLLD

SEQ ID NO: 5874 - protein, 631 aa, Homo sapiens
MNSSDEEKQLQLITSLKEQAIGEYEDLRAENQKTKEKCDKIRQERDEAVKKLEEFQKISHMVIEEVNFMQNHLEIEKTCRESAEALATKLNKENKTLKRISMLYMAKLGPDVITEEINIDDEDSTTDTDGAAETCVSVQCQKQIKELRDQIVSVQEEKKILAIELENLKSKLVEVIEEVNKVKQEKTVLNSEVLEQRKVLEKCNRVSMLAVEEYEEMQVNLELEKDLRKKAESFAQEMFIEQNKLKRQSHLLLQSSIPDQQLLKALDENAKLTQQLEEERIQHQQKVKELEEQLENETLHKEIHNLKQQLELLEEDKKELELKYQNSEEKARNLKHSVDELQKRVNQSENSVPPPPPPPPPLPPPPPNPIRSLMSMIRKRSHPSGSGAKKEKATQPETTEEVTDLKRQAVEEMMDRIKKGVHLRPVNQTARPKTKPESSKGCESAVDELKGILGTLNKSTSSRSLKSLDPENSETELERILRRRKVTAEADSSSPTGILATSESKSMPVLGSVSSVTKTALNKKTLEAEFNSPSPPTPEPGEGPRKLEGCTSSKVTFQPPSSIGCRKKYIDGEKQAEPVVVLDPVSTHEPQTKDQVAEKDPTQHKEDEGEIQPENKEDSIENVRETDSSNC

SEQ ID NO: 5875 - protein, 566 aa, Homo sapiens
MDLHRAAFKMENSSYLPNPLASPALMVLASTAEASRDASIPCQQPRPFGVPVSVDKDVHIPFTNGSYTFASMYHRQGGVPGTFANRDFPPSLLHLHPQFAPPNLDCTPISMLNHSGVGAFRPFASTEDRESYQSAFTPAKRLKNCHDTESPHLRFSDADGKEYDFGTQLPSSSPGSLKVDDTGKKIFAVSGLISDREASSSPEDRNDRCKKKAAALFDSQAPICPICQVLLRPSELQEHMEQELEQLAQLPSSKNSLLKDAMAPGTPKSLLLSASIKREGESPTASPHSSATDDLHHSDRYQTFLRVRANRQTRLNARIGKMKRRKQDEGQREGSCMAEDDAVDIEHENNNRFEEYEWCGQKRIRATTLLEGGFRGSGFIMCSGKENPDSDADLDVDGDDTLEYGKPQYTEADVIPCTGEEPGEAKEREALRGAVLNGGPPSTRITPEFSKWASDEMPSTSNGESSKQEAMQKTCKNSDIEKITEDSAVTTFEALKARVRELERQLSRGDRYKCLICMDSYSMPLTSIQCWHVHCEECWLRTLGAKKLCPQCNTITAPGDLRRIYL

SEQ ID NO: 5876 - protein, 356 aa, Homo sapiens
MLSAITNVVQNTGKSVLTGGLDALEFIGKKTMNVLAESDPGFKRTKTLMERTVSLSQMLREAKEKEKQRLAQQLTMERTAHYGMLFDEYQGLSHLEALEILSNESESKVQSFLASLDGEKLELLKNDLISIKDIFAAKELENEENQEEQGLEEKGEEFARMLTELLFELHVAATPDKLNKAMKRAHDWVEEDQTVVSVDVAKVSEEETKKEEKEEKSQDPQEDKKEEKKTKTIEEVYMSSIESLAEVTARCIEQLHKVAELILHGQEEEKPAQDQAKVLIKLTTAMCNEVASLSKKFTNSLTTVGSNKKAEVLNPMISSVLLEGCNSTTYIQDAFQLLLPVLQVSHIQTSCLKAQP

SEQ ID NO: 5877 - protein, 171 aa, Homo sapiens
MSYNCCSGNFSSRSCGGYLHYPASSCGFSYPSNQVYSTDLCSPSTCQLGSSLYRGCQQTCWEPTSCQTSYVESSPCQTSCYRAASLLCSPCQTTYSGSLGFGSSSCRSLGYGSRSCYSVGCGSSGFRSLGYGGCGFPSLGYGVGFCRPTYLASRSCQSSCYRPTCGSGFYY

SEQ ID NO: 5878 - protein, 750 aa, Homo sapiens; identical to SEQ ID NO: 5802

SEQ ID NO: 5879 - protein, 295 aa, Homo sapiens; identical to SEQ ID NO: 5678

SEQ ID NO: 5880 - protein, 491 aa, Homo sapiens
MDTKGCTTTNSPSTPCQNCSRITNVSTISSNNGCHPGGLTVNNCQPAGHVLRIPWDQGCQPTPRFCRKPIYLMNNFNARFSLDDCSWYGEGINSNEKETMQILNERLANYLQKVRMLERENAELESKIQEESNKELPVLCPDYLSYYTTIEELQQKILCTKAENSRLVSQIDNTKLTADDLRAKYEAEVSLRQLVESDANGLKQILNVLTLGKADLEAQVQSLKEELLCLKNNHKEEINSLQCQLGERLDIEVTAAPSADLNQVLQEMRCQYEPIMETNRKDVEQWFNTQIEELNQQVVTSSQQQQCCQKEIIELRRSVNTLEVELQAQHRMRDSQECILTETEARYTALLTQIQSLIDNLEAQLAEIRCALERQNQEYEILLDVKSRLECEITTYRSLLESSDGKRPCYPRATKCEPSPWTSCKSGAIESTAPACTSSSPCSLKEHCSACGPLSRILVKICTITKEIKDGKVISSYEHVQPCFIIRPAKV

SEQ ID NO: 5881 - protein, 428 aa, Homo sapiens
MKRGGRDSDRNSSEEGTAEKSKKLRTTNEHSQTCDWGNLLQDIILQVFKYLPLLDRAHASQVCRNWNQVFHMPDLWRCFEFELNQPATSYLKATHPELIKQIIKRHSNHLQYVSFKVDSSKESAEAACDILSQLVNCSLKTLGLISTARPSFMDLPKSHFISALTVVFVNSKSLSSLKIDDTPVDDPSLKVLVANNSDTLKLLKMSSCPHVSPAGILCVADQCHGLRELALNYHLLSDELLLALSSEKHVRLEHLRIDVVSENPGQTHFHTIQKSSWDAFIRHSPKVNLVMYFFLYEEEFDPFFRYEIPATHLYFGRSVSKDVLGRVGMTCPRLVELVVCANGLRPLDEELIRIAERCKNLSAIGLGECEVSCSAFVEFVKMCGGRLSQLSIMEEVLIPDQKYSLEQIHWEVSKHLGRVWFPDMMPTW

SEQ ID NO: 5882 - protein, 1202 aa, Homo sapiens
MNTDSGGCARKRAAMSVTLTSVKRVQSSPNLLAAGRDSQSPDSAWRSYNDGNQETLNGDATYSSLAAKGFRSVRPNLQDKRSPTQSQITVNGNSGGAVSPMSYYQRPFSPSAYSLPASLNSSIVMQHGTSLDSTDTYPQHAQSLDGTTSSSIPLYRSSEEEKRVTVIKAPHYPGIGPVDESGIPTAIRTTVDRPKDWYKTMFKQIHMVHKPDDDTDMYNTPYTYNAGLYNPPYSAQSHPAAKTQTYRPLSKSHSDNSPNAFKDASSPVPPPHVPPPVPPLRPRDRSSTEKHDWDPPDRKVDTRKFRSEPRSIFEYEPGKSSILQHERPASLYQSSIDRSLERPMSSASMASDFRKRRKSEPAVGPPRGLGDQSASRTSPGRVDLPGSSTTLTKSFTSSSPSSPSRAKGGDDSKICPSLCSYSGLNGNPSSELDYCSTYRQHLDVPRDSPRAISFKNGWQMARQNAEIWSSTEETVSPKIKSRSCDDLLNDDCDSFPDPKVKSESMGSLLCEEDSKESCPMAWGSPYVPEVRSNGRSRIRHRSARNAPGFLKMYKKMHRINRKDLMNSEVICSVKSRILQYESEQQHKDLLRAWSQCSTEEVPRDMVPTRISEFEKLIQKSKSMPNLGDDMLSPVTLEPPQNGLCPKRRFSIEYLLEEENQSGPPARGRRGCQSNALVPIHIEVTSDEQPRAHVEFSDSDQDGVVSDHSDYIHLEGSSFCSESDFDHFSFTSSESFYGSSHHHHHHHHHHHRHLISSCKGRCPASYTRFTTMLKHERARHENTEEPRRQEMDPGLSKLAFLVSPVPFRRKKNSAPKKQTEKAKCKASVFEALDSALKDICDQIKAEKKRGSLPDNSILHRLISELLPDVPERNSSLRALRRSPLHQPLHPLPPDGAIHCPPYQNDCGRMPRSASFQDVDTANSSCHHQDRGGALQDRESPRSYSSTLTDMGRSAPRERRGTPEKEKLPAKAVYDFKAQTSKELSFKKGDTVYILRKIDQNWYEGEHHGRVGIFPISYVEKLTPPEKAQPARPPPPAQPGEIGEAIAKYNFNADTNVELSLARGSGDRVILLKRVDQNWYEGKIPGTNRQGIFPVSYVEVVKKNTKGAEDYPDPPIPHSYSSDRIHSLSSNKPQRPVFTHENIQGGGEPFQALYNYTPRNEDELELRESDVIDVMEKCDDGWFVGTSRRTKFFGTFPGNYVKRL

SEQ ID NO: 5883 - protein, 489 aa, Homo sapiens
MEDSASASLSSAAATGTSTSTPAAPTARKQLDKEQVRKAVDALLTHCKSRKNNYGLLLNENESLFLMVVLWKIPSKELRVRLTLPHSIRSDSEDICLFTKDEPNSTPEKTEQFYRKLLNKHGIKTVSQIISLQTLKKEYKSYEAKLRLLSSFDFFLTDARIRRLLPSLIGRHFYQRKKVPVSVNLLSKNLSREINDCIGGTVLNISKSGSCSAIRIGHVGMQIEHIIENIVAVTKGLSEKLPEWESVKLLFVKTEKSAALPIFSSFVSNWDEATKRSLLNKKKKEARRKRRERNFEKQKERKKKRQQARKTASVLSKDDVAPESGDTTVKKPESKKEQTPEHGKKKRGRGKAQVKATNESEDEIPQLVPIGKKTPANEKVEIQKHATGKKSPAKSPNPSTPRGKKRKALPASETPKAAESETPGKSPEKKPKIKEEAVKEKSPSLGKKDARQTPKKPEAKFFTTPSKSVRKASHTPKKWPKKPKVPQST

SEQ ID NO: 5884 - protein, 1056 aa, Homo sapiens
MAGALRRGRALGSRPSGPTVSSRRSPQCPVAQEGLGARSRPRVAPRSLARCGPSSRLMGWKPSEARGQSQSFQASGLQPRSLKAARRATGRPDRSRAAPPNMDPDPQAGVQVGMRVVRGVDWKWGQQDGGEGGVGTVVELGRHGSPSTPDRTVVVQWDQGTRTNYRAGYQGAHDLLLYDNAQIGVRHPNIICDCCKKHGLRGMRWKCRVCLDYDLCTQCYMHNKHELAHAFDRYETAHSRPVTLSPRQGLPRIPLRGIFQGAKVVRGPDWEWGSQDGGEGKPGRVVDIRGWDVETGRSVASVTWADGTTNVYRVGHKGKVDLKCVGEAAGGFYYKDHLPRLGKPAELQRRVSADSQPFQHGDKVKCLLDTDVLREMQEGHGGWNPRMAEFIGQTGTVHRITDRGDVRVQFNHETRWTFHPGALTKHHSFWVGDVVRVIGDLDTVKRLQAGHGEWTDDMAPALGRVGKVVKVFGDGNLRVAVAGQRWTFSPSCLVAYRPEEDANLDVAERARENKSSLSVALDKLRAQKSDPEHPGRLVVEVALGNAARALDLLRRRPEQVDTKNQGRTALQVAAYLGQVELIRLLLQARAGVDLPDDEGNTALHYAALGNQPEATRVLLSAGCRADAINSTQSTALHVAVQRGFLEVVRALCERGCDVNLPDAHSDTPLHSAISAGTGASGIVEVLTEVPNIDVTATNSQGFTLLHHASLKGHALAVRKILARARQLVDAKKEDGFTALHLAALNNHREVAQILIREGRCDVNVRNRKLQSPLHLAVQQAHVGLVPLLVDAGCSVNAEDEEGDTALHVALQRHQLLPLVADGAGGDPGPLQLLSRLQASGLPGSAELTVGAAVACFLALEGADVSYTNHRGRSPLDLAAEGRVLKALQGCAQRFRERQAGGGAAPGPRQTLGTPNTVTNLHVGAAPGPEAAECLVCSELALLVLFSPCQHRTVCEECARRMKKCIRCQVVVSKKLRPDGSEVASAAPAPGPPRQLVEELQSRYRQMEERITCPICIDSHIRLVFQCGHGACAPCGSALSACPICRQPIRDRIQIFV

SEQ ID NO: 5885 - protein, 285 aa, Homo sapiens
MSEAGEEQPMETTGATENGHEAVPEGESPAGAGTGAAAGAGGATAAPPSGNQNGAEGDQINASKNEEDAGKMFVGGLSWDTSKKDLKDYFTKFGEVVDCTIKMDPNTGRSRGFGFILFKDAASVEKVLDQKEHRLDGRVIDPKKAMAMKKDPVKKIFVGGLNPEATEEKIREYFGEFGEIEAIELPMDPKLNKRRGFVFITFKEEEPVKKVLEKKFHTVSGSKCEIKVAQPKEVYQQQQYGSGGRGNRNRGNRGSGGGGGGGGQGSTNYGKSQRRGGHQNNYKPY

SEQ ID NO: 5886 - protein, 403 aa, Homo sapiens; identical to SEQ ID NO: 5446

SEQ ID NO: 5887 - protein, 448 aa, Homo sapiens
MATDSWALAVDEQEAAAESLSNLHLKEEKIKPDTNGAVVKTNANAEKTDEEEKEDRAAQSLLNKLIRSNLVDNTNQVEVLQRDPNSPLYSVKSFEELRLPQNLIAQSQSGTGKTAAFVLAMLSQVEPANKYPQCLCLSPTYELALQTGKVIEQMGKFYPELKLAYAVRGNKLERGQKISEQIVIGTPGTVLDWCSKLKFIDPKKIKVFVLDEADVMIATQGHQDQSIRIQRMLPRNCQMLLFSATFEDSVWKFAQKVVPDPNVIKLKREEETLDTIKQYYVLCSSRDEKFQALCNLYGAITIAQAMIFCHTRKTASWLAAELSKEGHQVALLSGEMMVEQRAAVIERFREGKEKVLVTTNVCARGIDVEQVSVVINFDLPVDKDGNPDNETYLHRIGRTGRFGKRGLAVNMVDSKHSMNILNRIQEHFNKKIERLDTDDLDEIEKIAN

SEQ ID NO: 5888 - protein, 415 aa, Homo sapiens; identical to SEQ ID NO: 5668

SEQ ID NO: 5889 - protein, 341 aa, Homo sapiens
MAQESPKNSAAEIPVTSNGEVDDSREHSFNRDLKHSLPSGLGLSETQITSHGFDNTKEGVIEAGAFQGGQRTQTKSGPVILADEIKNPAMEKLELVRKWSLNTYKCTRQIISEKLGRGSRTVDLELEAQIDILRDNKKKYENILKLAQTLSTQLFQMVHTQRQLGDAFADLSLKSLELHEEFGYNADTQKLLAKNGETLLGAINFFIASVNTLVNKTIEDTLMTVKQYESARIEYDAYRTDLEELNLGPRDANTLPKIEQSQHLFQAHKEKYDKMRNDVSVKLKFLEENKVKVLHNQLVLFHNAIAAYFAGNQKQLEQTLKQFHIKLKTPGVDAPSWLEEQ

SEQ ID NO: 5890 - protein, 523 aa, Homo sapiens
MANVGLQFQASAGDSDPQSRPLLLLGQLHHLHRVPWSHVRGKLQPRVTEELWQAALSTLNPNPTDSCPLYLNYATVAALPCRVSRHNSPSAAHFITRLVRTCLPPGAHRCIVMVCEQPEVFASACALARAFPLFTHRSGASRRLEKKTVTVEFFLVGQDNGPVEVSTLQCLANATDGVRLAARIVDTPCNEMNTDTFLEEINKVGKELGIIPTIIRDEELKTRGFGGIYGVGKAALHPPALAVLSHTPDGATQTIAWVGKGIVYDTGGLSIKGKTTMPGMKRDCGGAAAVLGAFRAAIKQGFKDNLHAVFCLAENSVGPNATRPDDIHLLYSGKTVEINNTDAEGRLVLADGVSYACKDLGADIILDMATLTGAQGIATGKYHAAVLTNSAEWEAACVKAGRKCGDLVHPLVYCPELHFSEFTSAVADMKNSVADRDNSPSSCAGLFIASHIGFDWPGVWVHLDIAAPVHAGERATGFGVALLLALFGRASEDPLLNLVSPLGCEVDVEEGDLGRDSKRRRLV

SEQ ID NO: 5891 - protein, 456 aa, Homo sapiens
MADGGSERADGRIVKMEVDYSATVDQRLPECAKLAKEGRLQEVIETLLSLEKQTRTASDMVSTSRILVAVVKMCYEAKEWDLLNENIMLLSKRRSQLKQAVAKMVQQCCTYVEEITDLPIKLRLIDTLRMVTEGKIYVEIERARLTKTLATIKEQNGDVKEAASILQELQVETYGSMEKKERVEFILEQMRLCLAVKDYIRTQIISKKINTKFFQEENTEKLKLKYYNLMIQLDQHEGSYLSICKHYRAIYDTPCIQAESEKWQQALKSVVLYVILAPFDNEQSDLVHRISGDKKLEEIPKYKDLLKLFTTMELMRWSTLVEDYGMELRKGSLESPATDVFGSTEEGEKRWKDLKNRVVEHNIRIMAKYYTRITMKRMAQLLDLSVDESEAFLSNLVVNKTIFAKVDRLAGIINFQRPKDPNNLLNDWSQKLNSLMSLVNKTTHLIAKEEMIHNLQ

SEQ ID NO: 5892 - protein, 336 aa, Homo sapiens
MKIDIHSHILPKEWPDLKKRFGYGGWVQLQHHSKGEAKLLKDGKVFRVVRENCWDPEVRIREMDQKGVTVQALSTVPVMFSYWAKPEDTLNLCQLLNNDLASTVVSYPRRFVGLGTLPMQAPELAVKEMERCVKELGFPGVQIGTHVNEWDLNAQELFPVYAAAERLKCSLFVHPWDMQMDGRMAKYWLPWLVGMPAETTIAICSMIMGGVFEKFPKLKVCFAHGGGAFPFTVGRISHGFSMRPDLCAQDNPMNPKKYLGSFYTDALVHDPLSLKLLTDVIGKDKVILGTDYPFPLGELEPGKLIESMEEFDEETKNKLKAGNALAFLGLERKQFE

SEQ ID NO: 5893 - protein, 538 aa, Homo sapiens
MELSYQTLKFTHQAREACEMRTEARRKNLLILISHYLTQEGYIDTANALEQETKLGLRRFEVCDNIDLETILMEYESYYFVKFQKYPKIVKKSSDTAENNLPQRSRGKTRRMMNDSCQNLPKINQQRPRSKTTAGKTGDTKSLNKEHPNQEVVDNTRLESANFGLHISRIRKDSGEENAHPRRGQIIDFQGLLTDAIKGATSELALNTFDHNPDPSERLLKPLSAFIGMNSEMRELAAVVSRDIYLHNPNIKWNDIIGLDAAKQLVKEAVVYPIRYPQLFTGILSPWKGLLLYGPPGTGKTLLAKAVATECKTTFFNISASTIVSKWRGDSEKLVRVLFELARYHAPSTIFLDELESVMSQRGTASGGEHEGSLRMKTELLVQMDGLARSEDLVFVLAASNLPWELDCAMLRRLEKRILVDLPSREARQAMIYHWLPPVSKSRALELHTELEYSVLSQETEGYSGSDIKLVCREAAMRPVRKIFDALENHQSESSDLPRIQLDIVTTADFLDVLTHTKPSAKNLAQRYSDWQREFESV

SEQ ID NO: 5894 - protein, 168 aa, Homo sapiens; identical to SEQ ID NO: 5318

SEQ ID NO: 5895 - protein, 587 aa, Homo sapiens
MASEDIAKLAETLAKTQVAGGQLSFKGKSLKLNTAEDAKDVIKEIEDFDSLEALRLEGNTVGVEAARVIAKALEKKSELKRCHWSDMFTGRLRTEIPPALISLGEGLITAGAQLVELDLSDNAFGPDGVQGFEALLKSSACFTLQELKLNNCGMGIGGGKILAAALTECHRKSSAQGKPLALKVFVAGRNRLENDGATALAEAFRVIGTLEEVHMPQNGINHPGITALAQAFAVNPLLRVINLNDNTFTEKGAVAMAETLKTLRQVEVINFGDCLVRSKGAVAIADAIRGGLPKLKELNLSFCEIKRDAALAVAEAMADKAELEKLDLNGNTLGEEGCEQLQEVLEGFNMAKVLASLSDDEDEEEEEEGEEEEEEAEEEEEEDEEEEEEEEEEEEEEPQQRGQGEKSATPSRKILDPNTGEPAPVLSSPPPADVSTFLAFPSPEKLLRLGPKSSVLIAQQTDTSDPEKVVSAFLKVSSVFKDEATVRMAVQDAVDALMQKAFNSSSFNSNTFLTRLLVHMGLLKSEDKVKAIANLYGPLMALNHMVQQDYFPKALAPLLLAFVTKPNSALESCSFARHSLLQTLYKV

SEQ ID NO: 5896 - protein, 842 aa, Homo sapiens
MDISKGLPGMQGGLHIWISENRKMVPVPEGAYGNFFEEHCYVILHVPQSPKATQGASSDLHYWVGKQAGAEAQGAAEAFQQRLQDELGGQTVLHREAQGHESDCFCSYFRPGIIYRKGGLASDLKHVETNLFNIQRLLHIKGRKHVSATEVELSWNSFNKGDIFLLDLGKMMIQWNGPKTSISEKARGLALTYSLRDRERGGGRAQIGVVDDEAKAPDLMQIMEAVLGRRVGSLRAATPSKDINQLQKANVRLYHVYEKGKDLLQEEDFYILDQGGFKIYVWQGRMSSLQERKAAFSRAVGFIQAKGYPTYTNVEVVNDGAESAAFKQLFRTWSEKRRRNQKLGGRDKSIHVKLDVGKLHTQPKLAAQLRMVDDGSGKVEVWCIQDLHRQPVDPKRHGQLCAGNCYLVLYTYQRLGRVQYILYLWQGHQATADEIEALNSNAEELDVMYGGVLVQEHVTMGSEPPHFLAIFQGQLVIFQERAGHHGKGQSASTTRLFQVQGTDSHNTRTMEVPARASSLNSSDIFLLVTASVCYLWFGKGCNGDQREMARVVVTVISRKNEETVLEGQEPPHFWEALGGRAPYPSNKRLPEEVPSFQPRLFECSSHMGCLVLAEVGFFSQEDLDKYDIMLLDTWQEIFLWLGEAASEWKEAVAWGQEYLKTHPAGRSPATPIVLVKQGHEPPTFIGWFFTWDPYKWTSHPSHKEVVDGSPAAASTISEITAEVNNLRLSRWPGNGRAGAVALQALKGSQDSSENDLVRSPKSAGSRTSSSVSSTSATINGGLRREQLMHQAVEDLPEGVDPARREFYLSDSDFQDIFGKSKEEFYSMATWRQRQEKKQLGFF

SEQ ID NO: 5897 - protein, 539 aa, Homo sapiens
MDAMASPGKDNYRMKSYKNKALNPQEMRRRREEEGIQLRKQKREEQLFKRRNVYLPRNDESMLESPIQDPDISSTVPIPEEEVVTTDMVQMIFSNNADQQLTATQKFRKLLSKEPNPPIDQVIQKPGVVQRFVKFLERNENCTLQFEAAWALTNIASGTFLHTKVVIETGAVPIFIKLLNSEHEDVQEQAVWALGNIAGDNAECRDFVLNCEILPPLLELLTNSNRLTTTRNAVWALSNLCRGKNPPPNFSKVSPCLNVLSRLLFSSDPDVLADVCWALSYLSDGPNDKIQAVIDSGVCRRLVELLMHNDYKVVSPALRAVGNIVTGDDIQTQVILNCSALPCLLHLLSSPKESIRKEACWTVSNITAGNRAQIQAVIDANIFPVLIEILQKAEFRTRKEAAWAITNATSGGTPEQIRYLVALGCIKPLCDLLTVMDSKIVQVALNGLENILRLGEQESKQNGIGINPYCALIEEAYGLDKIEFLQSHENQEIYQKAFDLIEHYFGVEEDDPSIVPQVDENQQQFIFQQQEAPMDGFQL

SEQ ID NO: 5898 - protein, 1246 aa, Homo sapiens
MLIKEYHILLPMSLDEYQVAQLYMIQKKSREESSGEGSGVEILANRPYTDGPGGSGQYTHKVYHVGSHIPGWFRALLPKAALQVEEESWNAYPYTRTRYTCPFVEKFSIEIETYYLPDGGQQPNVFNLSGAERRQRILDTIDIVRDAVAPGEYKAEEDPRLYHSVKTGRGPLSDDWARTAAQTGPLMCAYKLCKVEFRYWGMQAKIEQFIHDVGLRRVMLRAHRQAWCWQDEWTELSMADIRALEEETARMLAQRMAKCNTGSEGSEAQPPGKPSTEARSAASNTGTPDGPEAPPGPDASPDASFGKQWSSSSRSSYSSQHGGAVSPQSLSEWRMQNIARDSENSSEEEFFDAHEGFSDSEEVFPKEMTKWNSNDFIDAFASPVEAEGTPEPGAEAAKGIEDGAQAPRDSEGLDGAGELGAEACAVHALFLILHSGNILDSGPGDANSKQADVQTLSSAFEAVTRIHFPEALGHVALRLVPCPPICAAAYALVSNLSPYSHDGDSLSRSQDHIPLAALPLLATSSSRYQGAVATVIARTNQAYSAFLRSPEGAGFCGQVALIGDGVGGILGFDALCHSANAGTGSRGSSRRGSMNNELLSPEFGPVRDPLADGVEGLGRGSPEPSALPPQRIPSDMASPEPEGSQNSLQAAPATTSSWEPRRASTAFCPPAASSEAPDGPSSTARLDFKVSGFFLFGSPLGLVLALRKTVMPALEAAQMRPACEQIYNLFHAADPCASRLEPLLAPKFQAIAPLTVPRYQKFPLGDGSSLLLADTLQTHSSLFLEELEMLVPSTPTSTSGAFWKGSELATDPPAQPAAPSTTSEVVKILERWWGTKRIDYSLYCPEALTAFPTVTLPHLFHASYWESADVVAFILRQVIEKERPQLAECEEPSIYSPAFPREKWQRKRTQVKIRNVTSNHRASDTVVCEGRPQVLSGRFMYGPLDVVTLTGEKVDVYIMTQPLSGKWIHFGTEVTNSSGRLTFPVPPERALGIGVYPVRMVVRGDHTYAECCLTVVARGTEAVVFSIDGSFTASVSIMGSDPKVRAGAVDVVRHWQDSGYLIVYVTGRPDMQKHRVVAWLSQHNFPHGVVSFCDGLTHDPLRQKAMFLQSLVQEVELNIVAGYGSPKDVAVYAALGLSPSQTYIVGRAVARGSLQAQCQFLSDGYVAHLGQLEAGSHSHASSGPPRAALGKSSYGVAAPVDFLRKQSQLLRSRGPSQAEREGPGTPPTTLARGKARSISLKLDSEE

SEQ ID NO: 5899 - protein, 293 aa, Homo sapiens
MTEDSQRNFRSVYYEKVGFRGVEEKKSLEILLKDDRLDTEKLCTFSQRFPLPSMYRALVWKVLLGILPPHHESHAKVMMYRKEQYLDVLHALKVVRFVSDATPQAEVYLRMYQLESGKLPRSPSFPLEPDDEVFLAIAKAMEEMVEDSVDCYWITRRFVNQLNTKYRDSLPQLPKAFEQYLNLEDGRLLTHLRMCSAAPKLPYDLWFKRCFAGCLPESSLQRVWDKVVSGSCKILVFVAVEILLTFKIKVMALNSAEKITKFLENIPQDSSDAIVSKAIDLWHKHCGTPVHSS

SEQ ID NO: 5900 - protein, 82 aa, Homo sapiens
MSEGESQTVLSSGSDPKVESSSSAPGLTSVSPPVTSTTSAASPEEEEESEDESEILEESPCGRWQKRREEVNQRNVPGIDSA

SEQ ID NO: 5901 - protein, 1685 aa, Homo sapiens
MSLPFYQRCHQHYDLSYRNKDVRSTVSHYQREKKRSAVYTQGSTAYSSRSSAAHRRESEAFRRASASSSQQQASQHALSSEVSRKAASAYDYGSSHGLTDSSLLLDDYSSKLSPKPKRAKHSLLSGEEKENLPSDYMVPIFSGRQKHVSGITDTEEERIKEAAAYIAQRNLLASEEGITTSKQSTASKQTTASKQSTASKQSTASKQSTASRQSTASRQSVVSKQATSALQQEETSEKKSRKVVIREKAERLSLRKTLEETETYHAKLNEDHLLHAPEFIIKPRSHTVWEKENVKLHCSIAGWPEPRVTWYKNQVPINVHANPGKYIIESRYGMHTLEINGCDFEDTAQYRASAMNVKGELSAYASVVVKRYKGEFDETRFHAGASTMPLSFGVTPYGYASRFEIHFDDKFDVSFGREGETMSLGCRVVITPEIKHFQPEIQWYRNGVPLSPSKWVQTLWSGERATLTFSHLNKEDEGLYTIRVRMGEYYEQYSAYVFVRDADAEIEGAPAAPLDVKCLEANKDYIIISWKQPAVDGGSPILGYFIDKCEVGTDSWSQCNDTPVKFARFPVTGLIEGRSYIFRVRAVNKMGIGFPSRVSEPVAALDPAEKARLKSRPSAPWTGQIIVTEEEPSEGIVPGPPTDLSVTEATRSYVVLSWKPPGQRGHEGIMYFVEKCEAGTENWQRVNTELPVKSPRFALFDLAEGKSYCFRVRCSNSAGVGEPSEATEVTVVGDKLDIPKAPGKIIPSRNTDTSVVVSWEESKDAKELVGYYIEASVAGSGKWEPCNNNPVKGSRFTCHGLVTGQSYIFRVRAVNAAGLSEYSQDSEAIEVKAAIGGGVSPDVCPALSDEPGGLTASRGRVHEASPPTFQKDALLGSKPNKPSLPSSSQNLGQTEVSKVSETVQEELTPPPQKAAPQGKSKSDPLKKKTDRAPPSPPCDITCLESFRDSMVLGWKQPDKIGGAEITGYYVNYREVIDGVPGKWREANVKAVSEEAYKISNLKENMVYQFQVAAMNMAGLGAPSAVSECFKCEEWTIAVPGPPHSLKCSEVRKDSLVLQWKPPVHSGRTPVTGYFVDLKEAKAKEDQWRGLNEAAIKNVYLKVRGLKEGVSYVFRVRAINQAGVGKPSDLAGPVVAETRPGTKEVVVNVDDDGVISLNFECDKMTPKSEFSWSKDYVSTEDSPRLEVESKGNKTKMTFKDLGMDDLGIYSCDVTDTDGIASSYLIDEEELKRLLALSHEHKFPTVPVKSELAVEILEKGQVRFWMQAEKLSGNAKVNYIFNEKEIFEGPKYKMHIDRNTGIIEMFMEKLQDEDEGTYTFQLQDGKATNHSTVVLVGDVFKKLQKEAEFQRQEWIRKQGPHFVEYLSWEVTGECNVLLKCKVANIKKETHIVWYKDEREISVDEKHDFKDGICTLLITEFSKKDAGIYEVILKDDRGKDKSRLKLVDEAFKELMMEVCKKIALSATDLKIQSTAEGIQLYSFVTYYVEDLKVNWSHNGSAIRYSDRVKTGVTGEQIWLQINEPTPNDKGKYVMELFDGKTGHQKTVDLSGQAYDEAYAEFQRLKQAAIAEKNRARVLGGLPDVVTIQEGKALNLTCNVWGDPPPEVSWLKNEKALASDDHCNLKFEAGRTAYFTINGVSTADSGKYGLVVKNKYGSETSDFTVSVFIPEEEARMAALESLKGGKKAK

SEQ ID NO: 5902 - protein, 1958 aa, Homo sapiens
MADRTAPRCQLRLEWVYGYRGHQCRNNLYYTAGKEVVYFVAGVGVVYNTREHSQKFFLGHNDDIISLALHPDKTLVATGQVGKEPYICIWDSYNVQTVSLLKDVHTHGVACLAFDSDGQRLASVGLDAKNTVCIWDWRKGKLLASATGHSDRIFDISWDPYQPNRVVSCGVKHIKFWTLCGNALTAKRGIFGKTGDLQTILCLACAKEDITYSGALNGDIYVWKGLNLVRTIQGAHSAGIFSMYACEEGFATGGRDGCIRLWDTDFKPITKIDLRETEQGYKGLSIRSVCWKADRLLAGTQDSEIFEVIVRERDKPMLILQGHCEGELWALALHPKKPLAVTGSDDRSVRLWSLADHALIARCNMEEAVRSVAFSPDGSQLALGMKDGSFIVLRVRDMTEVVHIKDRKEVIHEMKFSPDGSYLAVGSNDGPVDVYAVAQRYKKIGECSKSLSFITHIDWSLDSKYLQTNDGAGERLFYRMPSGKPLTSKEEIKGIPWASWTCVKGPEVSGIWPKYTEVTDINSVDANYNSSVLVSGDDFGLVKLFKFPCLKRGAKFRKYVGHSAHVTNVRWSHDFQWVLSTGGADHSVFQWRFIPEGVSNGMLETAPQEGGADSYSEESDSDLSDVPELDSDIEQEAQINYDRQVYKEDLPQLKQQSKEKNHAVPFLKREKAPEDSLKLQFIHGYRGYDCRNNLFYTQAGEVVYHIAAVAVVYNRQQHSQRLYLGHDDDILSLTIHPVKDYVATGQVGRDAAIHVWDTQTLKCLSLLKGQHQRGVCALDFSADGKCLVSVGLDDFHSIVFWDWKKGEKIATTRGHKDKIFVVKCNPHHVDKLVTVGIKHIKFWQQAGGGFTSKRGTFGSVGKLETMMCVSYGRMEDLVFSGAATGDIFIWKDILLLKTVKAHDGPVFAMYALDKGFVTGGKDGIVELWDDMFERCLKTYAIKRSALSTSSKGLLLEDNPSIRAITLGHGHILVGTKNGEILEIDKSGPMTLLVQGHMEGEVWGLAAHPLLPICATVSDDKTLRIWELSAQHRMLAVRKLKKGGRCCAFSPDGKALAVGLNDGSFLVVNADTVEDMVSFHHRKEMISDIKFSKDTGKYLAVASHDNFVDIYNVLTSKRVGICKGASSYITHIDWDSRGKLLQVNSGAREQLFFEAPRGKRHIIRPSEIEKIEWDTWTCVLGPTCEGIWPAHSDITDVNAASLTKDCSLLATGDDFGFVKLFSYPVKGQHARFKKYVGHSAHVTNVRWLHNDSVLLTVGGADTALMIWTREFVGTQESKLVDSEESDTDVEEDGGYDSDVAREKAIDYTTKIYAVSIREMEGTKPHQQLKEVSVEERPPVSRAAPQPEKLQKNNITKKKKLVEELALDHVFGYRGFDCRNNLHYLNDGADIIFHTAAAGIVQNLSTGSQSFYLEHTDDILCLTVNQHPKYRNVVATSQIGTTPSIHIWDAMTKHTLSMLRCFHSKGVNYINFSATGKLLVSVGVDPEHTITVWRWQEGAKVASRGGHLERIFVVEFRPDSDTQFVSVGVKHMKFWTLAGSALLYKKGVIGSLGAAKMQTMLSVAFGANNLTFTGAINGDVYVWKDHFLIRLVAKAHTGPVFTMYTTLRDGLIVTGGKERPTKEGGAVKLWDQEMKRCRAFQLETGQLVECVRSVCRGKGKILVGTKDGEIIEVGEKNAASNILIDGHMEGEIWGLATHPSKDLFISASNDGTARIWDLADKKLLNKVSLGHAARCAAYSPDGEMVAIGMKNGEFVILLVNSLKVWGKKRDRKSAIQDIRISPDNRFLAVGSSEHTVDFYDLTQGTNLNRIGYCKDIPSFVIQMDFSADGKYIQVSTGAYKRQVHEVPLGKQVTEAVVIEKITWASWTSVLGDEVIGIWPRNADKADVNCACVTHAGLNIVTGDDFGLVKLFDFPCTEKFAKHKRYFGHSAHVTNIRFSYDDKYVVSTGGDDCSVFVWRCL

SEQ ID NO: 5903 - protein, 209 aa, Homo sapiens; identical to SEQ ID NO: 4749

SEQ ID NO: 5904 - protein, 544 aa, Homo sapiens
MNTSIPYQQNPYNPRGSSNVIQCYRCGDTCKGEVVRVHNNHFHIRCFTCQVCGCGLAQSGFFFKNQEYICTQDYQQLYGTRCDSCRDFITGEVISALGRTYHPKCFVCSLCRKPFPIGDKVTFSGKECVCQTCSQSMASSKPIKIRGPSHCAGCKEEIKHGQSLLALDKQWHVSCFKCQTCSVILTGEYISKDGVPYCESDYHAQFGIKCETCDRYISGRVLEAGGKHYHPTCARCVRCHQMFTEGEEMYLTGSEVWHPICKQAARAEKKLKHRRTSETSISPPGSSIGSPNRVICDIYENLDLRQRRASSPGYIDSPTYSRQGMSPTFSRSPHHYYRSGDLSTATKSKTSEDISQTSKYSPIYSPDPYYASESEYWTYHGSPKVPRARRFSSGGEEDDFDRSMHKLQSGIGRLILKEEMKARSSSYADPWTPPRSSTSSREALHTAGYEMSLNGSPRSHYLADSDPLISKSASLPAYRRNGLHRTPSADLFHYDSMNAVNWGMREYKIYPYELLLVTTRGRNRLPKDVDRTRLEGNFWKSGCL

SEQ ID NO: 5905 - protein, 279 aa, Homo sapiens
MTPSEGARAGTGRELEMLDSLLALGGLVLLRDSVEWEGRSLLKALVKKSALCGEQVHILGCEVSEEEFREGFDSDINNRLVYHDFFRDPLNWSKTEEAFPGGPLGALRAMCKRTDPVPVTIALDSLSWLLLRLPCTTLCQVLHAVSHQDSCPGDSSSVGKVSVLGLLHEELHGPGPVGALSSLAQTEVTLGGTMGQASAHILCRRPRQRPTDQTQWFSILPDFSLDLQEGPSVESQPYSDPHIPPVSKNAKARTRKCSLVSGHGRENKSCRGWGWGQGF

SEQ ID NO: 5906 - protein, 134 aa, Homo sapiens
MSENAAPGLCGELLLQRGTTKVATGLVLNRDQRLAWAENSIDFISRELCAHSIRKLQAHVLLIKAVHGYFDSRQNYSEKESLSFMIDTMKSTLKEQFQFVEVPGNHCVHMSEPQHVASIISSFLQCTHMLPAQL

SEQ ID NO: 5907 - protein, 449 aa, Homo sapiens
MMLGTEGGEGFVVKVRGLPWSCSADEVQRFFSDCKIQNGAQGIRFIYTREGRPSGEAFVELESEDEVKLALKKDRETMGHRYVEVFKSNNVEMDWVLKHTGPNSPDTANDGFVRLRGLPFGCSKEEIVQFFSGLEIVPNGITLPVDFQGRSTGEAFVQFASQEIAEKALKKHKERIGHRYIEIFKSSRAEVRTHYDPPRKLMAMQRPGPYDRPGAGRGYNSIGRGAGFERMRRGAYGGGYGGYDDYNGYNDGYGFGSDRFGRDLNYCFSGMSDHRYGDGGSTFQSTTGHCVHMRGLPYRATENDIYNFFSPLNPVRVHIEIGPDGRVTGEADVEFATHEDAVAAMSKDKANMQHRYVELFLNSTAGASGGAYEHRYVELFLNSTAGASGGAYGSQMMGGMGLSNQSSYGGPASQQLSGGYGGGYGGQSSMSGYDQVLQENSSDFQSNIA

SEQ ID NO: 5908 - protein, 1358 aa, Homo sapiens
MGNQLAGIAPSQILSVESYFSDIHDFEYDKSLGSTRFFKVARAKHREGLVVVKVFAIQDPTLPLTSYKQELEELKIRLNSAQNCLPFQKASEKASEKAAMLFRQYVRDNLYDRISTRPFLNNIEKRWIAFQILTAVDQAHKSGVRHGDIKTENVMVTSWNWVLLTDFASFKPTYLPEDNPADFNYFFDTSRRRTCYIAPERFVDGGMFATELEYMRDPSTPLVDLNSNQRTRGELKRAMDIFSAGCVIAELFTEGVPLFDLSQLLAYRNGHFFPEQVLNKIEDHSIRELVTQMIHREPDKRLEAEDYLKQQRGNAFPEIFYTFLQPYMAQFAKETFLSADERILVIRKDLGNIIHNLCGHDLPEKAEGEPKENGLVILVSVITSCLQTLKYCDSKLAALELILHLAPRLSVEILLDRITPYLLHFSNDSVPRVRAEALRTLTKVLALVKEVPRNDINIYPEYILPGIAHLAQDDATIVRLAYAENIALLAETALRFLELVQLKNLNMENDPNNEEIDEVTHPNGNYDTELQALHEMVQQKVVTLLSDPENIVKQTLMENGITRLCVFFGRQKANDVLLSHMITFLNDKNDWHLRGAFFDSIVGVAAYVGWQSSSILKPLLQQGLSDAEEFVIVKALYALTCMCQLGLLQKPHVYEFASDIAPFLCHPNLWIRYGAVGFITVVARQISTADVYCKLMPYLDPYITQPIIQIERKLVLLSVLKEPVSRSIFDYALRSKDITSLFRHLHMRQKKRNGSLPDCPPPEDPAIAQLLKKLLSQGMTEEEEDKLLALKDFMMKSNKAKANIVDQSHLHDSSQKGVIDLAALGITGRQVDLVKTKQEPDDKRARKHVKQDSNVNEEWKSMFGSLDPPNMPQALPKGSDQEVIQTGKPPRSESSAGICVPLSTSSQVPEVTTVQNKKPVIPVLSSTILPSTYQIRITTCKTELQQLIQQKREQCNAERIAKQMMENAEWESKPPPPGWRPKGLLVAHLHEHKSAVNRIRVSDEHSLFATCSNDGTVKIWNSQKMEGKTTTTRSILTYSRIGGRVKTLTFCQGSHYLAIASDNGAVQLLGIEASKLPKSPKIHPLQSRILDQKEDGCVVDMHHFNSGAQSVLAYATVNGSLVGWDLRSSSNAWTLKHDLKSGLITSFAVDIHQCWLCIGTSSGTMACWDMRFQLPISSHCHPSRARIRRLSMHPLYQSWVIAAVQGNNEVSMWDMETGDRRFTLWASSAPPLSELQPSPHSVHGIYCSPADGNPILLTAGSDMKIRFWDLAYPERSYVVAGSTSSPSVSYYRKIIEGTEVVQEIQNKQKVGPSDDTPRRGPESLPVGHHDIITDVATFQTTQGFIVTASRDGIVKVWK

SEQ ID NO: 5909 - protein, 330 aa, Homo sapiens
MPVVTTDAESETGIPKSLSNEPPSETMEEIEHTCPQPRLTLTAPAPFADETNCQCQAPHEKLTIAQARLGTPADRPVRVYADGIFDLFHSGHARALMQAKTLFPNSYLLVGVCSDDLTHKFKGFTVMNEAERYEALRHCRYVDEVIRDAPWTLTPEFLEKHKIDFVAHDDIPYSSAGSDDVYKHIKEAGMFVPTQRTEGISTSDIITRIVRDYDVYARRNLQRGYTAKELNVSFINEKRYRFQNQVDKMKEKVKNVEERSKEFVNRVEEKSHDLIQKWEEKSREFIGNFLELFGPDGAWKQMFQERSSRMLQALSPKQSPLKSWARCRDF

SEQ ID NO: 5910 - protein, 674 aa, Homo sapiens
MQTSSSRSVHLSEWQKNYFAITSGICTGPKADAYRAQILRIQYAWANSEISQVCATKLFKKYAEKYSAIIDSDNVESGLNNYAENILTLAGSQQTDSDKWQSGLSINNVFKMSSVQKMMQAGKKFKDSLLEPALASVVIHKEATVFDLPKFSVCGSSQESDSLPNSAHDRDRTQDFPESNRLKLLQNAQPPMVTNTARTCPTFSAPVGESATAKFHVTPLFGNVKKENHSSAKENIGLNVFLSNQSCFPAACENPQRKSFYGSGTIDALSNPILNKACSKTEDNGPKEDSSLPTFKTAKEQLWVDQQKKYHQPQRASGSSYGGVKKSLGASRSRGILGKFVPPIPKQDGGEQNGGMQCKPYGAGPTEPAHPVDERLKNLEPKMIELIMNEIMDHGPPVNWEDIAGVEFAKATIKEIVVWPMLRPDIFTGLRGPPKGILLFGPPGTGKTLIGKCIASQSGATFFSISASSLTSKWVGEGEKMVRALFAVARCQQPAVIFIDEIDSLLSQRGDGEHESSRRIKTEFLVQLDGATTSSEDRILVVGATNRPQEIDEAARRRLVKRLYIPLPEASARKQIVINLMSKEQCCLSEEEIEQIVQQSDAFSGADMTQLCREASLGPIRSLQTADIATITPDQVRPIAYIDFENAFRTVRPSVSPKDLELYENWNKTFGCGK

SEQ ID NO: 5911 - protein, 380 aa, Homo sapiens
MLRRKPSNASEKEPTQKKKLSLQRSSSFKDFAKSKPSSPVVSEKEFNLDDNIPEDDSGVPTPEDAGKSGKKLGKKWRAVISRTMNRKMGKMMVKALSEEMADTLEEGSASPTSPDYSLDSPGPEKMALAFSEQEEHELPVLSRQASTGSELCSPSPGSGSFGEEPPAPQYTGPFCGRARVHTDFTPSPYDHDSLKLQKGDVIQIIEKPPVGTWLGLLNGKVGSFKFIYVDVLPEEAVGHARPSRRQSKGKRPKPKTLHELLERIGLEEHTSTLLLNGYQTLEDFKELRETHLNELNIMDPQHRAKLLTAAELLLDYDTGSEEAEEGAESSQEPVAHTVSEPKVDIPRDSGCFEGSESGRDDAELAGTEEQLQGLSLAGAP

SEQ ID NO: 5912 - protein, 563 aa, Homo sapiens
MNPLFGPNLFLLQQEQQGLAGPLGDSLGGDHFAGGGDLPPAPLSPAGPAAYSPPGPGPAPPAAMALRNDLGSNINVLKTLNLRFRCFLAKVHELERRNRLLEKQLQQALEEGKQGRRGLGRRDQAVQTGFVSPIRPLGLQLGARPAAVCSPSARVLGSPARSPAGPLAPSAASLSSSSTSTSTTYSSSARFMPGTIWSFSHARRLGPGLEPTLVQGPGLSWVHPDGVGVQIDTITPEIRALYNVLAKVKRERDEYKRRWEEEYTVRIQLQDRVNELQEEAQEADACQEELALKVEQLKAELVVFKGLMSNNLSELDTKIQEKAMKVDMDICRRIDITAKLCDVAQQRNCEDMIQMFQKKLVPSMGGRKRERKAAVEEDTSLSESEGPRQPDGDEEESTALSINEEMQRMLNQLREYDFEDDCDSLTWEETEETLLLWEDFSGYAMAAAEAQGEQQEDSLEKVIKDTESLFKTREKEYQETIDQIELELATAKNDMNRHLHEYMEMCSMKRGLDVQMETCRRLITQSGDRKSPAFTAVPLSDPPPPPSEAEDSDRDVSSDSSMR

SEQ ID NO: 5913 - protein, 630 aa, Homo sapiens
MLFLAIPQSIDEETEVWSDHIIFPRIPRGPVQQPLEDRIFTPAVSAVYSTVTQVARQPGTPTPSPYSAHEINKGHPNLAATPPGHASSPGLSQTPYPSGQNAGPTTLVYPQTPQTMNSQPQTRSPFAAGPRPPHHQFFQRPQIQPPRATIPNSSPSIRPGAQTPTAVYQANQHIMMVNHLPMPYPVPQGPQYCIPQYRHSGPPYVGPPQQYPVQPPGPGPFYPGPGPGDFPNAYGTPFYPSQPVYQSAPIIVPTQQQPPPAKREKKTIRIRDPNQGGKDITEEIMSGGGSRNPTPPIGRPTSTPTPPQQLPSQVPEHSPVVYGTVESAHLAASTPVTAASDQKQEEKPKPDPVLKSPSPVLRLVLSGEKKEQEGQTSETTAIVSIAELPLPPSPTTVSSVARSTIAAPTSSALSSQPIFTTAIDDRCELSSPREDTIPIPSLTSCTETSDPLPTNENDDDICKKPCSVAPNDIPLVSSTNLINEINGVSEKLSATESIVEIVKQEVLPLTLELEILENPPEEMKLECIPAPITPSTVPSFPPTPPTPPASPPHTPVIVPAAATTVSSPSAAITVQRVLEEDESIRTCLSEDAKEIQNKIEVEADGQTEEILDSQNLNSRRSPVPETSNEC

SEQ ID NO: 5914 - protein, 137 aa, Homo sapiens
MILPTKAMATQELTVKRKLSGNTLQVQASSPVALGVRIPTVALHMMELFDTTVEQLYSIFTVKELTNKKIIMKWRCGNWPEEHYAMVALNFVPTLGQTELQLKEFLSICKEENMKFCWQKQHFEEIKGSLQLTPLNG

SEQ ID NO: 5915 - protein, 415 aa, Homo sapiens; identical to SEQ ID NO: 5668

SEQ ID NO: 5916 - protein, 487 aa, Homo sapiens
MSSPLASLSKTRKVPLPSEPMNPGRRGIRIYGDVPASHDSELMAFMTRKLWDLEQQVKAQTDEILSKDQKIAALEDLVQTLRPHPAEATLQRQEELETMCVQLQRQVREMERFLSDYGLQWVGEPMDQEDSESKTVSEHGERDWMTAKKFWKPGDSLAPPEVDFDRLLASLQDLSELVVEGDTQVTPVPGGARLRTLEPIPLKLYRNGIMMFDGPFQPFYDPSTQRCLRDILDGFFPSELQRLYPNGVPFKVSDLRNQVYLEDGLDPFPGEGRVVGRQLMHKALDRVEEHPGSRMTAEKFLNRLPKFVIRQGEVIDIRGPIRDTLQNCCPLPARIQEIVVETPTLAAERERSQESPNTPAPPLSMLRIKSENGEQAFLLMMQPDNTIGDVRALLAQARVMDASAFEIFSTFPPTLYQDDTLTLQAAGLVPKAALLLRARRAPKSSLKFSPGPCPGPGPGPSPGPGPGPSPGPGPGPSPCPGPSPSPQ

SEQ ID NO: 5917 - protein, 488 aa, Homo sapiens
MSAFCLGLVGRASAPAEPDSACCMELPAAAGDAVRSPAAAAALIFPGGSGELELALEEELALLAAGERPSDPGEHPQAELLSVIRQKEKDLVLAARLGKALLERNQDMSRQYEQMHKELTDKLEHLEQEKHELRRRFENREGEWEGRVSELESDVKQLQDELERQQIHLREADREKSRAVQELSEQNQRLLDQLSRASEVERQLSMQVHALREDFREKNSSTNQHIIRLESLQAEIKMLSDRKRELEHRLSATLEENDLLQGTVEELQDRVLILERQGHDKDLQLHQSQLELQEVRLSCRQLQVKVEELTEERSLQSSAATSTSLLSEIEQSMEAEELEQEREQLRLQLWEAYCQVRYLCSHLRGNDSADSAVSTDSSMDESSETSSAKDVPAGSLRTALNELKRLIQSIVDGMEPTGSRRLDDDSLEEQIRQTSEDSRALRELMEGERGRLPEASRCCLPACSQPIQSPSLPHVGKAQQGCAARMYL

SEQ ID NO: 5918 - protein, 475 aa, Homo sapiens
MTRGTGGTAQRGRSGPDSQGLLDSSLMASGTASRSEDEESLAGQKRASSQALGTIPKRRSSSRFIKRKKFDDELVESSLAKSSTRAKGASGVEPGRCSGSEPSSSEKKKVSKAPSTPVPPSPAPAPGLTKRVKKSKQPLQVTKDLGRWKPADDLLLINAVLQTNDLTSVHLGVKFSCRFTLREVQERWYALLYDPVISKLACQAMRQLHPEAIAAIQSKALFSKAEEQLLSKVGSTSQPTLETFQDLLHRHPDAFYLARTAKALQAHWQLMKQYYLLEDQTVQPLPKGDQVLNFSDAEDLIDDSKLKDMRDEVLEHELMVADRRQKREIRQLEQELHKWQVLVDSITGMSSPDFDNQTLAVLRGRMVRYLMRSREITLGRATKDNQIDVDLSLEGPAWKISRKQGVIKLKNNGDFFIANEGRRPIYIDGRPVLCGSKWRLSNNSVVEIASLRFVFLINQDLIALIRAEAAKITPQ

SEQ ID NO: 5919 - protein, 436 aa, Homo sapiens
MADGGSERADGRIVKMEVDYSATVDQRLPECAKLAKASDMVSTSRILVAVVKMCYEAKEWDLLNENIMLLSKRRSQLKQAVAKMVQQCCTYVEEITDLPIKLRLIDTLRMVTEGKIYVEIERARLTKTLATIKEQNGDVKEAASILQELQVETYGSMEKKERVEFILEQMRLCLAVKDYIRTQIISKKINTKFFQEENTEKLKLKYYNLMIQLDQHEGSYLSICKHYRAIYDTPCIQAESEKWQQALKSVVLYVILAPFDNEQSDLVHRISGDKKLEEIPKYKDLLKLFTTMELMRWSTLVEDYGMELRKGSLESPATDVFGSTEEGEKRWKDLKNRVVEHNIRIMAKYYTRITMKRMAQLLDLSVDESEAFLSNLVVNKTIFAKVDRLAGIINFQRPKDPNNLLNDWSQKLNSLMSLVNKTTHLIAKEEMIHNLQ

SEQ ID NO: 5920 - protein, 657 aa, Homo sapiens
MDDPDCDSTWEEDEEDAEDAEDEDCEDGEAAGARDADAGDEDEESEEPRAARPSSFQSRMTGSRNWRATRDMCRYRHNYPDLVERDCNGDTPNLSFYRNEIRFLPNGCFIEDILQNWTDNYDLLEDNHSYIQWLFPLREPGVNWHAKPLTLREVEVFKSSQEIQERLVRAYELMLGFYGIRLEDRGTGTVGRAQNYQKRFQNLNWRSHNNLRITRILKSLGELGLEHFQAPLVRFFLEETLVRRELPGVRQSALDYFMFAVRCRHQRRQLVHFAWEHFRPRCKFVWGPQDKLRRFKPSSLPHPLEGSRKVEEEGSPGDPDHEASTQGRTCGPEHSKGGGRVDEGPQPRSVEPQDAGPLERSQGDEAGGHGEDRPEPLSPKESKKRKLELSRREQPPTEPGPQSASEVEKIALNLEGCALSQGSLRTGTQEVGGQDPGEAVQPCRQPLGARVADKVRKRRKVDEGAGDSAAVASGGAQTLALAGSPAPSGHPKAGHSENGVEEDTEGRTGPKEGTPGSPSETPGPSPAGPAGDEPAESPSETPGPRPAGPAGDEPAESPSETPGPSPAGPTRDEPAESPSETPGPRPAGPAGDEPAESPSETPGPRPAGPAGDEPAESPSETPGPSPAGPTRDEPAKAGEAAELQDAEVESSAKSGKP

SEQ ID NO: 5921 - protein, 204 aa, Homo sapiens; identical to SEQ ID NO: 4831

SEQ ID NO: 5922 - protein, 1013 aa, Homo sapiens
MGWKPSEARGQSQSFQASGLQPRSLKAARRATGRPDRSRAARPTMDPSAHRSRAAPPNMDPDPQAGVQVGMRVVRGVDWKWGQQDGGEGGVGTVVELGRHGSPSTPDRTVVVQWDQGTRTNYRAGYQGAHDLLLYDNAQIGVRHPNIICDCCKKHGLRGMRWKCRVCLDYDLCTQCYMHNKHELAHAFDRYETAHSRPVTLSPRQGLPRIPLRGIFQGAKVVRGPDWEWGSQDGGEGKPGRVVDIRGWDVETGRSVASVTWADGTTNVYRVGHKGKVDLKCVGEAAGGFYYKDHLPRLGKPAELQRRVSADSQPFQHGDKVKCLLDTDVLREMQEGHGGWNPRMAEFIGQTGTVHRITDRGDVRVQFNHETRWTFHPGALTKHHSFWVGDVVRVIGDLDTVKRLQAGHGEWTDDMAPALGRVGKVVKVFGDGNLRVAVAGQRWTFSPSCLVAYRPEEDANLDVAERARENKSSLSVALDKLRAQKSDPEHPGRLVVEVALGNAARALDLLRRRPEQVDTKNQGRTALQVAAYLGQVELIRLLLQARAGVDLPDDEGNTALHYAALGNQPEATRVLLSAGCRADAINSTQSTALHVAVQRGFLEVVRALCERGCDVNLPDAHSDTPLHSAISAGTGASGIVEVLTEVPNIDVTATNSQGFTLLHHASLKGHALAVRKILARARQLVDAKKEDGFTALHLAALNNHREVAQILIREGRCDVNVRNRKLQSPLHLAVQQAHVGLVPLLVDAGCSVNAEDEEGDTALHVALQRHQLLPLVADGAGGDPGPLQLLSRLQASGLPGSAELTVGAAVACFLALEGADVSYTNHRGRSPLDLAAEGRVLKALQGCAQRFRERQAGGGAAPGPRQTLGTPNTVTNLHVGAAPGPEAAECLVCSELALLVLFSPCQHRTVCEECARRMKKCIRCQVVVSKKLRPDGSEVASAAPAPGPPRQLVEELQSRYRQMEERITCPICIDSHIRLVFQCGHGACAPCGSALSACPICRQPIRDRIQIFV

SEQ ID NO: 5923 - protein, 684 aa, Homo sapiens
MIPPQEASARRREIEDKLKQEEETLSFIRDSLEKSDQLTKNMVSILSSFESRLMKLENSIIPVHKQTENLQRLQENVEKTLSCLDHVISYYHVASDTEKIIREGPTGRLEEYLGSMAKIQKAVEYFQDNSPDSPELNKVKLLFERGKEALESEFRSLMTRHSKVVSPVLILDLISGDDDLEAQEDVTLEHLPESVLQDVIRISRWLVEYGRNQDFMNVYYQIRSSQLDRSIKGLKEHFHKSSSSSGVPYSPAIPNKRKDTPTKKPVKRPGTIRKAQNLLKQYSQHGLDGKKGGSNLIPLEGRDDMLDVETDAYIHCVSAFVKLAQSEYQLLADIIPEHHQKKTFDSLIQDALDGLMLEGENIVSAARKAIVRHDFSTVLTVFPILRHLKQTKPEFDQVLQGTAASTKNKLPGLITSMETIGAKALEDFADNIKNDPDKEYNMPKDGTVHELTSNAILFLQQLLDFQETAGAMLASQETSSSATSYSSEFSKRLLSTYICKVLGNLQLNLLSKSKVYEDPALSAIFLHNNYNYILKSLEKSELIQLVAVTQKTAERSYREHIEQQIQTYQRSWLKVTDYIAEKNLPVFQPGVKLRDKERQIIKERFKGFNDGLEELCKIQKAWAIPDTEQRDRIRQAQKTIVKETYGAFLQKFGSVPFTKNPEKYIKYGVEQVGDMIDRLFDTSA

SEQ ID NO: 5924 - protein, 1189 aa, Homo sapiens
MPVQAAQWTEFLSCPICYNEFDENVHKPISLGCSHTVCKTCLNKLHRKACPFDQTAINTDIDVLPVNFALLQLVGAQVPDHQSIKLSNLGENKHYEVAKKCVEDLALYLKPLSGGKGVASLNQSALSRPMQRKLVTLVNCQLVEEEGRVRAMRAARSLGERTVTELILQHQNPQQLSANLWAAVRARGCQFLGPAMQEEALKLVLLALEDGSALSRKVLVLFVVQRLEPRFPQASKTSIGHVVQLLYRASCFKVTKRDEDSSLMQLKEEFRSYEALRREHDAQIVHIAMEAGLRISPEQWSSLLYGDLAHKSHMQSIIDKLQSPESFAKSVQELTIVLQRTGDPANLNRLRPHLELLANIDPNPDAVSPTWEQLENAMVAVKTVVHGLVDFIQNYSRKGHETPQPQPNSKYKTSMCRDLRQQGGCPRGTNCTFAHSQEELEKYRLRNKKINATVRTFPLLNKVGVNNTVTTTAGNVISVIGSTETTGKIVPSTNGISNAENSVSQLISRSTDSTLRALETVKKVGKVGANGQNAAGPSADSVTENKIGSPPKTPVSNVAATSAGPSNVGTELNSVPQKSSPFLTRVPVYPPHSENIQYFQDAAQIPFEVPQYPQTGYYPPPPTVPAGVAPCVPRFVRSNNVPESSLPPASMPYADHYSTFSPRDRMNSSPYQPPPPQPYGPVPPVPSGMYAPVYDSRRIWRPPMYQRDDIIRSNSLPPMDVMHSSVYQTSLRERYNSLDGYYSVACQPPSEAATVPLPREPCGHLKTSCEEQIRRKPDQWAQYHTQKAPLVSSTLPVATQSPTPPSPLFSVDFRADFSESVSGTKFEEDHLSHYSPWSCGTIGSCINAIDSEPKDVIANSNAVLMDLDSGDVKRRVHLFETQRRTKEEDPIIPFSDGPIISKWGAISRSSRTGYHTTDPVQATASQGSATKPISVSDYVPYVNAVDSRWSSYGNEATSSAHYVERDRFIVTDLSGHRKHSSTGDLLSLELQQAKSNSLLLQREANALAMQQKWNSLDEGRHLTLNLLSKEIELRNGELQSDYTEDATDTKPDRDIELELSALDTDEPDGQSEPIEEILDIQLGISSQNDQLLNGMAVENGHPVQQHQKEPPKQKKQSLGEDHVILEEQKTILPVTSCFSQPLPVSISNASCLPITTSVSAGNLILKTHVMSEDKNDFLKPVANGKMVNS

SEQ ID NO: 5925 - protein, 698 aa, Homo sapiens
MCGIFAYLNYHVAARREILETLIKGLQRLEYRGYDSAGVGFDGGNDKDWEANACKIQLIKKKGKVKALDEEVHKQQDMDLDIEFDVHLGIAHTRWATHGEPSPVNSHPQRSDKNNEFIVIHNGIITNYKDLKKFLESKGYDFESETDTETIAKLVKYMYDNRESQDTSFTTLVERVIQQLEGAFALVFKSVHFPGQAVGTRRGSPLLIGVRSEHKLSTDHIPILYRTARTQIGSKFTRWGSQGERGKDKKGSCNLSRVDSTTCLFPVEEKAVEYYFASDASAVIEHTNRVIFLEDDDVAAVVDGRLSIHRIKRTAGDHPGRAVQTLQMELQQIMKGNFSSFMQKEIFEQPESVVNTMRGRVNFDDYTVNLGGLKDHIKEIQRCRRLILIACGTSYHAGVATRQVLEELTELPVMVELASDFLDRNTPVFRDDVCFFLSQSGETADTLMGLRYCKERGALTVGITNTVGSSISRETDCGVHINAGPEIGVASTKAYTSQFVSLVMFALMMCDDRISMQERRKEIMLGLKRLPDLIKEVLSMDDEIQKLATELYHQKSVLIMGRGYHYATCLEGALKIKEITYMHSEGILAGELKHGPLALVDKLMPVIMIIMRDHTYAKCQNALQQVVARQGRPVVICDKEDTETIKNTKRTIKVPHSVDCLQGILSVIPLQLLAFHLAVLRGYDVDFPRNLAKSVTVE

SEQ ID NO: 5926 - protein, 688 aa, Homo sapiens
MSVNSEKSSSSERPEPQQKAPLVPPPPPPPPPPPPPLPDPTPPEPEEEILGSDDEEQEDPADYCKGGYHPVKIGDLFNGRYHVIRKLGWGHFSTVWLCWDMQGKRFVAMKVVKSAQHYTETALDEIKLLKCVRESDPSDPNKDMVVQLIDDFKISGMNGIHVCMVFEVLGHHLLKWIIKSNYQGLPVRCVKSIIRQVLQGLDYLHSKCKIIHTDIKPENILMCVDDAYVRRMAAEATEWQKAGAPPPSGSAVSTAPQQKPIGKISKNKKKKLKKKQKRQAELLEKRLQEIEELEREAERKIIEENITSAAPSNDQDGEYCPEVKLKTTGLEEAAEAETAKDNGEAEDQEEKEDAEKENIEKDEDDVDQELANIDPTWIESPKTNGHIENGPFSLEQQLDDEDDDEEDCPNPEEYNLDEPNAESDYTYSSSYEQFNGELPNGRHKIPESQFPEFSTSLFSGSLEPVACGSVLSEGSPLTEQEESSPSHDRSRTVSASSTGDLPKAKTRAADLLVNPLDPRNADKIRVKIADLGNACWVHKHFTEDIQTRQYRSIEVLIGAGYSTPADIWSTACMAFELATGDYLFEPHSGEDYSRDEDHIAHIIELLGSIPRHFALSGKYSREFFNRRGELRHITKLKPWSLFDVLVEKYGWPHEDAAQFTDFLIPMLEMVPEKRASAGECLRHPWLNS

SEQ ID NO: 5927 - protein, 435 aa, Homo sapiens
MSGYQRRPGATPLSRARSLAIPDAPAFYERRSCLPQLNCERPHGRDLDSPFFGIRPAFMCYVPSPVLASVGDTDFGYGKGKCSKQSPSGAHGTHFGDDRFEDLEEANPFSFREFLKTKNLGLSKEDPASRIYAKEASRHSLGLDHNSPPSQTGGYGLEYQQPFFEDPTGAGDLLDEEEDEDTGWSGAYLPSAIEQTHPERVPAGTSPCSTYLSFFSTPSELAGPESLPSWALSDTDSRVSPASPAGSPSADFAVHGESLGDRHLRTLQISYDALKDENSKLRRKLNEVQSFSEAQTEMVRTLERKLEAKMIKEESDYHDLESVVQQVEQNLELMTKRAVKAENHVVKLKQEISLLQAQVSNFQRENEALRCGQGASLTVVKQNADVALQNLRVVMNSAQASIKQLVSGAETLNLVAEILKSIDRISEVKDEEEDS

SEQ ID NO: 5928 - protein, 196 aa, Homo sapiens
MKVKIKCWNGVATWLWVANDENCGICRMAFNGCCPDCPLHGESISRCLGWCPQPVPVLGGRAHPQVPINTASPTPGQHTGSLMSREESSRSPDPTPPALDQETSSLLRCTSPWCLDHSCDLFGITDQVSADGPRACRQGARRRLPAGVGPVLPLLPHALHPQVAARTAGAAALPHVPPGMEVQGVRPDLALAGGAS

SEQ ID NO: 5929 - protein, 1708 aa, Homo sapiens
MAAIGRGRSLKNLRVRGRNDSGEENVPLDLTREPSDNLREILQNVARLQGVSNMRKLGHLNNFTKLLCDIGHSEEKLGFHYEDIIICLRLALLNEAKEVRAAGLRALRYLIQDSSILQKVLKLKVDYLIARCIDIQQSNEVERTQALRLVRKMITVNASLFPSSVTNSLIAVGNDGLQERDRMVRACIAIICELALQNPEVVALRGGLNTILKNVIDCQLSRINEALITTILHLLNHPKTRQYVRADVELERILAPYTDFHYRHSPDTAEGQLKEDREARFLASKMGIIATFRSWAGIINLCKPGNSGIQSLIGVLCIPNMEIRRGLLEVLYDIFRLPLPVVTEEFIEALLSVDPGRFQDSWRLSDGFVAAEAKTILPHRARSRPDLMDNYLALILSAFIRNGLLEGLVEVITNSDDHISVRATILLGELLHMANTILPHSHSHHLHCLPTLMNMAASFDIPKEKRLRASAALNCLKRFHEMKKRGPKPYSLHLDHIIQKAIATHQKRDQYLRVQKDIFILKDTEEALLINLRDSQVLQHKENLEWNWNLIGTILKWPNVNLRNYKDEQLHRFVRRLLYFYKPSSKLYANLDLDFAKAKQLTVVGCQFTEFLLESEEDGQGYLEDLVKDIVQWLNASSGMKPERSLQNNGLLTTLSQHYFLFIGTLSCHPHGVKMLEKCSVFQCLLNLCSLKNQDHLLKLTVSSLDYSRDGLARVILSKILTAATDACRLYATKHLRVLLRANVEFFNNWGIELLVTQLHDKNKTISSEALDILDEACEDKANLHALIQMKPALSHLGDKGLLLLLRFLSIPKGFSYLNERGYVAKQLEKWHREYNSKYVDLIEEQLNEALTTYRKPVDGDNYVRRSNQRLQRPHVYLPIHLYGQLVHHKTGCHLLEVQNIITELCRNVRTPDLDKWEEIKKLKASLWALGNIGSSNWGLNLLQEENVIPDILKLAKQCEVLSIRGTCVYVLGLIAKTKQGCDILKCHNWDAVRHSRKHLWPVVPDDVEQLCNELSSIPSTLSLNSESTSSRHNSESESVPSSMFILEDDRFGSSSTSTFFLDINEDTEPTFYDRSGPIKDKNSFPFFASSKLVKNRILNSLTLPNKKHRSSSDPKGGKLSSESKTSNRRIRTLTEPSVDFNHSDDFTPISTVQKTLQLETSFMGNKHIEDTGSTPSIGENDLKFTKNFGTENHRENTSRERLVVESSTSSHMKIRSQSFNTDTTTSGISSMSSSPSRETVGVDATTMDTDCGSMSTVVSTKTIKTSHYLTPQSNHLSLSKSNSVSLVPPGSSHTLPRRAQSLKAPSIATIKSLADCNFSYTSSRDAFGYATLKRLQQQRMHPSLSHSEALASPAKDVLFTDTITMKANSFESRLTPSRFMKALSYASLDKEDLLSPINQNTLQRSSSVRSMVSSATYGGSDDYIGLALPVDINDIFQVKDIPYFQTKNIPPHDDRGARAFAHDAGGLPSGTGGLVKNSFHLLRQQMSLTEIMNSIHSDASLFLESTEDTGLQEHTDDNCLYCVCIEILGFQPSNQLSAICSHSDFQDIPYSDWCEQTIHNPLEVVPSKFSGISGCSDGVSQEGSASSTKSTELLLGVKTIPDDTPMCRILLRKEVLRLVINLSSSVSTKCHETGLLTIKEKYPQTFDDICLYSEVSHLLSHCTFRLPCRRFIQELFQDVQFLQMHEEAEAVLATPPKQPIVDTSAES

SEQ ID NO: 5930 - protein, 1288 aa, Homo sapiens; identical to SEQ ID NO: 5775

SEQ ID NO: 5931 - protein, 942 aa, Homo sapiens
MTGSNSHITILTLKVLPHFESLGKQEKIPNKMSAFRNHCPHLDSVGEITKEDLIQKSLGTCQDCKVQGPNLWACLENRCSYVGCGESQVDHSTIHSQETKHYLTVNLTTLRVWCYACSKEVFLDRKLGTQPSLPHVRQPHQIQENSVQDFKIPSNTTLKTPLVAVFDDLDIEADEEDELRARGLTGLKNIGNTCYMNAALQALSNCPPLTQFFLDCGGLARTDKKPAICKSYLKLMTELWHKSRPGSVVPTTLFQGIKTVNPTFRGYSQQDAQEFLRCLMDLLHEELKEQVMEVEEDPQTITTEETMEEDKSQSDVDFQSCESCSNSDRAENENGSRCFSEDNNETTMLIQDDENNSEMSKDWQKEKMCNKINKVNSEGEFDKDRDSISETVDLNNQETVKVQIHSRASEYITDVHSNDLSTPQILPSNEGVNPRLSASPPKSGNLWPGLAPPHKKAQSASPKRKKQHKKYRSVISDIFDGTIISSVQCLTCDRVSVTLETFQDLSLPIPGKEDLAKLHSSSHPTSIVKAGSCGEAYAPQGWIAFFMEYVKRFVVSCVPSWFWGPVVTLQDCLAAFFARDELKGDNMYSCEKCKKLRNGVKFCKVQNFPEILCIHLKRFRHELMFSTKISTHVSFPLEGLDLQPFLAKDSPAQIVTYDLLSVICHHGTASSGHYIAYCRNNLNNLWYEFDDQSVTEVSESTVQNAEAYVLFYRKSSEEAQKERRRISNLLNIMEPSLLQFYISRQWLNKFKTFAEPGPISNNDFLCIHGGVPPRKAGYIEDLVLMLPQNIWDNLYSRYGGGPAVNHLYICHTCQIEAEKIEKRRKTELEIFIRLNRAFQKEDSPATFYCISMQWFREWESFVKGKDGDPPGPIDNTKIAVTKCGNVMLRQGADSGQISEETWNFLQSIYGGGPEVILRPPVVHVDPDILQAEEKIEVETRSL

SEQ ID NO: 5932 - protein, 701 aa, Homo sapiens
MMKRQLHRMRQLAQTGSLGRTPETAEFLGEDLLQVEQRLEPAKRAAHNIHKRLQACLQGQSGADMDKRVKKLPLMALSTTMAESFKELDPDSSMGKALEMSCAIQNQLARILAEFEMTLERDVLQPLSRLSEEELPAILKHKKSLQKLVSDWNTLKSRLSQATKNSGSSQGLGGSPGSHSHTTMANKVETLKEEEEELKRKVEQCRDEYLADLYHFVTKEDSYANYFIRLLEIQADYHRRSLSSLDTALAELRENHGQADHSPSMTATHFPRVYGVSLATHLQELGREIALPIEACVMMLLSEGMKEEGLFRLAAGASVLKRLKQTMASDPHSLEEFCSDPHAVAGALKSYLRELPEPLMTFDLYDDWMRAASLKEPGARLQALQEVCSRLPPENLSNLRYLMKFLARLAEEQEVNKMTPSNIAIVLGPNLLWPPEKEGDQAQLDAASVSSIQVVGVVEALIQSADTLFPGDINFNVSGLFSAVTLQDTVSDRLASEELPSTAVPTPATTPAPAPAPAPAPAPALASAATKERTESEVPPRPASPKVTRSPPETAAPVEDMARRTKRPAPARPTMPPPQVSGSRSSPPAPPLPPGSGSPGTPQALPRRLVGSSLRAPTVPPPLPPTPPQPARRQSRRSPASPSPASPGPASPSPVSLSNPAQVDLGAATAEGGAPEAISGVPTPPAIPPQPRPRSLASETN

SEQ ID NO: 5933 - protein, 605 aa, Homo sapiens
MEVRASLQKIVSNGDEQLEKAMEEILRDSEKRPSSLLVDCQSSSEISDHSFGDIPASQTNKPSLQLILDPSNTEISTPRPSSPGGLPEEDSVLFNKLTYLGCMKVSSPRNEVEALRAMATMKSSSQYPFPVTLYVPNVPEGSVRIIDQSSNVEIASFPIYKVLFCARGHDGTTESNCFAFTESSHGSEEFQIHVFSCEIKEAVSRILYSFCTAFKRSSRQVSDVKDSVIPTPDSDVFTFSVSLEVKEDDGKGNFSPVPKDRDKFYFKLKQGIEKKVVITVQQLSNKELAIERCFGMLLSPGRNVKNSDMHLLDMESMGKSYDGRAYVITGMWNPNAPVFLALNEETPKDKQVYMTVAVDMVVTEVVEPVRFLLETVVRVYPANERFWYFSRKTFTETFFMRLKQSEGKGHTNAGDAIYEVVSLQRESDKEEPVTPTSGGGPMSPQDDEAEEESDNELSSGTGDVSKDCPEKILYSWGELLGKWHSNLGARPKGLSTLVKSGVPEALRAEVWQLLAGCHDNQAMLDRYRILITKQQMKFSLTPRQTIHLVKYEGSMKVSMTPCNQLQFDIRLDVLITYTFCFSSFPEPELYKYVLKHQLIKRLNAC

SEQ ID NO: 5934 - protein, 1038 aa, Homo sapiens
MAVQLVPDSALGLLMMTEGRRCQVHLLDDRKLELLVQPKLLAKELLDLVASHFNLKEKEYFGIAFTDETGHLNWLQLDRRVLEHDFPKKSGPVVLYFCVRFYIESISYLKDNATIELFFLNAKSCIYKELIDVDSEVVFELASYILQEAKGDFSSNEVVRSDLKKLPALPTQALKEHPSLAYCEDRVIEHYKKLNGQTRGQAIVNYMSIVESLPTYGVHYYAVKDKQGIPWWLGLSYKGIFQYDYHDKVKPRKIFQWRQLENLYFREKKFSVEVHDPRRASVTRRTFGHSGIAVHTWYACPALIKSIWAMAISQHQFYLDRKQSKSKIHAARSLSEIAIDLTETGTLKTSKLANMGSKGKIISGSSGSLLSSGSQESDSSQSAKKDMLAALKSRQEALEETLRQRLEELKKLCLREAELTGKLPVEYPLDPGEEPPIVRRRIGTAFKLDEQKILPKGEEAELERLEREFAIQSQITEAARRLASDPNVSKKLKKQRKTSYLNALKKLQEIENAINENRIKSGKKPTQRASLIIDDGNIASEDSSLSDALVLEDEDSQVTSTISPLHSPHKGLPPRPPSHNRPPPPQSLEGLRQMHYHRNDYDKSPIKPKMWSESSLDEPYEKVKKRSSHSHSSSHKRFPSTGSCAEAGGGSNSLQNSPIRGLPHWNSQSSMPSTPDLRVRSPHYVHSTRSVDISPTRLHSLALHFRHRSSSLESQGKLLGSENDTGSPDFYTAARSSNGSDPMDDCSSCTSHSSSEHYYPAQMNANYSTLAEDSPSKARQRQRQRQRAAGALGSASSGSMPNLAARGGAGGAGGAGGGVYLHSQSQPSSQYRIKEYPLYIEGGATPVVVRSLESDQEGHYSVKAQFKTSNSYTAGGLFKESWRGGGGDEGDTGRLTPSRSQILRTPSLGREGAHDKGAGRAAVSDELRQWYQRSTASHKEHSRLSHTSSTSSDSGSQYSTSSQSTFVAHSRVTRMPQMCKATSAALPQSQRSSTPSSEIGATPPSSPHHILTWQTGEATENSPILDGSESPPHQSTDE

SEQ ID NO: 5935 - protein, 1077 aa, Homo sapiens
MVVEVDSMPAASSVKKPFGLRSKMGKWCCRCFPCCRESGKSNVGTSGDHDDSAMKTLRSKMGKWCRHCFPCCRGSGKSNVGASGDHDDSAMKTLRNKMGKWCCHCFPCCRGSSKSKVGAWGDYDDSAFMEPRYHVRGEDLDKLHRAAWWGKVPRKDLIVMLRDTDVNKQDKQKRTALHLASANGNSEVVKLLLDRRCQLNVLDNKKRTALIKAVQCQEDECALMLLEHGTDPNIPDEYGNTTLHYAIYNEDKLMAKALLLYGADIESKNKHGLTPLLLGVHEQKQQVVKFLIKKKANLNALDRYGRTALILAVCCGSASIVSLLLEQNIDVSSQDLSGQTAREYAVSSHHHVICQLLSDYKEKQMLKISSENSNPEQDLKLTSEEESQRFKGSENSQPEKMSQEPEINKDGDREVEEEMKKHESNNVGLLENLTNGVTAGNGDNGLIPQRKSRTPENQQFPDNESEEYHRICELLSDYKEKQMPKYSSENSNPEQDLKLTSEEESQRLKGSENGQPEKRSQEPEINKDGDRELENFMAIEEMKKHRSTHVGFPENLTNGATAGNGDDGLIPPRKSRTPESQQFPDTENEEYHSDEQNDTQKQFCEEQNTGILHDEILIHEEKQIEVVEKMNSELSLSCKKEKDILHENSTLREEIAMLRLELDTMKHQSQLREKKYLEDIESVKKRNDNLLKALQLNELTMDDDTAVLVIDNGSGMCKAGFAGDDAPRAVFPSIVGRPRQQGMMGGMHQKESYVGKEAQSKRGILTLKYPMEHGIITNWDDMEKIWHHTFYNELRVAPEEHPVLLTEATLNPKANREKMTQIMFETFNTPAMYVAIQAVLSLYTSGRTTGIVMDSGDGVTHTVPIYEGNALPHATLRLDLAGRELPDYLMKILTEHGYRFTTMAEREIVRDIKEKLCYVALDFEQEMATVASSSSLEKSYELPDGQVITIGNERFRCPEALFQPCFLGMESCGIHETTFNSIMKSDVDIRKDLYTNTVLSGGTTMYPGMAHRMQKEIAALAPSMMKIRIIAPPKARGSYSVWVGGSILASLSTFQQMWISKQEYDESGPSIVHRKCL

SEQ ID NO: 5936 - protein, 583 aa, Homo sapiens
MLSESKEGEEKEEVTMDTSENRPENDVPEPPMPIADQVSNDDRPEGSVEDEEKKESSLPKSFKRKISVVSATKGVPAGNSDTEGGQPGRKRRWGASTATTQKKPSISITTESLKSLIPDIKPLAGQEAVVDLHADDSRISEDETERNGDDGTHDKGLKICRTVTQVVPAEGQENGQREEEEEEKEPEAEPPVPPQVSVEVALPPPAEHEVKKVTLGDTLTRRSISQQKSGVSITIDDPVRTAQVPSPPRGKISNIVHISNLVRPFTLGQLKELLGRTGTLVEEAFWIDKIKSHCFVTYSTVEEAVATRTALHGVKWPQSNPKFLCADYAEQDELDYHRGLLVDRPSETKTEEQGIPRPLHPPPPPPVQPPQHPRAEQREQERAVREQWAEREREMERRERTRSEREWDRDKVREGPRSRSRSRDRRRKERAKSKEKKSEKKEKAQEEPPAKLLDDLFRKTKAAPCIYWLPLTDSQIVQKEAERAERAKEREKRRKEQEEEEQKEREKEAERERNRQLEREKRREHSRERDRERERERERDRGDRDRDRERDRERGRERDRRDTKRHSRSRSRSTPVRDRGGRR

SEQ ID NO: 5937 - protein, 320 aa, Homo sapiens; identical to SEQ ID NO: 5744

SEQ ID NO: 5938 - protein, 1097 aa, Homo sapiens
MAAAAAEQQQFYLLLGNLLSPDNVVRKQAEETYENIPGQSKITFLLQAIRNTTAAEEARQMAAVLLRRLLSSAFDEVYPALPSDVQTAIKSELLMIIQMETQSSMRKKVCDIAAELARNLIDEDGNNQWPEGLKFLFDSVSSQNVGLREAALHIFWNFPGIFGNQQQHYLDVIKRMLVQCMQDQEHPSIRTLSARATAAFILANEHNVALFKHFADLLPGFLQAVNDSCYQNDDSVLKSLVEIADTVPKYLRPHLEATLQLSLKLCGDTSLNNMQRQLALEVIVTLSETAAAMLRKHTNIVAQTIPQMLAMMVDLEEDEDWANADELEDDDFDSNAVAGESALDRMACGLGGKLVLPMIKEHIMQMLQNPDWKYRHAGLMALSAIGEGCHQQMEGILNEIVNFVLLFLQDPHPRVRYAACNAVGQMATDFAPGFQKKFHEKVIAALLQTMEDQGNQRVQAHAAAALINFTEDCPKSLLIPYLDNLVKHLHSIMVLKLQELIQKGTKLVLEQVVTSIASVADTAEEKFVPYYDLFMPSLKHIVENAVQKELRLLRGKTIECISLIGLAVGKEKFMQDASDVMQLLLKTQTDFNDMEDDDPQISYMISAWARMCKILGKEFQQYLPVVMGPLMKTASIKPEVALLDTQDMENMSDDDGWEFVNLGDQQSFGIKTAGLEEKSTACQMLVCYAKELKEGFVEYTEQVVKLMVPLLKFYFHDGVRVAAAESMPLLLECARVRGPEYLTQMWHFMCDALIKAIGTEPDSDVLSEIMHSFAKCIEVMGDGCLNNEHFEELGGILKAKLEEHFKNQELRQVKRQDEDYDEQVEESLQDEDDNDVYILTKVSDILHSIFSSYKEKVLPWFEQLLPLIVNLICPHRPWPDRQWGLCIFDDVIEHCSPASFKYAEYFLRPMLQYVCDNSPEVRQAAAYGLGVMAQYGGDNYRPFCTEALPLLVRVIQSADSKTKENVNATENCISAVGKIMKFKPDCVNVEEVLPHWLSWLPLHEDKEEAVQTFNYLCDLIESNHPIVLGPNNTNLPKIFSIIAEGEMHEAIKHEDPCAKRLANVVRQVQTSGGLWTECIAQLSPEQQAAIQELLNSA

SEQ ID NO: 5939 - protein, 904 aa, Homo sapiens
MFPALETHLKQTIPDPYEDFMYRHLQYYGYFKAQRGSLPNSATHQHVRKNNPQCLLNGSLGEKDDLIPDTLQKEKLLWPISLSSAVHRQIEAINRDFHSCLGWMQWRGLSSLQPPPPRFKDSPASAFRVAGITDSHMLSLPHLRSRQLLYDELDEVNPRLREPQELFSILSTKRPLQAPRWPIECEVIKENIHHIEWAPPQPEYFYQPKGNEKVPEIVGEKKGTVVYQLDSVPIEGSYFTSSRVGGKRGIVKELAVTLQGPEDNTLLFESRFESGNLQKAVRVDTYEYELTLRTDLYTNKHTQWFYFRVQNTRKDATYRFTIVNLLKPKSLYTVGMKPLLYSQLDANTRNIGWRREGNEIKYYKNNTDDGQQPFYCLTWTIQFPYDQDTCFFAHFYPYTYTDLQCYLLSVANNPIQSQFCKLQTLCRSLAGNTVYLLTITNPSQTPQEAAAKKAVVLSARVHPGESNGSWVMKGFLDFILSNSPDAQLLRDIFVFKVLPMLNPDGVIVGNYRCSLAGRDLNRHYKTILKESFPCIWYTRNMIKRLLEEREVLLYCDFHGHSRKNNIFLYGCNNNNRKYWLHERVFPLMLCKNAPDKFSFHSCNFKVQKCKEGTGRVVMWRMGILNSYTMESTFGGSTLGNKRDTHFTIEDLKSLGYHVCDTLLDFCDPDQMKFTQCLAELKELLRQEIHKKFHELGQDVDLEGSWSDISLSDIESRNSTSGSDSSLSDGLPVHLANIADELTQKKKMFKKKKKKSLQTRKQRNEQYQKKNLMQKLKLTEDTSEKAGFASTLQKQPTFFKNSENSSFLPMKNENPRLNETNLNRRDKDTPLDPSMATLILPKNKGRMQNKKPGFTVSCSPKRTINSSQEPAPGMKPNWPRSRYPATKRGCAAMAAYPSLHIYTYP

SEQ ID NO: 5940 - protein, 262 aa, Homo sapiens
MALSLGWKAHRNHCGLLLQALRSSGLLLFPCGQCPWRGAGSFLDPEIKAFLEENTEVTSSGSLTPEIQLRLLTPRCKFWWERADLWPHSDPYWAIYWPGGQALSRYLLDNPDVVRGKSVLDLGSGCGATAIAAKMSGASRILANDIDPIAGMAITLNCELNRLNPFPILIQNILNLEQDKWDLVVLGDMFYDEDLADSLHQWLKKCFWTYRTRVLIGDPGRPQFSGHSIQHHLHKVVEYSLLESTRQENSGLTTSTVWGFQP

SEQ ID NO: 5941 - protein, 872 aa, Homo sapiens
MNYPGRGSPRSPEHNGRGGGGGAWELGSDARPAFGGGVCCFEHLPGGDPDDGDVPLALLRGEPGLHLAPGTDDHNHHLALDPCLSDENYDFSSAESGSSLRYYSEGESGGGGSSLSLHPPQQPPLVPTNSGGGGATGGSPGERKRTRLGGPAARHRYEVVTELGPEEVRWFYKEDKKTWKPFIGYDSLRIELAFRTLLQTTGARPQGGDRDGDHVCSPTGPASSSGEDDDEDRACGFCQSTTGHEPEMVELVNIEPVCVRGGLYEVDVTQGECYPVYWNQADKIPVMRGQWFIDGTWQPLEEEESNLIEQEHLNCFRGQQMQENFDIEVSKSIDGKDAVHSFKLSRNHVDWHSVDEVYLYSDATTSKIARTVTQKLGFSKASSSGTRLHRGYVEEATLEDKPSQTTHIVFVVHGIGQKMDQGRIIKNTAMMREAARKIEERHFSNHATHVEFLPVEWRSKLTLDGDTVDSITPDKVRGLRDMLNSSAMDIMYYTSPLYRDELVKGLQQELNRLYSLFCSRNPDFEEKGGKVSIVSHSLGCVITYDIMTGWNPVRLYEQLLQKEEELPDERWMSYEERHLLDELYITKRRLKEIEERLHGLKASSMTQTPALKFKVENFFCMGSPLAVFLALRGIRPGNTGSQDHILPREICNRLLNIFHPTDPVAYRLEPLILKHYSNISPVQIHWYNTSNPLPYEHMKPSFLNPAKEPTSVSENEGISTIPSPVTSPVLSRRHYGESITNIGKASILGAASIGKGLGGMLFSRFGRSSTTQSSETSKDSMEDEKKPVASPSATTVGTQTLPHSSSGFLDSALELDHRIDFELREGLVESRYWSAVTSHTAYWSSLDVALFLLTFMYKHEHDDDAKPNLDPI

SEQ ID NO: 5942 - protein, 486 aa, Homo sapiens
MVSHTFHMRTEESDASQEGDDLPKSSANTSHPKQDDSPKSSEETIQPKEGDIPKAPEETIQSKKEDLPKSSEKAIQPKESNIPKSSAKPIQPKLGNIPKASVKPSQPKEGDIPKAPEETIQSKKEDLPKSSEEAIQPKEGDIPKSSAKPIQPKLGNIAKTSVKPSQPKESDIPKSPEETIQPKEGDIPKSSAKPIQPKLGNIPKASVKPSQPKEGDISKSPEEAIQPKEGDLPKSLEEAIQPKEGDIPKSPEEAIQPKEGDIPKSLEEAIQPKEGDIPKSPEETIQPKKGDIPKSPEEAIQPKEGDIPKSPKQAIQPKEGDIPKSLEEAIPPKEIDIPKSPEETIQPKEDDSPKSLEEATPSKEGDILKPEEETMEFPEGDKVKVILSKEDFEASLKEAGERLVAVDFSATWCGPCRTIRPFFHALSVKHEDVVFLEVDADNCEEVVRECAIMCVPTFQFYKKEEKVDELCGALKEKLEAVIAELK

SEQ ID NO: 5943 - protein, 334 aa, Homo sapiens
MAASGSGMAQKTWELANNMQEAQSIDEIYKYDKKQQQEILAAKPWTKDHHYFKYCKISALALLKMVMHARSGGNLEVMGLMLGKVDGETMIIMDSFALPVEGTETRVNAQAAAYEYMAAYIENAKQVGRLENAIGWYHSHPGYGCWLSGIDVSTQMLNQQFQEPFVAVVIDPTRTISAGKVNLGAFRTYPKGYKPPDEGPSEYQTIPLNKIEDFGVHCKQYYALEVSYFKSSLDRKLLELLWNKYWVNTLSSSSLLTNADYTTGQVFDLSEKLEQSEAQLGRGSFMLGLETHDRKSEDKLAKATRDSCKTTIEAIHGLMSQVIKDKLFNQINIS

SEQ ID NO: 5944 - protein, 449 aa, Homo sapiens
MVMEKPSPLLVGREFVRQYYTLLNKAPEYLHRFYGRNSSYVHGGVDASGKPQEAVYGQNDIHHKVLSLNFSECHTKIRHVDAHATLSDGVVVQVMGLLSNSGQPERKFMQTFVLAPEGSVPNKFYVHNDMFRYEDEVFGDSEPELDEESEDEVEEEQEERQPSPEPVQENANSGYYEAHPVTNGIEEPLEESSHEPEPEPESETKTEELKPQVEEKNLEELEEKSTTPPPAEPVSLPQEPPKPRVEAKPEVQSQPPRVREQRPRERPGFPPRGPRPGRGDMEQNDSDNRRIIRYPDSHQLFVGNLPHDIDENELKEFFMSFGNVVELRINTKGVGGKLPNFGFVVFDDSEPVQRILIAKPIMFRGEVRLNVEEKKTRAARERETRGGGDDRRDIRRNDRGPGGPRGIVGGGMMRDRDGRGPPPRGGMAQKLGSGRGTGQMEGRFTGQRR

SEQ ID NO: 5945 - protein, 110 aa, Homo sapiens
MEEIPAQEAAGSPRVQFQSLETQSECLSPEPQFVQDTDMEQGLTGGILLRLPTTRIHSVNSCPALSHTQASAFSGETLAVLTAGISKRWPKYRLPIDIARPCSETPFPRL

SEQ ID NO: 5946 - protein, 273 aa, Homo sapiens; identical to SEQ ID NO: 5514

SEQ ID NO: 5947 - protein, 970 aa, Homo sapiens
LSRRVPCVRRGCRPPLPPLPGSQSRAWSRDREAPLDPGRPAQSGRRPTSRSVSHACSWNGGSLDPLEGTPALLRSAERLMRKVKKLRLDKENTGSWRSFSLNSEGAERMATTGTPTADRGDAAATDDPAARFQVQKHSWDGLRSIIHGSRKYSGLIVNKAPHDFQFVQKTDESGPHSHRLYYLGMPYGSRENSLLYSEIPKKVRKEALLLLSWKQMLDHFQATPHHGVYSREEELLRERKRLGVFGITSYDFHSESGLFLFQASNSLFHCRDGGKNGFMVSPMKPLEIKTQCSGPRMDPKICPADPAFFSFINNSDLWVANIETGEERRLTFCHQGLSNVLDDPKSAGVATFVIQEEFDRFTGYWWCPTASWEGSEGLKTLRILYEEVDESEVEVIHVPSPALEERKTDSYRYAAGSKNPKIALKLAEFQTDSQGKIVSTQEKELVQPFSSLFPKVEYIARAGWTRDGKYAWAMFLDRPQQWLQLVLLPPALFIPSTENEEQRLASARAVPRNVQPYVVYEEVTNVWINVHDIFYPFPQSEGEDELCFLRANECKTGFCHLYKVTAVLKSQGYDWSEPFSPGEDEFKCPIKEEIALTSGEWEVLARHGSKIWVNEETKLVYFQGTKDTPLEHHLYVVSYEAAGEIVRLTTPGFSHSCSMSQNFDMFVSHYSSVSTPPCVHVYKLSGPDDDPLHKQPRFWASMMEAASCPPDYVPPEIFHFHTRSDVRLYGMIYKPHALQPGKKHPTVLFVYGGPQVQLVNNSFKGIKYLRLNTLASLGYAVVVIDGRGSCQRGLRFEGALKNQMGQVEIEDQVEGLQFVAEKYGFIDLSRVAIHGWSYGGFLSLMGLIHKPQVFKVAIAGAPVTVWMAYDTGYTERYMDVPENNQHGYEAGSVALHVEKLPNEPNRLLILHGFLDENVHFFHTNFLVSQLIRAGKPYQLQIYPNERHSIRCPESGEHYEVTLLHFLQEYL

SEQ ID NO: 5948 - protein, 863 aa, Homo sapiens
MGNREMEELIPLVNRLQDAFSALGQSCLLELPQIAVVGGQSAGKSSVLENFVGRDFLPRGSGIVTRRPLVLQLVTSKAEYAEFLHCKGKKFTDFDEVRLEIEAETDRVTGMNKGISSIPINLRVYSPHVLNLTLIDLPGITKVPVGDQPPDIEYQIREMIMQFITRENCLILAVTPANTDLANSDALKLAKEVDPQGLRTIGVITKLDLMDEGTDARDVLENKLLPLRRGYVGVVNRSQKDIDGKKDIKAAMLAERKFFLSHPAYRHIADRMGTPHLQKVLNQQLTNHIRDTLPNFRNKLQGQLLSIEHEVEAYKNFKPEDPTRKTKALLQMVQQFAVDFEKRIEGSGDQVDTLELSGGAKINRIFHERFPFEIVKMEFNEKELRREISYAIKNIHGIRTGLFTPDMAFEAIVKKQIVKLKGPSLKSVDLVIQELINTVKKCTKKLANFPRLCEETERIVANHIREREGKTKDQVLLLIDIQVSYINTNHEDFIGFANAQQRSSQVHKKTTVGNQVIRKGWLTISNIGIMKGGSKGYWFVLTAESLSWYKDDEEKEKKYMLPLDNLKVRDVEKSFMSSKHIFALFNTEQRNVYKDYRFLELACDSQEDVDSWKASLLRAGVYPDKSVGNNKAENDENGQAENFSMDPQLERQVETIRNLVDSYMSIINKCIRDLIPKTIMHLMINNVKDFINSELLAQLYSSEDQNTLMEESAEQAQRRDEMLRMYQALKEALGIIGDISTATVSTPAPPPVDDSWIQHSRRSPPPSPTTQRRPTLSAPLARPTSGRGPAPAIPSPGPHSGAPPVPFRPGPLPPFPSSSDSFGAPPQVPSRPTRAPPSVPSRRPPPSPTRPTIIRPLESSLLD

SEQ ID NO: 5949 - protein, 420 aa, Homo sapiens; identical to SEQ ID NO: 5350

SEQ ID NO: 5950 - protein, 826 aa, Homo sapiens
MVAPVLETSHVFCCPNRVRGVLNWSSGPRGLLAFGTSCSVVLYDPLKRVVVTNLNGHTARVNCIQWICKQDGSPSTELVSGGSDNQVIHWEIEDNQLLKAVHLQGHEGPVYAVHAVYQRRTSDPALCTLIVSAAADSAVRLWSKKGPEVMCLQTLNFGNGFALALCLSFLPNTDVPILACGNDDCRIHIFAQQNDQFQKVLSLCGHEDWIRGVEWAAFGRDLFLASCSQDCLIRIWKLYIKSTSLETQDDDNIRLKENTFTIENESVKIAFAVTLETVLAGHENWVNAVHWQPVFYKDGVLQQPVRLLSASMDKTMILWAPDEESGVWLEQVRVGEVGGNTLGFYDCQFNEDGSMIIAHAFHGALHLWKQNTVNPREWTPEIVISGHFDGVQDLVWDPEGEFIITVGTDQTTRLFAPWKRKDQSQVTWHEIARPQIHGYDLKCLAMINRFQFVSGADEKVLRVFSAPRNFVENFCAITGQSLNHVLCNQDSDLPEGATVPALGLSNKAVFQGDIASQPSDEEELLTSTGFEYQQVAFQPSILTEPPTEDHLLQNTLWPEVQKLYGHGYEIFCVTCNSSKTLLASACKAAKKEHAAIILWNTTSWKQVQNLVFHSLTVTQMAFSPNEKFLLAVSRDRTWSLWKKQDTISPEFEPVFSLFAFTNKITSVHSRIIWSCDWSPDSKYFFTGSRDKKVVVWGECDSTDDCIEHNIGPCSSVLDVGGAVTAVSVCPVLHPSQRYVVAVGLECGKICLYTWKKTDQVPEINDWTHCVETSQSQSHTLAIRKLCWKNCSGKTEQKEAEGAEWLHFASCGEDHTVKIHRVNKCAL

SEQ ID NO: 5951 - protein, 383 aa, Homo sapiens
MDRTCEERPAEDGSDEEDPDSMEAPTRIRDTPEDIVLEAPASGLAFHPARDLLAAGDVDGDVFVFSYSCQEGETKELWSSGHHLKACRAVAFSEDGQKLITVSKDKAIHVLDVEQGQLERRVSKAHGAPINSLLLVDENVLATGDDTGGICLWDQRKEGPLMDMRQHEEYIADMALDPAKKLLLTASGDGCLGIFNIKRRRFELLSEPQSGDLTSVTLMKWGKKVACGSSEGTIYLFNWNGFGATSDRFALRAESIDCMVPVTESLLCTGSTDGVIRAVNILPNRVVGSVGQHTGEPVEELALSHCGRFLASSGHDQRLKFWDMAQLRAVVVDDYRRRKKKGGPLRALSSKTWSTDDFFAGLREEGEDSMAQEEKEETGDDSD

SEQ ID NO: 5952 - protein, 332 aa, Homo sapiens
MSEAGEEQPMETTGATENGHEAVPEGESPAGAGTGAAAGAGGATAAPPSGNQNGAEGDQINASKNEEDAGKMFVGGLSWDTSKKDLKDYFTKFGEVVDCTIKMDPNTGRSRGFGFILFKDAASVEKVLDQKEHRLDGRVIDPKKAMAMKKDPVKKIFVGGLNPEATEEKIREYFGEFGEIEAIELPMDPKLNKRRGFVFITFKEEEPVKKVLEKKFHTVSGSKCEIKVAQPKEVYQQQQYGSGGRGNRNRGNRGSGGGGGGGGQSQSWNQGYGNYWNQGYGYQQGYGPGYGGYDYSPYGYYGYGPGYDYSQGSTNYGKSQRRGGHQNNYKPY

SEQ ID NO: 5953 - protein, 914 aa, Homo sapiens; identical to SEQ ID NO: 5366

SEQ ID NO: 5954 - protein, 923 aa, Homo sapiens
MAASTGYVRLWGAARCWVLRRPMLAAAGGRVPTAAGAWLLRGQRTCDASPPWALWGRGPAIGGSAGAGEGPVITALTPMTIPDVFPHLPLIAITRNPVFPRFIKIIEVKNKKLVELLRRKVRLAQPYVGVFLKRDDSNESDVVESLDEIYHTGTFAQIHEMQDLGDKLRMIVMGHRRVHISRQLEVEPEEPEAENKHKPRRKSKRGKKEAEDELSARHPAELAMEPTPELPAEVLMVEVENVVHEDFQVTEEVKALTAEIVKTIRDIIALNPLYRESVLQMMQAGQRVVDNPIYLSDMGAALTGAESHELQDVLEETNIPKRLYKALSLLKKEFELSKLQQRLGREVEEKIKQTHRKYLLQEQLKIIKKELGLEKDDKDAIEEKFRERLKELVVPKHVMDVVDEELSKLGLLDNHSSEFNVTRNYLDWLTSIPWGKYSNENLDLARAQAVLEEDHYGMEDVKKRILEFIAVSQLRGSTQGKILCFYGPPGVGKTSIARSIARALNREYFRFSVGGMTDVAEIKGHRRTYVGAMPGKIIQCLKKTKTENPLILIDEVDKIGRGYQGDPSSALLELLDPEQNANFLDHYLDVPVDLSKVLFICTANVTDTIPEPLRDRMEMINVSGYVAQEKLAIAERYLVPQARALCGLDESKAKLSSDVLTLLIKQYCRESGVRNLQKQVEKVLRKSAYKIVSGEAESVEVTPENLQDFVGKPVFTVERMYDVTPPGVVMGLAWTAMGGSTLFVETSLRRPQDKDAKGDKDGSLEVTGQLGEVMKESARIAYTFARAFLMQHAPANDYLVTSHIHLHVPEGATPKDGPSAGCTIVTALLSLAMGRPVRQNLAMTGEVSLTGKILPVGGIKEKTIAAKRAGVTCIVLPAENKKDFYDLAAFITEGLEVHFVEHYREIFDIAFPDEQAEALAVER

SEQ ID NO: 5955 - protein, 225 aa, Homo sapiens
MGPLAAVELFYDVLSPYSWLGFEILCRYQNIWNINLQLRPSLITGIMKDSGNKPPGLLPRKGLYMANDLKLLRHHLQIPIHFPKDFLSVMLEKGSLSAMRFLTAVNLEHPEMLEKASRELWMRVWSRNEDITEPQSILAAAEKAGMSAEQAQGLLEKIATPKVKNQLKETTEAACRYGAFGLPITVAHVDGQTHMLFGSDRMELLAHLLGEKWMGPIPPAVNARL

SEQ ID NO: 5956 - protein, 684 aa, Homo sapiens
MEANHSEQLSAERQSTPPGDSSSLPSHNGLEKEDGQDSPTPVQPPEKEASVHPDISEELNRQLEDIINTYGSAASTAGKEGSARASEQPENAESPDNEDGDCEETTEEAGREPVASGEPPTVKEPVSNKEQKLEKKILKGLGKEANLLMQNLNKLQTPEEKFDFLFKKYAELLDEHRTEQKKLKLLQKKQVQIQKEKDQLQGEHSRAILARSKLESLCRELQRHNKTLKEEALQRAREEEEKRKEITSHFQSTLTDIQGQIEQQSERNMKLCQENTELAEKLKSIIDQYELREEHLDKIFKHRELQQKLVDAKLEQAQEMMKEAEERHKREKEYLLNQAAEWKLQAKVLKEQETVLQAQLTLYSGRFEEFQSTLTKSNEVFATFKQEMDKTTKKMKKLEKDTATWKARFENCNKALLDMIEEKALRAKEYECFVMKIGRLENLCRALQEERNELHKKIRDAEISEKDDQSQHNSDEEPESNVSVDQEIDAEEVNSVQTAVKNLATAFMIIHHPESTPHQSKETQPEIGSSQESADAALKEPEQPPLIPSRDSESPLPPLTPQAEAEGGSDAEPPSKASNSPAGLGAETQCEGLPVGAQADQASWKPEAEASGQAPQAPTEASLQKMEADVPAPACAAEEHVAAMVPACEPSRQPPRAAAEELPVGASAGPQPRNVADTNLEGVD

SEQ ID NO: 5957 - protein, 485 aa, Homo sapiens
MNGTLDHPDQPDLDAIKMFVGQVAAWSEKDLRELFEQYGAVYEINVLRDRSQNPPQSKGCCFVTFYTRKAALEAQNALHNMKVLPGMHHPIQMKPADSEKNNAVEDRKLFIGMISKKCTENDIRVMFSSFGQIEECRILRGPDGLSRGCAFVTFTTRAMAQTAIKAMHQAQTMEGCSSPMVVKFADTQKDKEQKRMAQQLQQQMQQISAASVWGNLAGLNTLGPQYLALYLQLLQQTASSGNLNTLSSLHPMGGLNAMQLQNLAALAAAASAAQNTPSGTNALTTSSSPLSVLTSSGSSPSSSSSNSVNPIASLGALQTLAGATAGLNVGSLAGMAALNGGLGSSGLSNGTGSTMEALTQAYSGIQQYAAAALPTLYNQNLLTQQSIGAAGSQKEGPEGANLFIYHLPQEFGDQDLLQMFMPFGNVVSAKVFIDKQTNLSKCFGFVSYDNPVSAQAAIQSMNGFQIGMKRLKVQLKRSKNDSKPY

SEQ ID NO: 5958 - protein, 2607 aa, Homo sapiens
MEKATVPVAAATAAEGEGSPPAVAAVAGPPAAAEVGGGVGGSSRARSASSPRGMVRVCDLLLKKKPPQQQHHKAKRNRTCRPPSSSESSSDSDNSGGGGGGGGGGGGGGGTSSNNSEEEEDDDDEEEEVSEVESFILDQDDLENPMLETASKLLLSGTADGADLRTVDPETQARLEALLEAAGIGKLSTADGKAFADPEVLRRLTSSVSCALDEAAAALTRMRAESTANAGQSDNRSLAEACSEGDVNAVRKLLIEGRSVNEHTEEGESLLCLACSAGYYELAQVLLAMHANVEDRGIKGDITPLMAAANGGHVKIVKLLLAHKADVNAQSSTGNTALTYACAGGYVDVVKVLLESGASIEDHNENGHTPLMEAGSAGHVEVARLLLENGAGINTHSNEFKESALTLACYKGHLEMVRFLLEAGADQEHKTDEMHTALMEACMDGHVEVARLLLDSGAQVNMPADSFESPLTLAACGGHVELAALLIERGASLEEVNDEGYTPLMEAAREGHEEMVALLLGQGANINAQTEETQETALTLACCGGFLEVADFLIKAGADIELGCSTPLMEAAQEGHLELVKYLLAAGANVHATTATGDTALTYACENGHTDVADVLLQAGADLEHESEGGRTPLMKAARAGHVCTVQFLISKGANVNRTTANNDHTVLSLACAGGHLAVVELLLAHGADPTHRLKDGSTMLIEAAKGGHTSVVCYLLDYPNNLLSAPPPDVTQLTPPSHDLNRAPRVPVQALPMVVPPQEPDKPPANVATTLPIRNKAASKQKSSSHLPANSQDVQGYITNQSPESIVEEAQGKLTELEQRIKEAIEKNAQLQSLELAHADQLTKEKIEELNKTREEQIQKKQKILEELQKVERELQLKTQQQLKKQYLEVKAQRIQLQQQQQQSCQHLGLLTPVGVGEQLSEGDYARLQQVDPVLLKDEPQQTAAQMGFAPIQPLAMPQALPLAAGPLPPGSIANLTELQGVIVGQPVLGQAQLAGLGQGILTETQQGLMVASPAQTLNDTLDDIMAAVSGRASAMSNTPTHSIAASISQPQTPTPSPIISPSAMLPIYPAIDIDAQTESNHDTALTLACAGGHEELVQTLLERGASIEHRDKKGFTPLILAATAGHVGVVEILLDNGADIEAQSERTKDTPLSLACSGGRQEVVELLLARGANKEHRNVSDYTPLSLAASGGYVNIIKILLNAGAEINSRTGSKLGISPLMLAAMNGHTAAVKLLLDMGSDINAQIETNRNTALTLACFQGRTEVVSLLLDRKANVEHRAKTGLTPLMEAASGGYAEVGRVLLDKGADVNAPPVPSSRDTALTIAADKGHYKFCELLIGRGAHIDVRNKKGNTPLWLAANGGHLDVVQLLVQAGADVDAADNARGSITPLMAAFARGSGHVKVVRYLVKEVNQFPSDSECMRYIATITDKEMLKKCHLCMESIVQAKDRQAAEANKNASILLEELDLEKLREESRRLALAAKREKRKEKRRKKKEEQRRKLEEIEAKNKENFELQAAQEKEKLKVEDEPEVLTEPPSATTTTTIGISATWTTLAGSHGKRNNTITTTSSKRKNRKNKITPENVQIIFDDPLPISYSQPEKVNGESKSSSTSESGDSDNMRISSCSDESSNSNSSRKSDNHSPAVVTTTVSSKKQPSVLVTFPKEERKSVSGKASIKLSETISEGTSNSLSTCTKSGPSPLSSPNGKLTVASPKRGQKREEGWKEVVRRSKKVSVPSTVISRVIGRGGCNINAIREFTGAHIDIDKQKDKTGDRIITIRGGTESTRQATQLINALIKDPDKEIDELIPKNRLKSSSANSKIGSSAPTTTAANTSLMGIKMTTVALSSTSQTATALTVPAISSASTHKTIKNPVNNVRPGFPVSLPLAYPPPQFAHALLAAQTFQQIRPPRLPMTHFGGTFPPAQSTWGPFPVRPLSPARATNSPKPHMVPRHSNQNSSGSQVNSAGSLTSSPTTTTSSSASTVPGTSTNGSPSSPSVRRQLFVTVVKTSNATTTTVTTTASNNNTAPTNATYPMPTAKEHYPVSSPSSPSPPAQPGGVSRNSPLDCGSASPNKVASSSEQEAGSPPVVETTNTRPPNSSSSSGSSSAHSNQQQPPGSVSQEPRPPLQQSQVPPPEVRMTVPPLATSSAPVAVPSTAPVTYPMPQTPMGCPQPTPKMETPAIRPPPHGTTAPHKNSASVQNSSVAVLSVNHIKRPHSVPSSVQLPSTLSTQSACQNSVHPANKPIAPNFSAPLPFGPFSTLFENSPTSAHAFWGGSVVSSQSTPESMLSGKSSYLPNSDPLHQSDTSKAPGFRPPLQRPAPSPSGIVNMDSPYGSVTPSSTHLGNFASNISGGQMYGPGAPLGGAPAAANFNRQHFSPLSLLTPCSSASNDSSAQSVSSGVRAPSPAPSSVPLGSEKPSNVSQDRKVPVPIGTERSARIRQTGTSAPSVIGSNLSTSVGHSGIWSFEGIGGNQDKVDWCNPGMGNPMIHRPMSDPGVFSQHQAMERDSTGIVTPSGTFHQHVPAGYMDFPKVGGMPFSVYGNAMIPPVAPIPDGAGGPIFNGPHAADPSWNSLIKMVSSSTENNGPQTVWTGPWAPHMNSVHMNQLG

SEQ ID NO: 5959 - protein, 1023 aa, Homo sapiens
MTEGRRCQVHLLDDRKLELLVQPKLLAKELLDLVASHFNLKEKEYFGIAFTDETGHLNWLQLDRRVLEHDFPKKSGPVVLYFCVRFYIESISYLKDNATIELFFLNAKSCIYKELIDVDSEVVFELASYILQEAKGDFSSNEVVRSDLKKLPALPTQALKEHPSLAYCEDRVIEHYKKLNGQTRGQAIVNYMSIVESLPTYGVHYYAVKDKQGIPWWLGLSYKGIFQYDYHDKVKPRKIFQWRQLENLYFREKKFSVEVHDPRRASVTRRTFGHSGIAVHTWYACPALIKSIWAMAISQHQFYLDRKQSKSKIHAARSLSEIAIDLTETGTLKTSKLANMGSKGKIISGSSGSLLSSGSQESDSSQSAKKDMLAALKSRQEALEETLRQRLEELKKLCLREAELTGKLPVEYPLDPGEEPPIVRRRIGTAFKLDEQKILPKGEEAELERLEREFAIQSQITEAARRLASDPNVSKKLKKQRKTSYLNALKKLQEIENAINENRIKSGKKPTQRASLIIDDGNIASEDSSLSDALVLEDEDSQVTSTISPLHSPHKGLPPRPPSHNRPPPPQSLEGLRQMHYHRNDYDKSPIKPKMWSESSLDEPYEKVKKRSSHSHSSSHKRFPSTGSCAEAGGGSNSLQNSPIRGLPHWNSQSSMPSTPDLRVRSPHYVHSTRSVDISPTRLHSLALHFRHRSSSLESQGKLLGSENDTGSPDFYTAARSSNGSDPMDDCSSCTSHSSSEHYYPAQMNANYSTLAEDSPSKARQRQRQRQRAAGALGSASSGSMPNLAARGGAGGAGGAGGGVYLHSQSQPSSQYRIKEYPLYIEGGATPVVVRSLESDQEGHYSVKAQFKTSNSYTAGGLFKESWRGGGGDEGDTGRLTPSRSQILRTPSLGREGAHDKGAGRAAVSDELRQWYQRSTASHKEHSRLSHTSSTSSDSGSQYSTSSQSTFVAHSRVTRMPQMCKATSAALPQSQRSSTPSSEIGATPPSSPHHILTWQTGEATENSPILDGSESPPHQSTDE

SEQ ID NO: 5960 - protein, 287 aa, Homo sapiens
MSQAWWHTSVSPATQEAKAGGLLQPRRQRLWLKRCRISSSACEDLSAALIANKNLTRMDLSGNGVGFPGMMLLCEGLRHPQCRLQMIQLRKCQLESGACQEMASVLGTNPHLVELDLTGNALEDLGLRLLCQGLRHPVCRLRTLWLKICRLTAAACDELASTLSVNQSLRELDLSLNELGDLGVLLLCEGLRHPTCKLQTLRLDSCGLTAKACENLYFTLGINQTLTDLYLTNNALGDTGVRLLCKRLSHPGCKLRVLWLFGMDLNKMTHSRLAALRVTKPYLDIGC

SEQ ID NO: 5961 - protein, 204 aa, Homo sapiens
MAGYLSESDFVMVEEGFSTRDLLKELTLGASQATTDEVAAFFVADLGAIVRKHFCFLKCLPRVRPFYAVKCNSSPGVLKVLAQLGLGFSCANKIASVINSALDLYFPEGCGVDIFAELGRYYVTSAFTVAVSIIAKKEVLLDQPGREEENGSTSKTIVYHLDEGVYGIFNSVLFDNICPTPILQKSKNHSPCYMSLESIHFIAV

SEQ ID NO: 5962 - protein, 172 aa, Homo sapiens
MMKLKSNQTRTYDGDGYKKRAACLCFRSESEEEVLLVSSSRHPDRWIVPGGGMEPEEEPSVAAVREVCEEAGVKGTLGRLVGIFENQERKHRTYVYVLIVTEVLEDWEDSVNIGRKREWFKIEDAIKVLQYHKPVQASYFETLRQGYSANNGTPVVATTYSVSAQSSMSGIR

SEQ ID NO: 5963 - protein, 1429 aa, Homo sapiens; identical to SEQ ID NO: 5224

SEQ ID NO: 5964 - protein, 392 aa, Homo sapiens
MGDSCPAVTFRSQKENRAGLQEKLRYLQQQLQDETPRRQEAELQEPEEKQEPEEKQEPEEKQKPEAGLSWNSLGPAATSQGCPGPPGSPDKPSRPHGLVPAGWGMGPRAGEGPYVSEQELQKLFTGIEELRREVSSLTARWHQEEGAVQEALRLLGGLGGRVDGFLGQWERAQREQAQTARDLQELRGRADELCTMVERSAVSVASLRSELEGLGPLKPILEEFGRQFQNSRRGPDLSMNLDRSHQGNCARCASQGSQLSTESLQQLLDRALTSLVDEVKQRGLTPACPSCQRLHKKILELERQALAKHVRAEALSSTLRLAQDEALRAKNLLLTDKMKPEEKMATLDHLHLKMCSLHDHLSNLPLEGSTGTMGGGSSAGTPPKQGGSAPEQ

SEQ ID NO: 5965 - protein, 563 aa, Homo sapiens
MSDDAGDTLATGDKAEVTEMPNSDSLPEDAEVHCDSAAVSHEPTPADPRGEGHENAAVQGAGAAAIGPPVQPQDANALEPPLNGDVTEDTLAECIDSVSLEAEPRSEIPLQEQNYLAVDSPPSGGGWAGWGSWGKSLLSSASATVGHGLTAVKEKAGATLRIHGVNSGSSEGAQPNTENGVPEITDAATDQGPAESPPTSPSSASRGMLSAITNVVQNTGKSVLTGGLDALEFIGKKTMNVLAESDPGFKRTKTLMERTVSLSQMLREAKEKEKQRLAQQLTMERTAHYGMLFDEYQGLSHLEALEILSNESESKVQSFLASLDGEKLELLKNDLISIKDIFAAKELENEENQEEQGLEEKGEEFARMLTELLFELHVAATPDKLNKAMKRAHDWVEEDQTVVSVDVAKVSEEETKKEEKEEKSQDPQEDKKEEKKTKTIEEVYMSSIESLAEVTARCIEQLHKVAELILHGQEEEKPAQDQAKVLIKLTTAMCNEVASLSKKFTNSLTTVGSNKKAEVLNPMISSVLLEGCNSTTYIQDAFQLLLPVLQVSHIQTSCLKAQP

SEQ ID NO: 5966 - protein, 418 aa, Homo sapiens
MFSPDQENHPSKAPVKYGELIVLGYNGSLPNGDRGRRKSRFALFKRPKANGVKPSTVHIACTPQAAKAISNKDQHSISYTLSRAQTVVVEYTHDSNTDMFQIGRSTESPIDFVVTDTVPGSQSNSDTQSVQSTISRFACRIICERNPPFTARIYAAGFDSSKNIFLGEKAAKWKTSDGQMDGLTTNGVLVMHPRNGFTEDSKPGIWREISVCGNVFSLRETRSAQQRGKMVEIETNQLQDGSLIDLCGATLLWRTAEGLSHTPTVKHLEALRQEINAARPQCPVGFNTLAFPSMKRKDVVDEKQPWVYLNCGHVHGYHNWGNKEERDGKDRECPMCRSVGPYVPLWLGCEAGFYVDAGPPTHAFSPCGHVCSEKTTAYWSQIPLPHGTHTFHAACPFCAHQLAGEQGYIRLIFQGPLD

SEQ ID NO: 5967 - protein, 1320 aa, Homo sapiens
MQDDSIEASTSISQLLRESYLAETRHRGNNERSRAEPSSNPCHFGSPSGAAEGGGGQDDLPDLSAFLSQEELDESVNLARLAINYDPLEKADETQARKRLSPDQMKHSPNLSFEPNFCQDNPRSPTSSKESPQEAKRPQYCSETQSKKVFLNKAADFIEELSSLFKSHSSKRIRPRACKNHKSKLESQNKVMQENSSSFSDLSERRERSSVPIPIPADTRDNEVNHALEQQEAKRREAEQAASEAAGGDTTPGSSPSSLYYEEPLGQPPRFTQKLRSREVPEGTRVQLDCIVVGIPPPQVRWYCEGKELENSPDIHIVQAGNLHSLTIAEAFEEDTGRYSCFASNIYGTDSTSAEIYIEGVSSSDSEGDPNKEEMNRIQKPNEVSSPPTTSAVIPPAVPQAQHLVAQPRVATIQQCQSPTNYLQGLDGKPIIAAPVFTKMLQNLSASEGQLVVFECRVKGAPSPKVEWYREGTLIEDSPDFRILQKKPRSMAEPEEICTLVIAEVFAEDSGCFTCTASNKYGTVSSIAQLHVRGNEDLSNNGSLHSANSTTNLAAIEPQPSPPHSEPPSVEQPPKPKLEGVLVNHNEPRSSSRIGLRVHFNLPEDDKGSEASSEAGVVTTRQTRPDSFQERFNGQATKTPEPSSPVKEPPPVLAKPKLDSTQLQQLHNQVLLEQHQLQNPPPSSPKEFPFSMTVLNSNAPPAVTTSSKQVKAPSSQTFSLARPKYFFPSTNTTAATVAPSSSPVFTLSSTPQTIQRTVSKESLLVSHPSVQTKSPGGLSIQNEPLPPGPTEPTPPPFTFSIPSGNQFQPRCVSPIPVSPTSRIQNPVAFLSSVLPSLPAIPPTNAMGLPRSAPSMPSQGLAKKNTKSPQPVNDDNIRETKNAVIRDLGKKITFSDVRPNQQEYKISSFEQRLMNEIEFRLERTPVDESDDEIQHDEIPTGKCIAPIFDKRLKHFRVTEGSPVTFTCKIVGIPVPKVYWFKDGKQISKRNEHCKMRREGDGTCSLHIESTTSDDDGNYTIMAANPQGRISCSGHLMVQSLPIRSRLTSAGQSHRGRSRVQERDKEPLQERFFRPHFLQAPGDMVAHEGRLCRLDCKVSGLPPPELTWLLNGQPVLPDASHKMLVRETGVHSLLIDPLTQRDAGTYKCIATNKTGQNSFSLELSVVAKEVKKAPVILEKLQNCGVPEGHPVRLECRVIGMPPPVFYWKKDNETIPCTRERISMHQDTTGYACLLIQPAKKSDAGWYTLSAKNEAGIVSCTARLDIYAQWHHQIPPPMSVRPSGSRYGSLTSKGLDIFSAFSSMESTMVYSCSSRSVVESDEL

SEQ ID NO: 5968 - protein, 1400 aa, Homo sapiens
MASCASIDIEDATQHLRDILKLDRPAGGPSAESPRPSSAYNGDLNGLLVPDPLCSGDSTSANKTGLRTMPPINLQEKQVICLSGDDSSTCIGILAKEVEIVASSDSSISSKARGSNKVKIQPVAKYDWEQKYYYGNLIAVSNSFLAYAIRAANNGSAMVRVISVSTSERTLLKGFTGSVADLAFAHLNSPQLACLDEAGNLFVWRLALVNGKIQEEILVHIRQPEGTPLNHFRRIIWCPFIPEESEDCCEESSPTVALLHEDRAEVWDLDMLRSSHSTWPVDVSQIKQGFIVVKGHSTCLSEGALSPDGTVLATASHDGYVKFWQIYIEGQDEPRCLHEWKPHDGRPLSCLLFCDNHKKQDPDVPFWRFLITGADQNRELKMWCTVSWTCLQTIRFSPDIFSSVSVPPSLKVCLDLSAEYLILSDVQRKVLYVMELLQNQEEGHACFSSISEFLLTHPVLSFGIQVVSRCRLRHTEVLPAEEENDSLGADGTHGAGAMESAAGVLIKLFCVHTKALQDVQIRFQPQLNPDVVAPLPTHTAHEDFTFGESRPELGSEGLGSAAHGSQPDLRRIVELPAPADFLSLSSETKPKLMTPDAFMTPSASLQQITASPSSSSSGSSSSSSSSSSSLTAVSAMSSTSAVDPSLTRPPEELTLSPKLQLDGSLTMSSSGSLQASPRGLLPGLLPAPADKLTPKGPGQVPTATSALSLELQEVEPLGLPQASPSRTRSPDVISSASTALSQDIPEIASEALSRGFGSSAPEGLEPDSMASAASALHLLSPRPRPGPELGPQLGLDGGPGDGDRHNTPSLLEAALTQEASTPDSQVWPTAPDITRETCSTLAESPRNGLQEKHKSLAFHRPPYHLLQQRDSQDASAEQSDHDDEVASLASASGGFGTKVPAPRLPAKDWKTKGSAASPKLKRKSKKDDGDAAMGSRLTEHQVAEPPEDWPALIWQQQRELAELRHSQEELLQRLCTQLEGLQSTVTGHVERALETRHEQEQRRLERALAEGQQRGGQLQEQLTQQLSQALSSAVAGRLERSIRDEIKKTVPPCVSRSLEPMAGQLSNSVATKLTAVEGSMKENISKLLKSKNLTDAIARAAADTLQGPMQAAYREAFQSVVLPAFEKSCQAMFQQINDSFRLGTQEYLQQLESHMKSRKAREQEAREPVLAQLRGLVSTLQSATEQMAATVAGSVRAEVQHQLHVAVGSLQESILAQVQRIVKGEVSVALKEQQAAVTSSIMQAMRSAAGTPVPSAHLDCQAQQAHILQLLQQGHLNQAFQQALTAADLNLVLYVCETVDPAQVFGQPPCPLSQPVLLSLIQQLASDLGTRTDLKLSYLEEAVMHLDHSDPITRDHMGSVMAQVRQKLFQFLQAEPHNSLGKAARRLSLMLHGLVTPSLP

SEQ ID NO: 5969 - protein, 191 aa, Homo sapiens
MSSGADGGGGAAVAARSDKGSPGEDGFVPSALGTREHWDAVYERELQTFREYGDTGEIWFGEESMNRLIRWMQKHKIPLDASVLDIGTGNGVFLVELAKFGFSNITGIDYSPSAIQLSGSIIEKEGLSNIKLKVEDFLNLSTQLSGFHICIDKGTFDAISLNPDNAIEKRKQYVKSLSRVLKVKGFFNNVM

SEQ ID NO: 5970 - protein, 873 aa, Homo sapiens
MGNREMEELIPLVNRLQDAFSALGQSCLLELPQIAVVGGQSAGKSSVLENFVGRDFLPRGSGIVTRRPLVLQLVTSKAEYAEFLHCKGKKFTDFDEVRLEIEAETDRVTGMNKGISSIPINLRVYSPHVLNLTLIDLPGITKVPVGDQPPDIEYQIREMIMQFITRENCLILAVTPANTDLANSDALKLAKEVDPQGLRTIGVITKLDLMDEGTDARDVLENKLLPLRRGYVGVVNRSQKDIDGKKDIKAAMLAERKFFLSHPAYRHIADRMGTPHLQKVLNQQLTNHIRDTLPNFRNKLQGQLLSIEHEVEAYKNFKPEDPTRKTKALLQMVQQFAVDFEKRIEGSGDQVDTLELSGGAKINRIFHERFPFEIVKMEFNEKELRREISYAIKNIHGIRTGLFTPDMAFEAIVKKQIVKLKGPSLKSVDLVIQELINTVKKCTKKLANFPRLCEETERIVANHIREREGKTKDQVLLLIDIQVSYINTNHEDFIGFANAQQRSSQVHKKTTVGNQGTNLPPSRQIVIRKGWLTISNIGIMKGGSKGYWFVLTAESLSWYKDDEEKEKKYMLPLDNLKVRDVEKSFMSSKHIFALFNTEQRNVYKDYRFLELACDSQEDVDSWKASLLRAGVYPDKSVMNKKAENDENGQAENFSMDPQLERQVETIRNLVDSYMSIINKCIRDLIPKTIMHLMINNVKDFINSELLAQLYSSEDQNTLMEESAEQAQRRDEMLRMYQALKEALGIIGDISTATVSTPAPPPVDDSWIQHSRRSPPPSPTTQRRPTLSAPLARPTSGRGPAPAIPSPGPHSGAPPVPFRPGPLPPFPSSSDSFGAPPQVPSRPTRAPPSVPSRRPPPSPTRPTIIRPLESSLLD

SEQ ID NO: 5971 - protein, 1035 aa, Homo sapiens
MRKQEVRTGREAGQGHGTGSPAEQVKALMDLLAGKGSQGSQAPQALDRTPDAPLGPCSNDSRIQRHRKALLSKVGGGPELGGPWHRLASLLLVEGLTDLQLREHDFTQVEATRGGGHPARTVALDRLFLPLSRVSVPPRVSITIGVAGMGKTTLVRHFVRLWAHGQVGKDFSLVLPLTFRDLNTHEKLCADRLICSVFPHVGEPSLAVAVPARALLILDGLDECRTPLDFSNTVACTDPKKEIPVDHLITNIIRGNLFPEVSIWITSRPSASGQIPGGLVDRMTEIRGFNEEEIKVCLEQMFPEDQALLGWMLSQVQADRALYLMCTVPAFCRLTGMALGHLWRSRTGPQDAELWPAALCELYSWYFRMALSGEGQEKGKASPRIEQVAHGGRKMVGTLGRLAFHGLLKKKYVFYEQDMKAFGVDLALLQGAPCSCFLQREETLASSVAYCFTHLSLQEFVAAAYYYGASRRAIFDLFTESGVSWPRLGFLTHFRSAAQRAMQAEDGRLDVFLRFLSGLLSPRVNALLAGSLLAQGEHQAYRTQVAELLQGCLRPDAAVCARAINVLHCLHELQHTELARSVEEAMESGALARLTGPAHRAALAYLLQVSDACAQEANLSLSLSQGVLQSLLPQLLYCRKLRLDTNQFQDPVMELLGSVLSGKDCRIQKISLAENQISNKGAKALARSLLVNRSLTSLDLRGNSIGPQGAKALADALKINRTLTSLSLQGNTVRDDGARSMAEALASNRTLSMLHLQKNSIGPMGAQRMADLKQNRSLKELMFSSNSIGDGGAKALAEALKVNQGLESLDLQSNSISDAGVAALMGALCTNQTLLSLSLRENSISPEGAQAIAHALCANSTLKNLDLQWNFIQAGAAQALGQALQLNRSLTSLDLQENAIGDDGACAVARALKVNTALTALYLQVASIGASGAQVLGEALAVNRTLEILDLRGNAIGVAGAKALANALKVNSSLRRLNLQENSLGMDGAICIATALSGNHRLQHINLQGNHIGDSGARMISEAIKTNAPTCTVEM

SEQ ID NO: 5972 - protein, 927 aa, Homo sapiens
MFWKFDLNTTSHVDKLLDKEHVTLQELMDEDDILQECKAQNQKLLDFLCRQQCMEELVSLITQDPPLDMEEKVRFKYPNTACELLTCDVPQISDRLGGDESLLSLLYDFLDHEPPLNPLLASFFSKTIGNLIARKTEQVITFLKKKDKFISLVLKHIGTSALMDLLLRLVSCVEPAGLRQDVLHWLNEEKVIQRLVELIHPSQDEDRQSNASQTLCDIVRLGRDQGSQLQEALEPDPLLTALESQDCVEQLLKNMFDGDRTESCLVSGTQVLLTLLETRRVGTEGLVDSFSQGLERSYAVSSSVLHGIEPRLKDFHQLLLNPPKKKAILTTIGVLEEPLGNARLHGARLMAALLHTNTPSINQELCRLNTMDLLLDLFFKYTWNNFLHFQVELCIAAILSHAAREERTEASGSESRVEPPHENGNRSLETPQPAASLPDNTMVTHLFQKCCLVQRILEAWEANDHTQAAGGMRRGNMGHLTRIANAVVQNLERGPVQTHISEVIRGLPADCRGRWESFVEETLTETNRRNTVDLAFSDYQIQQMTANFVDQFGFNDEEFADQDDNINAPFDRIAEINFNIDADEDSPSAALFEACCSDRIQPFDDDEDEDIWEDSDTRCAARVMARPRFGAPHASESCSKNGPERGGQDGKASLEAHRDAPGAGAPPAPGKKEAPPVEGDSEAGAMWTAVFDEPANSTPTAPGVVRDVGSSVWAAGTSAPEEKGWAKFTDFQPFCCSESGPRCSSPVDTECSHAEGSRSQGPEKAFSPASPCAWNVCVTRKAPLLASDSSSSGGSHSEDGDQKAASAMDAVSRGPGREAPPLPTVARTEEAVGRVGCADSRLLSPACPAPKEVTAAPAVAVPPEATVAITTALSKAGPAIPTPAVSSALAVAVPLGPIMAVTAAPAMVATLGTVTKDGQMPRQKELP

SEQ ID NO: 5973 - protein, 739 aa, Homo sapiens
MGFSNMEDDGPEEEERVAEPQANFNTPQALRFEELLANLLNEQHQIAKELFEQLKMKKPSAKQQKEVEKVKPQCKEVHQTLILDPAQRKRLQQQMQQHVQLLTQIHLLATCNPNLNPEASSTRICLKELGTFAQSSIALHHQYNPKFQTLFQPCNLMGAMQLIEDFSTHVSIDCSPHKTVKKTANEFPCLPKQVAWILATSKVFMYPELLPVCSLKAKNPQDKILFTKAEDNLLALGLKHFEGTEFLNPLISKYLLTCKTARQLTVRIKNLNMNRAPDNIIKFYKKTKQLPVLGKCCEEIQPHQWKPPIEREEHRLPFWLKASLPSIQEELRHMADGAREVGNMTGTTEINSDQGLEKDNSELGSETRYPLLLPKGVVLKLKPVADRFPKKAWRQKRSSVLKPLLIQPSPSLQPSFNPGKTPAQSTHSEAPPSKMVLRIPHPIQPATVLQTVPGVPPLGVSGGESFESPAALPAMPPEARTSFPLSESQTLLSSAPVPKVMMPSPASSMFRKPYVRRRPSKRRGARAFRCIKPAPVIHPASVIFTVPATTVKIVSLGGGCNMIQPVNAAVAQSPQTIPIATLLVNPTSFPCPLNQPLVASSVSPLIVSGNSVNLPIPSTPEDKAHMNVDIACAVADGENAFQGLEPKLEPQELSPLSATVFPKVEHSPGPPPVDKQCQEGLSENSAYRWTVVKTEEGRQALEPLPQGIQESLNNSSPGDLEEVVKMEPEDATEEISGFL

SEQ ID NO: 5974 - protein, 636 aa, Homo sapiens
MEKAVNDGSHSEELFCHLKTISEKEDLPRCTSESHLSCLKQDILNEKTELEATLKEAELVTHSVELLLPLFKDTIEKINFENANLSALNLKISEQKEILIKELDTFKSVKLALEHLLRKRDYKQTGDNLSSMLLENLTDNESENTNLKKKVFEKEAHIQELSCLFQSEKANTLKANRFSQSVKVVHERLQIQIHKREAENDKLKEYVKSLETKIAKWNLQSRMNKNEAIVMKEASRQKTVALKKASKVYKQRLDHFTGAIEKLTSQIRDQEAKLSETISASNAWKSHYEKIVIEKTELEVQIETMKKQIINLLEDLKKMEDHGKNSCEEILRKVHSIEYENETLNLENTKLKLRFPCRITESKNMNILIVLDMLCYISSEKTTLAALKDEVVSVENELSELQEVEKKQKTLIEMYKTQVQKLQEAAEIVKSRCENLLHKNNQITKTKNKNVEKMRGQMESHLKELERVCDSLTAAERRLHECQESLQCCKGKCADQEHTIRELQGQVDGNHNLLTKLSLEEENCLIQLKCENLQQKLEQMDAENKELEKKLANQEECLKHSNLKFKEKSAEYTALARQLEAALEEGRQKVAEEIEKMSSRESALQIKILDLETELRKKNEEQNQLVCKMNSDPETP

SEQ ID NO: 5975 - protein, 290 aa, Homo sapiens
MAAVEKRRQAVPPPAGFTDSGRQSVSRAAGAAESEEDFLRQVGVTEMLRAALLKVLEARPEEPIAFLAHYFENMGLRSPVNGGAGEPPGQLLLQQQRLGRALWHLRLAHHSQRAAFNNNVSVAYECLSAGGRRKRPGLDGRTYSELLRRICRDGQAPEEVVAPLLRKVQCRDHEAVPLSVFRAGTLTCFVLLEFVARAGALFQLLEDSAAAVADRRVGQAVLDTLEGALQASDAAAPARFLEAGSRLGPDSLALALDRAVGGRRPSAPMTREEFLERAAALFIAKVKPVG

SEQ ID NO: 5976 - protein, 406 aa, Homo sapiens
MADSQLFCVAEERSGHCAVVDGNFLYVWGGYVSIEDNEVYLPNDEIWTYDIDSGLWRMHLMEGELPASMSGSCGACINGKLYIFGGYDDKGYSNRLYFVNLRTRDETYIWEKITDFEGQPPTPRDKLSCWVYKDRLIYFGGYGCRRHSELQDCFDVHDASWEEQIFWGWHNDVHIFDTKTQTWFQPEIKGGVPPQPRAAHTCAVLGNKGYIFGGRVLQTRMNDLHYLNLDTWTWSGRITINGESPKHRSWHTLTPIADDKLFLCGGLSADNIPLSDGWIHNVTTNCWKQLTHLPKTRPRLWHTACLGKENEIMVFGGSKDDLLALDTGHCNDLLIFQTQPYSLLRSCLDCIGKNSIMLESQISLLPPKLLQQVLKKITFWAAANHREEQRVQKEETENKYQWISSN

SEQ ID NO: 5977 - protein, 370 aa, Homo sapiens
MVQPFTTIPFPPPPQNGIPTEYGVPHTQDYAGQTGEHNLTLYGSTQAHGEQSSNSPSTQNGSLTTEGGAQTDGQQSQTQSSENSESKSTPKRLHVSNIPFRFRDPDLRQMFGQFGKILDVEIIFNERGSKGFGFVTFENSADADRAREKLHGTVVEGRKIEVNNATARVMTNKKMVTPYANGWKLSPVVGAVYGPELYAASSFQADVSLGNDAAVPLSGRGGINTYIPLIIPGFPYPTAATTAAAFRGAHLRGRGRTVYGAVRAVPPTAIPAYPGVVYQDGFYGADLYIESANCFRSNRVDMQPTDMHSLLLQPQPPLLQPLQPLTVTVMAGCTQPTPTMPLPLPLAMELALWRVYTEVATADLPPTEVT

SEQ ID NO: 5978 - protein, 176 aa, Homo sapiens
MSEDSEKEDYSDRTISDEDESDEDMFMKFVSEDLHRCALLTADSFGDPFFAATQILLEYQLGRWVPRLREPRDLYGVSSSGPLSPTRWPYHCEVIDEKVQHIDGVSCWSESHQAGAQWCDLGSLQPPPPRFKRFACFSLLSSRDYRRVPPRSANFVFLVETGFHHVGQDGLRLLTS

SEQ ID NO: 5979 - protein, 608 aa, Homo sapiens
MSDKSDLKAELERKKQRLAQIREEKKRKEEERKKKEADMQQKKEPVQDDSDLDRKRRETEALLQSIGISPEPPLVPTPMSPSSKSVSTPSEAGSQDSGDLGPLTRRRLHKLGVSKVTQVDFLPREVVSYSKETQTPLATHQSEEDEEDEEMVESKVGQDSELENQDKKQEVKEAPPRELTEEEKQQILHSEEFLIFFDRTIRVIERALAEDSDIFFDYSGRELEEKDGDVQAGANLSFNRQFYDEHWSKHRVVTCMDWSLQYPELMVASYNNNEDAPHEPDGVALVWNMKFKKTTPEYVFHCQSSVMSVCFARFHPNLVVGGTYSGQIVLWDNRSHRRTPVQRTPLSAAAHTHPVYCVNVVGTQNAHNLITVSTDGKMCSWSLDMLSTPQESMELVYNKSKPVAVTGMAFPTGDVNNFVVGSEEGTVYTACRHGSKAGIGEVFEGHQGPVTGINCHMAVGPIDFSHLFVTSSFDWTVKLWTTKHNKPLYSFEDNADYVYDVMWSPVHPALFACVDGMGRLDLWNLNNDTEVPTASVAIEGASALNRVRWAQAGKEVAVGDSEGRIWVYDVGELAVPHNDEWTRFARTLVEIRANRADSEEEGTVELSA

SEQ ID NO: 5980 - protein, 208 aa, Homo sapiens
MEGAAAPVAGDRPDLGLGAPGSPREAVAGATAALEPRKPHGVKRHHHKHNLKHRYELQETLGKGTYGKVKRATERFSGRVVAIKSIRKDKIKDEQDMVHIRREIEIMSSLNHPHIISIYEVFENKDKIVIIMEYASKGELYDYISERRRLSERETRHFFRQIVSAVHYCHKNGVVHRDLKLKRPSRENQVTTLPQSAVSLRSCWTVMM

SEQ ID NO: 5981 - protein, 328 aa, Homo sapiens
MEVAEPSSPTEEEEEEEEHSAEPRAARSNPEGAEDRAVGAQASVGSRSEGEGEAASADDGSLNTSGAGPKSWQVPPPAPEVQIRTPRVNCPEKVIICLDLSEEMSLPKLESFNGSKTNALNVSQKMIEMFVRTKHKIDKSHEFALVVVNDDTAWLSGLTSDPRELCSCLYDLETASCSTFNLEGLFSLIQQKTELPVTENVQTIPPPYVVRTILVYSRPPCQPQFSLTEPMKKMFQCPYFFFDVVYIHNGTEEKEEEMSWKDMFAFMGSLDTKGTSYKYEVALAGPALELHNCMAKLLAHPLQRPCQSHASYSLLEEEDEAIEVEATV

SEQ ID NO: 5982 - protein, 293 aa, Homo sapiens
MSQPAGGRRKAALGPPVCSIRPFKSSEQYLEAMKEDLAEWLRDLYGLDIDAANFLQVLETGLVLCQHANVVTDAALAFLAEAPAQAQKIPMPRVGVSCNGAAQPGTFQARDNVSNFIQWCRKEMGIQEVLMFETEDLVLRKNVKNVVLCLLELGRRAWRFGVAAPTLVQLEEEIEEEVRRELALPPLPQPGPDGAEPCEPLHVPSAVLHGQSVYVFLGPARQPPKDRLLRAVLGSKGGEASRVDGASVGEEEEEGKEEKEPAAPLESSPQPPEGLQPHWLNQAPLPPEEESWV

SEQ ID NO: 5983 - protein, 517 aa, Homo sapiens; identical to SEQ ID NO: 5333

SEQ ID NO: 5984 - protein, 316 aa, Homo sapiens
MATFVELSTKAKMPIVGLGTWKSPLGKVKEAVKVAIDAGYRHIDCAYVYQNEHEVGEAIQEKIQEKAVKREDLFIVSKLWPTFFERPLVRKAFEKTLKDLKLSYLDVYLIHWPQGFKSGDDLFPKDDKGNAIGGKATFLDAWEAMEELVDEGLVKALGVSNFSHFQIEKLLNKPGLKYKPVTNQVECHPYLTQEKLIQYCHSKGITVTAYSPLGSPDRPWAKPEDPSLLEDPKIKEIAAKHKKTAAQVLIRFHIQRNVIVIPKSVTPARIVENIQVFDFKLSDEEMATILSFNRNWRACNVLQSSHLEDYPFNAEY

SEQ ID NO: 5985 - protein, 2759 aa, Homo sapiens
EPKVVFAKEQPVHREVQAQAGASTTLSCEVAQAQTEVMWYKDGKKLSFSSKVRMEAVGCTRRLVVQQAGQAVAGEYSCEAGSQRLSFHLHVAEPKAVFAKEQPAHREVQAEAGASATLSCEVAQAQTEVTWYKDGKKLSSSLKVHVEAAGCTRRLVVQQAGQADTGEYSCEAGGQQLSFRLQVAEPKAVFAKEQPASREVQAEAGTSATLSCEVAQAQTEVTWYKDGKKLSSSSKVRMEAVGCTRRLVVQEAGQADAGEYSCKAGDQRLSFHLHVAEPKVVFAKEQPAHREVQAEAGASATLSCEVAQAQTEVTWYKDGKKLSSSSKVRVEAVGCTRRLVVQQAGQAEAGEYSCEAGGQQLSFRLQVAEPKAVFAKEQVVFAKDQPVHREVQAEAGTSTMLSCEVAQAQTEVMWYKDGKKLSSSSKMRVEAVGCTRRLVVQEAGQADAGEYSCEAGGQRLSFHLHVAEPKVVFAKEQPACREVQAEAGASATLSCEVAQGQMEVTWYKDGKKLSSSSKVHMEASGYTRRLVVQQAGQADAGEYSCEAGGQRLSFRLHVAELEPQISERPCRREPLVVKEHEDIILTATLATPSAATVTWLKDGVEIRRSKRHETASQGDTHTLTVHGAQVLDSAIYSCRVGAEGQDFPVQVEEVAAKFCRLLEPVCGELGGTVTLACELSPACAEVVWRCGNTQLRVGKRFQMVAEGPVRSLTVLGLRAEDAGEYVCESRDDHTSAQLTVSVPRVVKFMSGLSTVVAEEGGEATFQCVVSPSDVAVVWFRDGALLQPSEKFAISQSGASHSLTISDLVLEDAGQITVEAEGASSSAALRVREAPVLFKKKLEPQTVEERSSVTLEVELTRPWPELRWTRNATALAPGKNVEIHAEGARHRLVLHNVGFADRGFFGCETPDDKTQAKLTVEMRQVRLVRGLQAVEAREQGTATMEVQLSHADVDGSWTRDGLRFQQGPTCHLAVRGPMHTLTLSGLRPEDSGLMVFKAEGVHTSARLVVTELPVSFSRPLQDVVTTEKEKVTLECELSRPNVDVRWLKDGVELRAGKTMAIAAQGACRSLTIYRCEFADQGVYVCDAHDAQSSASVKVQGRTYTLIYRRVLAEDAGEIQFVAENAESRAQLRVKELPVTLVRPLRDKIAMEKHRGVLECQVSRASAQVRWFKGSQELQPGPKYELVSDGLYRKLIISDVHAEDEDTYTCDAGDVKTSAQFFVEEQSITIVRGLQDVTVMEPAPAWFECETSIPSVRPPKWLLGKTVLQAGGNVGLEQEGTVHRLMLRRTCSTMTGPVHFTVGKSRSSARLVVSDIPVVLTRPLEPKTGRELQSVVLSCDFRPAPKAVQWYKDDTPLSPSEKFKMSLEGQMAELRILRLMPADAGVYRCQAGSAHSSTEVTVEAREVTVTGPLQDAEATEEGWASFSCELSHEDEEVEWSLNGMPLYNDSFHEISHKGRRHTLVLKSIQRADAGIVRASSLKVSTSARLEVRVKPVVFLKALDDLSAEERGTLALQCEVSDPEAHVVWRKDGVQLGPSDKYDFLHTAGTRGLVVHDVSPEDAGLYTCHVGSEETRARVRVHDLHVGITKRLKTMEVLEGESCSFECVLSHESASDPAMWTVGGKTVGSSSRFQATRQGRKYILVVREAAPSDAGEVVFSVRGLTSKASLIVRERPAAIIKPLEDQWVAPGEDVELRCELSRAGTPVHWLKDARGSAIRKSQKYDVVCEGTMAMLVIRGASLKDAGEYTCEVEASKSTASLHVEEKANCFTEELTNLQVEEKGTAVFTCKTEHPAATVTWRKGLLELRASGKHQPSQEGLTLRLTISALEKADSDTYTCDIGQAQSRAQLLVQGRRVHIIEDLEDVDVQEGSSATFRCRISPANYEPVHWFLDKTPLHANELNEIDAQPGGYHVLTLRQLALKDSGTIYFEAGDQRASAALRVTEKPSVFSRELTDATITEGEDLTLVCETSTCDIPVCWTKDGKTLRGSARCQLSHEGHRAQLLITGATLQDSGRYKCEAGGACSSSIVRVHARPVRFQEALKDLEVLEGGAATLRCVLSSVAAPVKWCYGNNVLRPGDKYSLRQEGAMLELVVRNLRPQDSGRYSCSFGDQTTSATLTVTALPAQFIGKLRNKEATEGATATLRCELSKAAPVEWRKGSETLRDGDRYCLRQDGAMCELQIRGLAMVDAAEYSCVCGEERTSASLTIRPMPAHFIGRLRHQESIEGATATLRCELSKAAPVEWRKGRESLRDGDRHSLRQDGAVCELQICGLAVADAGEYSCVCGEERTSATLTVKALPAKFTEGLRNEEAVEGATAMLWCELSKVAPVEWRKGPENLRDGDRYILRQEGTRCELQICGLAMADAGEYLCVCGQERTSATLTIRALPARFIEDVKNQEAREGATAVLQCELNSAAPVEWRKGSETLRDGDRYSLRQDGTKCELQIRGLAMADTGEYSCVCGQERTSAMLTVRALPIKFTEGLRNEEATEGATAVLRCELSKMAPVEWWKGHETLRDGDRHSLRQDGARCELQIRGLVAEDAGEYLCMCGKERTSAMLTVRAMPSKFIEGLRNEEATEGDTATLWCELSKAAPVEWRKGHETLRDGDRHSLRQDGSRCELQIRGLAVVDAGEYSCVCGQERTSATLTVRALPARFIEDVKNQEAREGATAVLQCELSKAAPVEWRKGSETLRGGDRYSLRQDGTRCELQIHGLSVADTGEYSCVCGQERTSATLTVRALPARHSRSEDQGGLRRGHSYTAV

SEQ ID NO: 5986 - protein, 482 aa, Homo sapiens
MVMEKPSPLLVGREFVRQYYTLLNKAPEYLHRFYGRNSSYVHGGVDASGKPQEAVYGQNDIHHKVLSLNFSECHTKIRHVDAHATLSDGVVVQVMGLLSNSGQPERKFMQTFVLAPEGSVPNKFYVHNDMFRYEDEVFGDSEPELDEESEDEVEEEQEERQPSPEPVQENANSGYYEAHPVTNGIEEPLEESSHEPEPEPESETKTEELKPQVEEKNLEELEEKSTTPPPAEPVSLPQEPPKAFSWASVTSKNLPPSGTVSSSGIPPHVKAPVSQPRVEAKPEVQSQPPRVREQRPRERPGFPPRGPRPGRGDMEQNDSDNRRIIRYPDSHQLFVGNLPHDIDENELKEFFMSFGNVVELRINTKGVGGKLPNFGFVVFDDSEPVQRILIAKPIMFRGEVRLNVEEKKTRAARERETRGGGDDRRDIRRNDRGPGGPRGIVGGGMMRDRDGRGPPPRGGMAQKLGSGRGTGQMEGRFTGQRR

SEQ ID NO: 5987 - protein, 268 aa, Homo sapiens
MSGRKRSFTFGAYGGVDKSFTSRRSVWRSDGQNQHFPQALDLSRVNLVPSYTPSLYPKNTDLFEMIEKMQGSRMDEQRCSFPPPLKTEEDYIPYPSVHEVLGREGPFPLILLPQFGGYWIEGTNHEITSIPETEPLQSPTTKVKLECNPTARIYRKHFLGKEHFNYYSLDAALGHLVFSLKYDVIGDQEHLRLLLRTKCRTYHDVIPISCLTEFPNVVQMAKLVCEDVNVDRFYPVLYPKASRLIVTFDEHVISNNFKFGVIYQKLGQ

SEQ ID NO: 5988 - protein, 201 aa, Homo sapiens; identical to SEQ ID NO: 5466

SEQ ID NO: 5989 - protein, 568 aa, Homo sapiens
MGLLTFRDVAIEFSLEEWQCLDTAQRNLYKNVILENYRNLVFLGIAVSKQDLITCLEQEKEPLTVKRHEMVNEPPVMCSHFAQEFWPEQNIKDSFEKVTLRRYEKCGNDNFQLKGCKSVDECKLHKGGYNGLNQCLPTMQSKMFQCDKYVKVFNKFSHSDRHKIKHMENKPFKCKECGRSFCMLSHLTRHERNYTKVNFCKCEECEKAVNQSSKLTKHKRIYTCEKLYKCQECDRTFNQFSNLTEYKKDYAREKPYKCEECGKAFNQSSHLTTHKIIHTGEKPYKCEECGKAFNQFSNLTTHKKIHTGEQPYICEECGKAFTQSSTLTTHKRIHTGEKPYKCEECGKAFNRSSKLTEHKNIHTGEQPYKCEECGKAFNRSSNLTEHRKIHTEEKPYKCKECGKAFKHSSALTTHKRIHTGEKPYKCEECGKAFNRSSKLTEHKKLHTGKKPYKCEECGKAFIQSSKLTEHKKIHSGEIPYKCEECGKAFKHSSSLTTHKRIHTGEKPYKCEECGKAFSRSSKLTEHKIIHTGEKPYKCERCDKAFNQSANLTKHKKIHTGEKLQNWNV

SEQ ID NO: 5990 - protein, 460 aa, Homo sapiens
MDSELMHSIVGSYHKPPERVFVPSFTQNEPSQNCHPANLEVTSPKILHSPNSQALILALKTLQEKIHRLELERTQAEDNLNILSREAAQYKKALENETNERNLAHQELIKQKKDISIQLSSAQSRCTLLEKQLEYTKRMVLNVEREKNMILEQQAQLQREKEQDQMKLYAKLEKLDVLEKECFRLTTTQKTAEDKIKHLEEKLKEEEHQRKLFQDKASELQTGLEISKIIMSSVSNLKHSKEKKKSSKKTKCIKRRPPWQICSKFGALPFVAEKMRQHRDPHILQKPFNVTETRCLPKPSRTTSWCKAIPPDSEKSISICDNLSELLMAMQDELDQMSMEHQELLKQMKETESHSVCDDIECELECLLKKMEIKGEQISKLKKHQDSVCKLQQKVQNSKMSEASGIQQEDSYPKGSKNIKNSPRKCLTDTNLFQKNSSFHPIRVHNLQMKLRRDDIMWEQ

SEQ ID NO: 5991 - protein, 610 aa, Homo sapiens
MSQTSLKQKKNEPGMRSSKESLEAEKRKESDKTGVRLSNQMRRAVNPNHSLRCCPFQGHSSCRRCLCAAEGTALGPCHTIRIYIHMCLLWEQGQQITMMRGSQESSLRKTDSRGYLVRSQWSRISRSPSTKAPSIDEPRSRNTSAKLPSSSTSSRTPSTSPSLHDSSPPPLSGQPSLQPPASPQLPRSLDSRPPTPPEPDPGSRRSTKMQENPEAWAQGIVREIRQTRDSQPLEYSRTSPTEWKSSSQRRGIYPASTQLDRNSLSEQQQQQREDEDDYEAAYWASMRSFYEKNPSCSRPWPPKPKNAITIALSSCALFNMVDGRKIYEQEGLEKYMEYQLTNENVILTPGPAFRFVKALQYVNARLRDLYPDEQDLFDIVLMTNNHAQVGVRLINSVNHYGLLIDRFCLTGGKDPIGYLKAYLTNLYIAADSEKVQEAIQEGIASATMFDGAKDMAYCDTQLRVAFDGDAVLFSDESEHFTKEHGLDKFFQYDTLCESKPLAQGPLKGFLEDLGRLQKKFYAKNERLLCPIRTYLVTARSAASSGARVLKTLRRWGLEIDEALFLAGAPKSPILVKIRPHIFFDDHMFHIEGAQRLGSIAAYGFNKKFSS

SEQ ID NO: 5992 - protein, 151 aa, Homo sapiens
MSKNTVSSARFRKVDVDEYDENKFVDEEDGGDGQAGPDEGEVDSCLRQGNMTAALQAALKNPPINTKSQAVKDRAGSIVLKVLISFKANDIEKAVQSLDKNGVDLLMKYIYKGFESPSDNSSAMLLQWHEKALAAGGVGSIVRVLTARKTV

SEQ ID NO: 5993 - protein, 1173 aa, Homo sapiens
MVTVGTNILPSRPAASANTAREDAALFSRRIPPRHKNGAAQPGAAPGPGAPGANMGNAHSKSGDRHSALPGRPELSFYGSFPRKWSENVFLDNELLTSKILSVLRPQSERGFRAGDLRYPTHFLSTNSVLASVTASLKEHPRGTLLSDGSPALSRNVGMTVSQKGGPQPTPSPAGPGTQLGPITGEMDEADSAFLKFKQTADDSLSLTSPNTESIFVEDPYTASLRSEIESDGHEFEAESWSLAVDAAYAKKQKREVVKRQDVLYELMQTEVHHVRTLKIMLKVYSRALQEELQFSSKAIGRLFPCADDLLETHSHFLARLKERRQESLEEGSDRNYVIQKIGDLLVQQFSGENGERMKEKYGVFCSGHNEAVSHYKLLLQQNKKFQNLIKKIGNFSIVRRLGVQECILLVTQRITKYPVLVERIIQNTEAGTEDYEDLTQALNLIKDIISQVDAKVSECEKGQRLREIAGKMDLKSSSKLKNGLTFRKEDMLQRQLHLEGMLCWKTTSGRLKDILAILLTDVLLLLQEKDQKYVFASVDSKPPVISLQKLIVREVANEEKAMFLISASLQGPEMYEIYTSSKEDRNAWMAHIQRAVESCPDEEEGPFSLPEEERKVVEARATRLRDFQERLSMKDQLIAQSLLEKQQIYLEMAEMGGLEDLPQPRGLFRGGDPSETLQGELILKSAMSEIEGIQSLICRQLGSANGQAEDGGSSTGPPRRAETFAGYDCTNSPTKNGSFKKKVSSTDPRPRDWRGPPNSPDLKLSDSDIPGSSEESPQVVEAPGTESDPRLPTVLESELVQRIQTLSQLLLNLQAVIAHQDSYVETQRAAIQEREKQFRLQSTRGNLLLEQERQRNFEKQREERAALEKLQSQLRHEQQRWERERQWQHQELERAGARLQEREGEARQLRERLEQERAELERQRQAYQHDLERLREAQRAVERERERLELLRRLKKQNTAPGALPPDTLAEAQPPSHPPSFNGEGLEGPRVSMLPSGVGPEYAERPEVARRDSAPTENRLAKSDVPIQLLSATNQFQRQAAVQQQIPTKLAASTKGGKDKGGKSRGSQRWESSASFDLKQQLLLNKLMGKDESTSRNRRSLSPILPGRHSPAPPPDPGFPAPSPPPADSPSEGFSLKAGGTALLPGPPAPSPLPATPLSAKEDASKEDVIFF

SEQ ID NO: 5994 - protein, 557 aa, Homo sapiens
MDSTVPSALELPQRLALNPRESPRSPEEEEPHLLSSLAAVQTLASVIRPCYGPHGRQKFLVTMKGETVCTGCATAILRALELEHPAAWLLREAGQTQAENSGDGTAFVVLLTEALLEQAEQLLKAGLPRPQLREAYATATAEVLATLPSLAIQSLGPLEDPSWALHSVMNTHTLSPMDHLTKLVAHACWAIKELDGSFKPERVGVCALPGGTLEDSCLLPGLAISGKLCGQMATVLSGARVALFACPFGPAHPNAPATARLSSPADLAQFSKGSDQLLEKQVGQLAAAGINVAVVLGEVDEETLTLADKYGIVVIQARSWMEIIYLSEVLDTPLLPRLLPPQRPGKCQRVYRQELGDGLAVVFEWECTGTPALTVVLRGATTQGLRSAEQAVYHGIDAYFQLCQDPRLIPGAGATEMALAKMLSDKGSRLEGPSGPAFLAFAWALKYLPKTLAENAGLAVSDVMAEMSGVHQGGNLLMGVGTEGIINVAQEGVWDTLIVKAQGFRAVAEVVLQLVTVDEIVVAKKSPTHQEIWNPDSKKTKKHPPPVETKKILGLNN

SEQ ID NO: 5995 - protein, 312 aa, Homo sapiens
MTRSLFKGNFWSADILSTIGYDNIIQHLNNGRKNCKEFEDFLKERAAIEERYGKDLLNLSRKKPCGQSEINTLKRALEVFKQQVDNVAQCHIQLAQSLREEARKMEEFREKQKLQRKKTELIMDAIHKQKSLQFKKTMDAKKNYEQKCRDKDEAEQAVSRSANLVNPKQQEKLFVKLATSKTAVEDSDKAYMLHIGTLDKVREEWQSEHIKACEAFEAQECERINFFRNALWLHVNQLSQQCVTSDEHPSCMRISTPPRRMQSQQERLQGLTWQGEDPSQFLKAHQMIPITLWLMTTVCSISKINETRAFSG

SEQ ID NO: 5996 - protein, 1232 aa, Homo sapiens
MPRKGTQPSTARRREEGPPPPSPDGASSDAEPEPPSGRTESPATAAETASEELDNRSLEEILNSIPPPPPPAMTNEAGAPRLMITHIVNQNFKSYAGEKILGPFHKRFSCIIGPNGSGKSNVIDSMLFVFGYRAQKIRSKKLSVLIHNSDEHKDIQSCTVEVHFQKIIDKEGDDYEVIPNSNFYVSRTACRDNTSVYHISGKKKTFKDVGNLLRSHGIDLDHNRFLILQGEVEQIAMMKPKGQTEHDEGMLEYLEDIIGCGRLNEPIKVLCRRVEILNEHRGEKLNRVKMVEKEKDALEGEKNIAIEFLTLENEIFRKKNHVCQYYIYELQKRIAEMETQKEKIHEDTKEINEKSNILSNEMKAKNKDVKDTEKKLNKITKFIEENKEKFTQLDLEDVQVREKLKHATSKAKKLEKQLQKDKEKVEEFKSIPAKSNNIINETTTRNNALEKEKEKEEKKLKEVMDSLKQETQGLQKEKESREKELMGFSKSVNEARSKMDVAQSELDIYLSRHNTAVSQLTKAKEALIAASETLKERKAAIRDIEGKLPQTEQELKEKEKELQKLTQEETNFKSLVHDLFQKVEEAKSSLAMNRSRGKVLDAIIQEKKSGRIPGIYGRLGDLGAIDEKYDVAISSCCHALDYIVVDSIDIAQECVNFLKRQNIGVATFIGLDKMAVWAKKMTEIQTPENTPRLFDLVKVKDEKIRQAFYFALRDTLVADNLDQATRVAYQKDRRWRVVTLQGQIIEQSGTMTGGGSKVMKGRMGSSLVIEISEEEVNKMESQLQNDSKKAMQIQEQKVQLEERVVKLRHSEREMRNTLEKFTASIQRLIEQEEYLNVQVKELEANVLATAPDKKKQKLLEENVSAFKTEYDAVAEKAGKVEAEVKRLHNTIVEINNHKLKAQQDKLDKINKQLDECASAITKAQVAIKTADRNLQKAQDSVLRTEKEIKDTEKEVDDLTAELKSLEDKAAEVVKNTNAAEISKISLHPIEDNPIEEISVLSPEDLEAIKNPDSITNQIALLEARCHEMKPNLGAIAEYKKKEELYLQRVAELDKITYERDSFRQAYEDLARGSQRLNEFMAGFYIITNKLKENYQMLTLGGDAELELVDSLDPFSEGIMFSVRPPKKSWKKIFNLSGGEKTLSSLALVFALHHYKPTPLYFMDEIDAALDFKNVSIVAFYIYEQTKNAQFIIISLRNNMFEISDRLIGIYKTYNITKSVAVNPKEIASKGLC

SEQ ID NO: 5997 - protein, 885 aa, Homo sapiens
MELRCGGLLFSSRFDSGNLAHVEKVESLSSDGEGVGGGASALTSGIASSPDYEFNVWTRPDCAETEFENGNRSWFYFSVRGGMPGKLIKINIMNMNKQSKLYSQGMAPFVRTLPTRPRWERIRDRPTFEMTETQFVLSFVHRFVEGRGATTFFAFCYPFSYSDCQELLNQLDQRFPENHPTHSSPLDTIYYHRELLCYSLDGLRVDLLTITSCHGLREDREPRLEQLFPDTSTPRPFRFAGKRIFFLSSRVHPGETPSSFVFNGFLDFILRPDDPRAQTLRRLFVFKLIPMLNPDGVVRGHYRTDSRGVNLNRQYLKPDAVLHPAIYGAKAVLLYHHVHSRLNSQSSSEHQPSSCLPPDAPVSDLEKANNLQNEAQCGHSADRHNAEAWKQTEPAEQKLNSVWIMPQQSAGLEESAPDTIPPKESGVAYYVDLHGHASKRGCFMYGNSFSDESTQVENMLYPKLISLNSAHFDFQGCNFSEKNMYARDRRDGQSKEGSGRVAIYKASGIIHSYTLECNYNTGRSVNSIPAACHDNGRASPPPPPAFPSRYTVELFEQVGRAMAIAALDMAECNPWPRIVLSEHSSLTNLRAWMLKHVRNSRGLSSTLNVGVNKKRGLRTPPKSHNGLPVSCSENTLSRARSFSTGTSAGGSSSSQQNSPQMKNSPSFPFHGSRPAGLPGLGSSTQKVTHRVLGPVREPRSQDRRRQQQPLNHRPAGSLAPSPAPTSSGPASSHKLGSCLLPDSFNIPGSSCSLLSSGDKPEAVMVIGKGLLGTGARMPCIKTRLQARPRLGRGSPPTRRGMKGSSGPTSPTAARESSELELGSCSATPGLPQARPPRPRSAPAFSPISCSLSDSPSWNCYSRGPLGQPEVCFVPKSPPLTVSPRV

SEQ ID NO: 5998 - protein, 1405 aa, Homo sapiens; identical to SEQ ID NO: 5816

SEQ ID NO: 5999 - protein, 435 aa, Homo sapiens
MGDLELLLPGEAEVLVRGLRSFPLREMGSEGWNQQHENLEKLNMQAILDATVSQGEPIQELLVTHGKVPTLVEELIAVEMWKQKVFPVFCRVEDFKPQNTFPIYMVVHHEASIINLLETVFFHKEVCESAEDTVLDLVDYCHRKLTLLVAQSGCGGPPEGEGSQDSNPMQELQKQAELMEFEIALKALSVLRYITDCVDRQWSVSQPPQLAHLKRIQRLHPVCWFLSPGKLQQFEGSRWHTVAPSEQQKLSKLDGQVWIALYNLLLSPEAQARYCLTSFAKGRLLKLRAFLTDTLLDQLPNLAHLQSFLAHLTLTETQPPKKDLVLEQIPEIWERLERENRGKWQAIAKHQLQHVFSPSEQDLRLQARRWAETYRLDVLEAVAPERPRCAYCSAEASKRCSRCQNEWYCCRECQVKHWEKHGKTCVLAAQGDRAK

SEQ ID NO: 6000 - protein, 458 aa, Homo sapiens
MNEAMATDSPRRPSRCTGGVVVRPQAVTEQSYMESVVTFLQDVVPQVYCCGDNIQSYTATVISAAKTLKSGLTMVGKVVTQLTGTLPSGVTEDDVAIHSNSRRSPLVPGIITVIDTETVGEGQVLVSEDSDSDGIVAHFPAHEKPVCCMAFNTSGMLLVTTDTLGHDFHVFQILTHPWSSSQCAVHHLYTLHRGETEAKVQDICFSHDCRWVVVSTLRGTSHVFPINPYGGQPCVRTHMSPRVVNRMSRFQKSAGLEEIEQELTSKQGGRCSPVPGLSSSPSGSPLHGKLNSQDSYNNFTNNNPGNPRLSPLPSLMVVMPLAQIKQPMTLGTITKRTGKVKPPPQISPSKSMGGEFCVAAIFGTSRSWFANNAGLKREKDQSKQVVVESLYIISCYGTLVEHMMEPQPLNGMNCSHRLMQTTLCSSLQMQYSIISSCLLAWFPLEVLGPLLDMGLTTV

SEQ ID NO: 6001 - protein, 102 aa, Homo sapiens
MRASPCISQPAASWHPRPSALRPTAGSGPDTRTPGTVEDGSAPCPAFRSPAVSPCGEEPCCFQISPAEETLELGRLVSPGCHKSSAPQERRLDPRARCVVHI

SEQ ID NO: 6002 - protein, 1407 aa, Homo sapiens; identical to SEQ ID NO: 5616

SEQ ID NO: 6003 - protein, 997 aa, Homo sapiens
RPPPAGPQAPEGARAGSRPVQLLALLSSWCEELGRLLLLRHQKSRQSDPPGKLPMQPPLSSMSSMKPTLSHSDGSFPYDSVPWQQNTNQPPGSLSVVTTVWGVTNTSQSQVLGNPMANANNPMNPGGNPMASGMTTSNPGLNSPQFAGQQQQFSAKAGPAQPYIQQSMYGRPNYPGSGGFGASYPGGPNAPAGMGIPPHTRPPADFTQPAAAAAAAAVAAAAATATATATATVAALQETQNKDINQYGPMGPTQAYNSQFMNQPGPRGPASMGGSMNPASMAAGMTPSGMSGPPMGMNQPRPPGISPFGTHGQRMPQQTYPGPRPQSLPIQNIKRPYPGEPNYGNQQYGPNSQFPTQPGQYPAPNPPRPLTSPNYPGQRMPSQPSSGQYPPPTVNMGQYYKPEQFNGQNNTFSGSSYSNYSQGNVNRPPRPVPVANYPHSPVPGNPTPPMTPGSSIPPYLSPSQDVKPPFPPDIKPNMSALPPPPANHNDELRLTFPVRDGVVLEPFRLEHNLAVSNHVFHLRPTVHQTLMWRSDLELQFKCYHHEDRQMNTNWPASVQVSVNATPLTIERGDNKTSHKPLHLKHVCQPGRNTIQITVTACCCSHLFVLQLVHRPSVRSVLQGLLKKRLLPAEHCITKIKRNFSSVAASSGNTTLNGEDGVEQTAIKVSLKCPITFRRIQLPARGHDCKHVQCFDLESYLQLNCERGTWRCPVCNKTALLEGLEVDQYMWGILNAIQHSEFEEVTIDPTCSWRPVPIKSDLHIKDDPDGIPSKRFKTMSPSQMIMPNVMEMIAALGPGPSPYPLPPPPGGTNSNDYSSQGNNYQGHGNFDFPHGNPGGTSMNDFMHGPPQLSHPPDMPNNMAALEKPLSHPMQETMPHAGSSDQPHPSIQQGLHVPHPSSQSGPPLHHSGAPPPPPSQPPRQPPQAAPSSHPHSDLTFNPSSALEGQAGAQGASDMPEPSLDLLPELTNPDELLSYLDPPDLPSNSNDDLLSLFENN

SEQ ID NO: 6004 - protein, 1134 aa, Homo sapiens
MGKEQELLEAARTGHLPAVEKLLSGKRLSSGFGGGGGGGSGGGGGGSGGGGGGLGSSSHPLSSLLSMWRGPNVNCVDSTGYTPLHHAALNGHKDVVEVLLRNDALTNVADSKGCYPLHLAAWKGDAQIVRLLIHQGPSHTRVNEQNNDNETALHCAAQYGHTEVVKVLLEELTDPTMRNNKFETPLDLAALYGRLEVVKMLLNAHPNLLSCNTKKHTPLHLAARNGHKAVVQVLLDAGMDSNYQTEMGSALHEAALFGKTDVVQILLAAGTDVNIKDNHGLTALDTVRELPSQKSQQIAALIEDHMTGKRSTKEVDKTPPPQPPLISSMDSISQKSQGDVEKAVTELIIDFDANAEEEGPYEALYNAISCHSLDSMASGRSSDQDSTNKEAEAAGVKPAGVRPRERPPPPAKPPPDEEEEDHIDKKYFPLTASEVLSMRPRIHGSAAREEDEHPYELLLTAETKKVVLVDGKTKDHRRSSSSRSQDSAEGQDGQVPEQFSGLLHGSSPVCEVGQDPFQLLCTAGQSHPDGSPQQGACHKASMQLEETGVHAPGASQPSALDQSKRVGYLTGLPTTNSRSHPETLTHTASPHPGGAEEGDRSGARSRAPPTSKPKAELKLSRSLSKSDSDLLTCSPTEDATMGSRSESLSNCSIGKKRLEKSPSFASEWDEIEKIMSSIGEGIDFSQERQKISGLRTLEQSVGEWLESIGLQQYESKLLLNGFDDVHFLGSNVMEEQDLRDIGISDPQHRRKLLQAARSLPKVKALGYDGNSPPSVPSWLDSLGLQDYVHSFLSSGYSSIDTVKNLWELELVNVLKVQLLGHRKRIIASLADRPYEEPPQKPPRFSQLRCQDLLSQTSSPLSQNDSCTGRSADLLLPPGDTGRRRHDSLHDPAAPSRAERFRIQEEHREAKLTLRPPSLAAPYAPVQSWQHQPEKLIFESCGYEANYLGSMLIKDLRGTESTQDACAKMRKSTEHMKKIPTIILSITYKGVKFIDASNKNVIAEHEIRNISCAAQDPEDLCTFAYITKDLQTSHHYCHVFSTVDVNLTYEIILTLGQAFEVAYQLALQAQKSRATGASAAEMIETKSSKPVPKPRVGVRKSALEPPDMDQDAQSHASVSWVVDPKPDSKRSLSTN

SEQ ID NO: 6005 - protein, 1032 aa, Homo sapiens
MEAAAAVVAAEAEVENEDGDSSCGDVCFMDKGLQSISELSLDSTLHAVNLHCNNISKIEAIDHIWNLQHLDLSSNQISRIEGLNTLTKLCTLNLSCNLITKVEGLEELINLTRLNVSYNHIDDLSGLIPLHGIKHKLRYIDLHSNRIDSIHHLLQCMVGLHFLTNLILEKDGDDNPVCRLPGYRAVILQTLPQLRILDCKNIFGEPVNLTEINSSQLQCLEGLLDNLVSSDSPLNISEDEIIDRMPVITAPIDELVPLEQFASTPSDAVLTSFMSVCQSSEPEKNNHENDLQNEIKLQKLDDQILQLLNETSNSIDNVLEKDPRPKRDTDITSESDYGNRKECNRKVPRRSKIPYDAKTIQTIKHHNKNYNSFVSCNRKMKPPYLKELYVSSSLANCPMLQESEKPKTEIIKVDQSHSEDNTYQSLVEQLDQEREKRWRAEQAENKLMDYIDELHKHANEKEDIHSLALLTTDRLKEIIFRERNSKGQLEVMVHKLQNEIKKLTVELMKAKDQQEDHLKHLRTLEKTLEKMERQKRQQQAAQIRLIQEVELKASAADREIYLLRTSLHREREQAQQLHQLLALKEQEHRKELETREFFTDADFQDALAKEIAKEEKKHEQMIKEYQEKIDVLSQQYMDLENEFRIALTVEARRFQDVKDGFENVATELAKSKHALIWAQRKENESSSLIKDLTCMVKEQKTKLAEVSKLKQETAANLQNQINTLEILIEDDKQKSIQIELLKHEKVQLISELAAKESLIFGLRTERKVWGHELAQQGSSLAQNRGKLEAQIESLSRENECLRKTNESDSDALRIKCKIIDDQTETIRKLKDCLQEKDEHIKRLQEKITEIEKCTQEQLDEKSSQLDEVLEKLERHNERKEKLKQQLKGKEVELEEIRKAYSTLNRKWHDKGELLCHLETQVKEVKEKFENKEKKLKAERDKSIELQKNAMEKLHSMDDAFKRQVDAIVEAHQAEIAQLANEKQKCIDSANLKVHQIEKEMRELLEETCKNKKTMEAKIKQLAFALNEIQQDM

SEQ ID NO: 6006 - protein, 72 aa, Homo sapiens
MSYQQQQCKQPCQPPPVCPTPKCPEPCPPPKCPEPCPSPKCPQPCPPQQCQQKYPPVTPSPPCQPKCPPKSK

SEQ ID NO: 6007 - protein, 295 aa, Homo sapiens; identical to SEQ ID NO: 5678

SEQ ID NO: 6008 - protein, 495 aa, Homo sapiens; identical to SEQ ID NO: 5715

SEQ ID NO: 6009 - protein, 524 aa, Homo sapiens
MSSCVSSQPSSNRAAPQDELGGRGSSSIHLGMESFIVVTECEPGCAVDLGLARDRPLEADGQEVPLDTSGSQARPHLSGRKLSLQERSQGGLAAGGSLDMNGRCICPSLPYSPVSSPQSSPRLPRRPTVESHHVSITGMQDCVQLNQYTLKDEIGKGSYGVVKLAYNENDNTYYAMKVLSKKKLIRQAGFPRRPPPRGTRPAPGGCIQPRGPIEQVYQEIAILKKLDHPNVVKLVEVLDDPNEDHLYMVFELVNQGPVMEVPTLKPLSEDQARFYFQDLIKGIEYLHYQKIIHRDIKPSNLLVGEDGHIKIADFGVSNEFKGSDALLSNTVGTPAFMAPESLSETRKIFSGKALDVWAMGVTLYCFVFGQCPFMDERIMCLHSKIKSQALEFPDQPDIAEDLKDLITRMLDKNPESRIVVPEIKLHPWVTRHGAEPLPSEDENCTLVEVTEEEVENSVKHIPSLATVILVKTMIRKRSFGNPFEGSRREERSLSAPGNLLTKQGSEDNLQGTDPPPVGEEEVLL

SEQ ID NO: 6010 - protein, 633 aa, Homo sapiens
MKAIKKSLTEEEYLYLDFSHQTEGCIFPLHTSVTLFLLSYCDCKIFKICLVVTKEVSRDSSLLRDDLIQDVEIQIISRQELPPIVQNCCLPAVVERSDNFCRAGLAVVLRHIIQKSYEADPLKKELLELLGFKKTCLKACAEVSQWTRLCELTIPLAIENFLRESSDQPPTIPVEILQLEKKLSEPVRVHNDDKLRRQKLKQQKADGVGPPLTKGKAKSKVHTQETSEGLDSSSKSLELKVAFSKLTVQEEPATTNREPSHIRKAKASDLPPLEHVFAEGLYFTLADIVLLPCIHHFLVIISRKFSEKLVEFPLLASWYQRIQEVPGVKTAASKCGIQFLHLPKLLTTSTEQHPNLCEVPGVEEQSDPLFIGGPRPTMAKLMEKGIEVMFSPHPCPTWTLDWNVLPAAVSPKEGKMSSDRALRKQQQLNNLVYVVTNQAKPGDRIVDFCSGGGHVGIVLAHMLPSCQVTLIENKELSLIRAKKRSDELGLSNIWFIQANMEYFTGMFNIGVALHACGVATDMVIEHCIKTRASFVTCPCCYGFIQNTSKFNFPKSEQFKKTLSYKEHMILCRFADQTAVQLPPQRRLIGKQCMCLVDLDRARAAEECGYSVQVISMEPESCSPKNNMIVGVPI

SEQ ID NO: 6011 - protein, 172 aa, Homo sapiens
MSSGNYQQSEALSKPTFSEEQASALVESVFGLKVSKVRPLPSYDDQNFHVYVSKTKDGPTEYVLKISNTKASKNPDLIEVQNHIIMFLKAAGFPTASVCHTKGDNTASLVSVDSGSEIKSYLVRLLTYLPGRPIAELPVSPQLLYEIGKLAAKLDKTLQEGKPRVTPLLAKN

SEQ ID NO: 6012 - protein, 978 aa, Homo sapiens
MGWKPSEARGQSQSFQASGLQPRSLKAARRATGRPDRSRAARPTMDPSAHRSRAAPPNMDPDPQAGVQVGMRVVRGVDWKWGQQDGGEGGVGTVVELGRHGSPSTPDRTVVVQWDQGTRTNYRAGYQGAHDLLLYDNAQIGVRHPNIICDCCKKHGLRGMRWKCRVCLDYDLCTQCYMHNKHELAHAFDRYETAHSRPVTLSPRQGLPRIPLRGIFQGAKVVRGPDWEWGSQDGGEGKPGRVVDIRGWDVETGRSVASVTWADGTTNVYRVGHKGKVDLKCVGEAAGGFYYKDHLPRLGKPAELQRRVSADSQPFQHGDKVKCLLDTDVLREMQEGHGGWNPRMAEFIGQTGTVHRITDRGDVRVQFNHETRWTFHPGALTKALGRVGKVVKVFGDGNLRVAVAGQRWTFSPSCLVAYRPEEDANLDVAERARENKSSLSVALDKLRAQKSDPEHPGRLVVEVALGNAARALDLLRRRPEQVDTKNQGRTALQVAAYLGQVELIRLLLQARAGVDLPDDEGNTALHYAALGNQPEATRVLLSAGCRADAINSTQSTALHVAVQRGFLEVVRALCERGCDVNLPDAHSDTPLHSAISAGTGASGIVEVLTEVPNIDVTATNSQGFTLLHHASLKGHALAVRKILARARQLVDAKKEDGFTALHLAALNNHREVAQILIREGRCDVNVRNRKLQSPLHLAVQQAHVGLVPLLVDAGCSVNAEDEEGDTALHVALQRHQLLPLVADGAGGDPGPLQLLSRLQASGLPGSAELTVGAAVACFLALEGADVSYTNHRGRSPLDLAAEGRVLKALQGCAQRFRERQAGGGAAPGPRQTLGTPNTVTNLHVGAAPGPEAAECLVCSELALLVLFSPCQHRTVCEECARRMKKCIRCQVVVSKKLRPDGSEVASAAPAPGPPRQLVEELQSRYRQMEERITCPICIDSHIRLVFQCGHGACAPCGSALSACPICRQPIRDRIQIFV

SEQ ID NO: 6013 - protein, 357 aa, Homo sapiens
MGGAVSAGEDNDDLIDNLKEAQYIRTERVEQAFRAIDRGDYYLEGYRDNAYKDLAWKHGNIHLSAPCIYSEVMEALKLQPGLSFLNLGSGTGYLSTMVGLILGPFGINHGIELHSDVVEYAKEKLESFIKNSDSFDKFEFCEPAFVVGNCLQIASDSHQYDRIYCGAGVQKDHENYMKILLKVGGILVMPIEDQLTQIMRTGQNTWESKNILAVSFAPLVQPSKNDNGKPDSVGLPPCAVRNLQDLARIYIRRTLRNFINDEMQAKGIPQRAPPKRKRKRVKQRINTYVFVGNQLIPQPLDSEEDEKMEEDNKEEEEKDHNEAMKPEEPPQNLLREKIMKLPLPESLKAYLTYFRDK

SEQ ID NO: 6014 - protein, 210 aa, Homo sapiens
MSCPNYCSGNSNSGSLRTSRHIPLTSIDLCPTSVSCGDVLYLPTSSQDHTWVTDNCQETCGEPTSCQPVHCETGNLETSCGSSTAYYVPRPCQGSSFLPASFFSSSCLPVSCRPQRYVSSGCRPLRPLLNSYQPIGDCVPNAYRPQFCLSKSCQPQNLLTSGCQPSSCLAYRPQSLHVVSSSLRPLGPLFSGCQPLTHVFSTCRPSCSGL

SEQ ID NO: 6015 - protein, 201 aa, Homo sapiens
MASGDDSPIFEDDESPPYSLEKMTDLVAVWDVALSDGVHKIEFEHGTTSGKRVVYVDGKEEIRKEWMFKLVGKETFYVGAAKTKATINIDAISGFAYEYTLEINGKSLKKYMEDRSKTTNTWVLHMDGENFRIVLEKDAMDVWCNGKKLETAGEFVDDGTETHFSIGNHDCYIKAVSSGKRKEGIIHTLIVDNREIPEIAS

SEQ ID NO: 6016 - protein, 1129 aa, Homo sapiens
MPATRKPMRYGHTEGHTEVCFDDSGSFIVTCGSDGDVRIWEDLDDDDPKFINVGEKAYSCALKSGKLVTAVSNNTIQVHTFPEGVPDGILTRFTTNANHVVFNGDGTKIAAGSSDFLVKIVDVMDSSQQKTFRGHDAPVLSLSFDPKDIFLASASCDGSVRVWQISDQTCAISWPLLQKCNDVINAKSICRLAWQPKSGKLLAIPVEKSVKLYRRESWSHQFDLSDNFISQTLNIVTWSPCGQYLAAGSINGLIIVWNVETKDCMERVKHEKGYAICGLAWHPTCGRISYTDAEGNLGLLENVCDPSGKTSSSKVSSRVEKDYNDLFDGDDMSNAGDFLNDNAVEIPSFSKGIINDDEDDEDLMMASGRPRQRSHILEDDENSVDISMLKTGSSLLKEEEEDGQEGSIHNLPLVTSQRPFYDGPMPTPRQKPFQSGSTPLHLTHRFMVWNSIGIIRCYNDEQDNAIDVEFHDTSIHHATHLSNTLNYTIADLSHEAILLACESTDELASKLHCLHFSSWDSSKEWIIDLPQNEDIEAICLGQGWAAAATSALLLRLFTIGGVQKEVFSLAGPVVSMAGHGEQLFIVYHRGTGFDGDQCLGVQLLELGKKKKQILHGDPLPLTRKSYLAWIGFSAEGTPCYVDSEGIVRMLNRGLGNTWTPICNTREHCKGKSDHYWVVGIHENPQQLRCIPCKGSRFPPTLPRPAVAILSFKLPYCQIATEKGQMEEQFWRSVIFHNHLDYLAKNGYEYEESTKNQATKEQQELLMKMLALSCKLEREFRCVELADLMTQNAVNLAIKYASRSRKLILAQKLSELAVEKAAELTATQVEEEEEEEDFRKKLNAGYSNTATEWSQPRFRNQVEEDAEDSGEADDEEKPEIHKPGQNSFSKSTNSSDVSAKSGAVTFSSQGRVNPFKVSASSKEPAMSMNSARSTNILDNMGKSSKKSTALSRTTNNEKSPIIKPLIPKPKPKQASAASYFQKRNSQTNKTEEVKEENLKNVLSETPAICPPQNTENQRPKTGFQMWLEENRSNILSDNPDFSDEADIIKEGMIRFRVLSTEERKVWANKAKGETASEGTEAKKRKRVVDESDETENQEEKAKENLNLSKKQKPLDFSTNQKLSAFAFKQE

SEQ ID NO: 6017 - protein, 491 aa, Homo sapiens
SGSSHSFPGSLEVTALMTTWSSLQGSHVSKRALAYALVVTNCQERIQHWKKVDNDYNALRERLSTLPDKLSYNIMVPFGPFAFMPGKLVHTNEVTVLLGDNWFAKCSAKQAVGLVEHRKEHVRKTIDDLKKVMKNFESRVEFTEDLQKMSDAAGDIVDIREEIKCDFEFKAKHRIAHKPHSKPKTSDIFEADIANDVKSKDLLADKELWARLEELERQEELLGELDSKPDTVIANGEDTTSSEEEKEDRNTNVNAMHQVTDSHTPCHKDVASSEPFSGQVNSQLNCSVNGSSSYHSDDDDDDDDDDDDDNIDDDDGDNDHEALGVGDNSIPTIYFSHTVEPKRVRINTGKNTTLKFSEKKEEAKRKRKNSTGSGHSAQELPTIRTPADIYRAFVDVVNGEYVPRKSILKSRSRENSVCSDTSESSAAEFDDRRGVLRSISCEEATCSDTSESILEEEPQENQKKLLPLSVTPEVLRLVGYSRNLAPLNVIL

SEQ ID NO: 6018 - protein, 326 aa, Homo sapiens
MLLSKFGSLAHLCGPGGVDHLPVKILQPAKADKESFEKAYQVGAVLGSGGFGTVYAGSRIADGLPVAVKHVVKERVTEWGSLGGATVPLEVVLLRKVGAAGGARGVIRLLDWFERPDGFLLVLERPEPAQDLFDFITERGALDEPLARRFFAQVLAAVRHCHSCGVVHRDIKDENLLVDLRSGELKLIDFGSGALLKDTVYTDFDGTRVYSPPEWIRYHRYHGRSATVWSLGVLLYDMVCGDIPFEQDEEILRGRLLFRRRVSPECQQLIRWCLSLRPSERPSLDQIAAHPWMLGADGGVPESCDLRLCTLDPDDVASTTSSSESL

SEQ ID NO: 6019 - protein, 959 aa, Homo sapiens
MAASTGYVRLWGAARCWVLRRPMLAAAGGRVPTAAGAWLLRGQRTCDASPPWALWGRGPAIGGQWRGFWEASSRGGGAFSGGEDASEGGAEEGAGGAGGSAGAGEGPVITALTPMTIPDVFPHLPLIAITRNPVFPRFIKIIEVKNKKLVELLRRKVRLAQPYVGVFLKRDDSNESDVVESLDEIYHTGTFAQIHEMQDLGDKLRMIVMGHRRVHISRQLEVEPEEPEAENKHKPRRKSKRGKKEAEDELSARHPAELAMEPTPELPAEVLMVEVENVVHEDFQVTEEVKALTAEIVKTIRDIIALNPLYRESVLQMMQAGQRVVDNPIYLSDMGAALTGAESHELQDVLEETNIPKRLYKALSLLKKEFELSKLQQRLGREVEEKIKQTHRKYLLQEQLKIIKKELGLEKDDKDAIEEKFRERLKELVVPKHVMDVVDEELSKLGLLDNHSSEFNVTRNYLDWLTSIPWGKYSNENLDLARAQAVLEEDHYGMEDVKKRILEFIAVSQLRGSTQGKILCFYGPPGVGKTSIARSIARALNREYFRFSVGGMTDVAEIKGHRRTYVGAMPGKIIQCLKKTKTENPLILIDEVDKIGRGYQGDPSSALLELLDPEQNANFLDHYLDVPVDLSKVLFICTANVTDTIPEPLRDRMEMINVSGYVAQEKLAIAERYLVPQARALCGLDESKAKLSSDVLTLLIKQYCRESGVRNLQKQVEKVLRKSAYKIVSGEAESVEVTPENLQDFVGKPVFTVERMYDVTPPGVVMGLAWTAMGGSTLFVETSLRRPQDKDAKGDKDGSLEVTGQLGEVMKESARIAYTFARAFLMQHAPANDYLVTSHIHLHVPEGATPKDGPSAGCTIVTALLSLAMGRPVRQNLAMTGEVSLTGKILPVGGIKEKTIAAKRAGVTCIVLPAENKKDFYDLAAFITEGLEVHFVEHYREIFDIAFPDEQAEALAVER

SEQ ID NO: 6020 - protein, 400 aa, Homo sapiens
MNPASAPPPLPPPGQQVIHVTQDLDTDLEALFNSVMNPKPSSWRKKILPESFFKEPDSGSHSRQSSTDSSGGHPGPRLAGGAQHVRSHSSPASLQLGTGAGAAGSPAQQHAHLRQQSYDVTDELPLPPGWEMTFTATGQRYFLNHIEKITTWQDPRKAMNQPLNHMNLHPAVSSTPVPQRSMAVSQPNLVMNHQHQQQMAPSTLSQQNHPTQNPPAGLMSMPNALTTQQQQQQKLRLQRIQMERERIRMRQEELMRQEAALCRQLPMEAETLAPVQAAVNPPTMTPDMRSITNNSSDPFLNGGPYHSREQSTDSGLGLGCYSVPTTPEDFLSNVDEMDTGENAGQTPMNINPQQTRFPDFLDCLPGTNVDLGTLESEDLIPLFNDVESALNKSEPFLTWL

SEQ ID NO: 6021 - protein, 873 aa, Homo sapiens
MEVLREKVEEEEEAEREEAAEWAEWARMEKMMRPVEVRKEEITLKQETLRDLEKKLSEIQITVSAELPAFTKDTIDISKLPISYKTNTPKEEHLLQVADNFSRQYSHLCPDRVPLFLHPLNECEVPKFVSTTLRPTLMPYPELYNWDSCAQFVSDFLTMVPLPDPLKPPSHLYSSTTVLKYQKGNCFDFSTLLCSMLIGSGYDAYCVNGYGSLDLCHMDLTREVCPLTVKPKETIKKEEKVLPKKYTIKPPRDLCSRFEQEQEVKKQQEIRAQEKKRLREEEERLMEAEKAKPDALHGLRVHSWVLVLSGKREVPENFFIDPFTGHSYSTQDEHFLGIESLWNHKNYWINMQDCWNCCKDLIFDLGDPVRWEYMLLGTDKSQLSLTEEDDSGINDEDDVENLGKEDEDKSFDMPHSWVEQIEISPEAFETRCPNGKKVIQYKRAKLEKWAPYLNSNGLVSRLTTYEDLQCTNILEIKEWYQNREDMLELKHINKTTDLKTDYFKPGHPQALRVHSYKSMQPEMDRVIEFYETARVDGLMKREETAAMTEYYQGRPDFLSYRHASFGPRVKKLTLSSAESNPRPIVKITERFFRNPAKPAEEDVAERVFLVAEERIQLRYHCREDHITASKREFLRRTEVDSKGNKIIMTPDMCISFEVEPMEHTKKLLYQYEAMMHLKREEKLSRHQVWESELEVLEILKLREEEEAAHTLTISIYDTKRNEKSKEYREAMERMMHEEHLRQVETQLDYLAPFLAQLPPGEKLTCWQAVRLKDECLSDFKQRLINKANLIQARFEKETQELQKKQQWYQENQVTLTPEDEDLYLSYCSQAMFRIRILEQRLNRHKELAPLKYLALEEKLYKDPRLGELQKIFA

SEQ ID NO: 6022 - protein, 616 aa, Homo sapiens
MDVMLENYCHLISVGCHMTKPDVILKLERGEEPWTSFAGHTCLEENWKAEDFLVKFKEHQEKYSRSVVSINHKKLVKEKSKIYEKTFTLGKNPVNSKNLPPEYDTHGRILKNVSELIISNLNPARKRLSEYNGYGKSLLSTKQETTHPEVKSHNQSARAFSHNEVLMQYQKTETPAQSFGYNDCEKSFLQRGGLITHSRPYKGENPSVYNKKRRATNIEKKHTCNECGKSFCRKSVLILHQGIHSEEKPYQCHQCGNAFRRKSYLIDHQRTHTGEKPFVCNECGKSFRLKTALTDHQRTHTGEKSYECLQCRNAFRLKSHLIRHQRTHTGEKPYECNDCGKSFRQKTTLSLHQRIHTGEKPYICKECGKSFHQKANLTVHQRTHTGEKPYICNECGKSFSQKTTLALHEKTHNEEKPYICSECGKSFRQKTTLVAHQRTHTGEKSYECPHCGKAFRMKSYLIDHHRTHTGEKPYECNECGKSFSQKTNLNLHQRIHTGEKPYVCNECGKSFRQKATLTVHQKIHTGQKSYECPQCGKAFSRKSYLIHHQRTHTGEKPYKCSECGKCFRQKTNLIVHQRTHTGEKPYVCNECGKSFSYKRNLIVHQRTHKGENIEMQ

SEQ ID NO: 6023 - protein, 146 aa, Homo sapiens
MCHTSCSSGCQPACCAPSPCQPACCVPSSCQASCCVPVGCQSSVCVPVSFKPAVCLPVSCQSSVCVPMSFKSAVCVPVSCQSSVCVPVSCRPIVCAAPSCQSSLCVPVSCRPVVYAAPSCQSSGCCQPSCTSVLCRPISYSISSCC

SEQ ID NO: 6024 - protein, 418 aa, Homo sapiens; identical to SEQ ID NO: 5718

SEQ ID NO: 6025 - protein, 1116 aa, Homo sapiens
MYGSARSVGKVEPSSQSPGRSPRLPRSPRLGHRRTNSTGGSSGSSVGGGSGKTLSMENIQSLNAAYATSGPMYLSDHENVGSETPKSTMTLGRSGGRLPYGVRMTAMGSSPNIASSGVASDTIAFGEHHLPPVSMASTVPHSLRQARDNTIMDLQTQLKEVLRENDLLRKDVEVKESKLSSSMNSIKTFWSPELKKERALRKDEASKITIWKEQYRVVQEENQHMQMTIQALQDELRIQRDLNQLFQQDSSSRTGEPCVAELTEENFQRLHAEHERQAKELFLLRKTLEEMELRIETQKQTLNARDESIKKLLEMLQSKGLSAKATEEDHERTRRLAEAEMHVHHLESLLEQKEKENSMLREEMHRRFENAPDSAKTKALQTVIEMKDSKISSMERGLRDLEEEIQMLKSNGALSTEEREEEMKQMEVYRSHSKFMKNKVEQLKEELSSKEAQWEELKKKAAGLQAEIGQVKQELSRKDTELLALQTKLETLTNQFSDSKQHIEVLKESLTAKEQRAAILQTEVDALRLRLEEKETMLNKKTKQIQDMAEEKGTQAGEIHDLKDMLDVKERKVNVLQKKIENLQEQLRDKEKQMSSLKERVKSLQADTTNTDTALTTLEEALAEKERTIERLKEQRDRDEREKQEEIDNYKKDLKDLKEKVSLLQGDLSEKEASLLDLKEHASSLASSGLKKDSRLKTLEIALEQKKEECLKMESQLKKAHEAALEARASPEMSDRIQHLEREITRYKDESSKAQAEVDRLLEILKEVENEKNDKDKKIAELERQVKDQNKKVANLKHKEQVEKKKSAQMLEEARRREDNLNDSSQQLQDSLRKKDDRIEELEEALRESVQITAEREMVLAQEESARTNAEKQVEELLMAMEKVKQELESMKAKLSSTQQSLAEKETHLTNLRAERRKHLEEVLEMKQEALLAAISEKDANIALLELSSSKKKTQEEVAALKREKDRLVQQLKQQTQNRMKLMADNYEDDHFKSSHSNQTNHKPSPDQIIQPLLELDQNRSKLKLYIGHLTTLCHDRDPLILRGLTPPASYNLDDDQAAWENELQKMTRGQLQDELEKGERDNAELQEFANAILQQIADHCPDILEQVVNALEESS

SEQ ID NO: 6026 - protein, 1024 aa, Homo sapiens
MNFIKDNSRALIQRMGMTVIKQITDDLFVWNVLNREEVNIICCEKVEQDAARGIIHMILKKGSESCNLFLKSLKEWNYPLFQDLNGQSLFHQTSEGDLDDLAQDLKDLYHTPSFLNFYPLGEDIDIIFNLKSTFTEPVLWRKDQHHHRVEQLTLNGLLQALQSPCIIEGESGKGKSTLLQRIAMLWGSGKCKALTKFKFVFFLRLSRAQGGLFETLCDQLLDIPGTIRKQTFMAMLLKLRQRVLFLLDGYNEFKPQNCPEIEALIKENHRFKNMVIVTTTTECLRHIRQFGALTAEVGDMTEDSAQALIREVLIKELAEGLLLQIQKSRCLRNLMKTPLFVVITCAIQMGESEFHSHTQTTLFHTFYDLLIQKNKHKHKGVAASDFIRSLDHCGDLALEGVFSHKFDFELQDVSSVNEDVLLTTGLLCKYTAQRFKPKYKFFHKSFQEYTAGRRLSSLLTSHEPEEVTKGNGYLQKMVSISDITSTYSSLLRYTCGSSVEATRAVMKHLAAVYQHGCLLGLSIAKRPLWRQESLQSVKNTTEQEILKAININSFVECGIHLYQESTSKSALSQEFEAFFQGKSLYINSGNIPDYLFDFFEHLPNCASALDFIKLDFYGGAMASWEKAAEDTGGIHMEEAPETYIPSRAVSLFFNWKQEFRTLEVTLRDFSKLNKQDIRYLGKIFSSATSLRLQIKRCAGVAGSLSLVLSTCKNIYSLMVEASPLTIEDERHITSVTNLKTLSIHDLQNQRLPGGLTDSLGNLKNLTKLIMDNIKMNEEDAIKLAEGLKNLKKMCLFHLTHLSDIGEGMDYIVKSLSSEPCDLEEIQLVSCCLSANAVKILAQNLHNLVKLSILDLSENYLEKDGNEALHELIDRMNVLEQLTALMLPWGCDVQGSLSSLLKHLEEVPQLVKLGLKNWRLTDTEIRILGAFFGKNPLKNFQQLNLAGNRVSSDGWLAFMGVFENLKQLVFFDFSTKEFLPDPALVRKLSQVLSKLTFLQEARLVGWQFDDDDLSVITGAFKLVTA

SEQ ID NO: 6027 - protein, 354 aa, Homo sapiens
MAESPTEEAATAGAGAAGPGASSVAGVVGVSGSGGGFGPPFLPDVWAAAAAAGGAGGPGSGLAPLPGLPPSAAAHGAALLSHWDPTLSSDWDGERTAPQCLLRIKRDIMSIYKEPPPGMFVVPDTVDMTKIHALITGPFDTPYEGGFFLFVFRCPPDYPIHPPRVKLMTTGNNTVRFNPNFYRNGKVCLSILGTWTGPAWSPAQSISSVLISIQSLMTENPYHNEPGFEQERHPGDSKNYNECIRHETIRVAVCDMMEGKCPCPEPLRGVMEKSFLEYYDFYEVACKDRLHLQGQTMQDPFGEKRGHFDYQSLLMRLGLIRQKVLERLHNENAEMDSDSSSSGTETDLHGSLRV

SEQ ID NO: 6028 - protein, 827 aa, Homo sapiens
MDSEAFQSARDFLDMNFQSLAMKHMDLKQMELDTAAAKVDELTKQLESLWSDSPAPPGPQAGPPSRPPRYSSSSIPEPFGSRGSPRKAATDGADTPFGRSESAPTLHPYSPLSPKGRPSSAAPLYLQPDAYGSLDRATSPRPRAFDGAGSSLGRAPSPRPGPGPLRQQGPPTPFDFLGRAGSPRGSPLAEGPQAFFPERGPSPRPPATAYDAPASAFGSSLLGSGGSAFAPPLRAQDDLTLRRRPPKAWNESDLDVAYEKKPSQTASYERLDVFARPASPSLQLLPWRESSLDGLGGTGKDNLTSATLPRNYKVSPLASDRRSDAGSYRRSLGSAGPSGTLPRSWQPVSRIPMPPSSPQPRGAPRQRPIPLSMIFKLQNAFWEHGASRAMLPGSPLFTRAPPPKLQPQPQPQPQPQSQPQPQLPPQPQTQPQTPTPAPQHPQQTWPPVNEGPPKPPTELEPEPEIEGLLTPVLEAGDVDEGPVARPLSPTRLQPALPPEAQSVPELEEVARVLAEIPRPLKRRGSMEQAPAVALPPTHKKQYQQIISRLFHRHGGPGPGGPEPELSPITEGSEARAGPPAPAPPAPIPPPAPSQSSPPEQPQSMEMRSVLRKAGSPRKARRARLNPLVLLLDAALTGELEVVQQAVKEMNDPSQPNEEGITALHNAICGANYSIVDFLITAGANVNSPDSHGWTPLHCAASCNDTVICMALVQHGAAIFATTLSDGATAFEKCDPYREGYADCATYLADVEQSMGLMNSGAVYALWDYSAEFGDELSFREGESVTVLRRDGPEETDWWWAALHGQEGYVPRNYFGLFPRVKPQRSKV

SEQ ID NO: 6029 - protein, 376 aa, Homo sapiens
MVVEVDSMPAASSVKKPFGLRSKMGKWCCRCFPCCRESGKSNVGTSGDHDDSAMKTLRSKMGKWCRHCFPCCRGSGKSNVGASGDHDDSAMKTLRNKMGKWCCHCFPCCRGSSKSKVGAWGDYDDSAFMEPRYHVRGEDLDKLHRAAWWGKVPRKDLIVMLRDTDVNKQDKQKRTALHLASANGNSEVVKLLLDRRCQLNVLDNKKRTALIKAVQCQEDECALMLLEHGTDPNIPDEYGNTTLHYAIYNEDKLMAKALLLYGADIESKNKHGLTPLLLGVHEQKQQVVKFLIKKKANLNALDRYGRTALILAVCCGSASIVSLLLEQNIDVSSQDLSGQTAREYAVSSHHHVICQLLSDYKEKQMLKISSENSNPG

SEQ ID NO: 6030 - protein, 254 aa, Homo sapiens
MPASFPMLRCARSPCWTVCWSPWCRALPDGRCSCLSSPPSPLGPTRDPVATFLETCREPGSQPAGPASLRAEYLPPSVASIKVSAELLRAALKDGHSGVPLCCATLQWLLAENAAVDVVRARALSSIQGVAPDGANVHLIVREVAMTDLCPAGPIQAVEIQVESSSLADICRAHHAVVGRMQTMVTEQATQGSSAPDLRVQYLRQIHANHETLLREVQTLRDRLCTEDEASSCATAQRLLQVYRQLRHPSLILL

SEQ ID NO: 6031 - protein, 680 aa, Homo sapiens
MCGIFAYLNYHVAARREILETLIKGLQRLEYRGYDSAGVGFDGGNDKDWEANACKIQLIKKKGKVKALDEEVHKQQDMDLDIEFDVHLGIAHTRWATHGEPSPVNSHPQRSDKNNEFIVIHNGIITNYKDLKKFLESKGYDFESETDTETIAKLVKYMYDNRESQDTSFTTLVERVIQQLEGAFALVFKSVHFPGQAVGTRRGSPLLIGVRSEHKLSTDHIPILYRTGKDKKGSCNLSRVDSTTCLFPVEEKAVEYYFASDASAVIEHTNRVIFLEDDDVAAVVDGRLSIHRIKRTAGDHPGRAVQTLQMELQQIMKGNFSSFMQKEIFEQPESVVNTMRGRVNFDDYTVNLGGLKDHIKEIQRCRRLILIACGTSYHAGVATRQVLEELTELPVMVELASDFLDRNTPVFRDDVCFFLSQSGETADTLMGLRYCKERGALTVGITNTVGSSISRETDCGVHINAGPEIGVASTKAYTSQFVSLVMFALMMCDDRISMQERRKEIMLGLKRLPDLIKEVLSMDDEIQKLATELYHQKSVLIMGRGYHYATCLEGALKIKEITYMHSEGILAGELKHGPLALVDKLMPVIMIIMRDHTYAKCQNALQQVVARQGRPVVICDKEDTETIKNTKRTIKVPHSVDCLQGILSVIPLQLLAFHLAVLRGYDVDFPRNLAKSVTVE

SEQ ID NO: 6032 - protein, 165 aa, Homo sapiens
MEDLFETFQDEMGFSNMEDDGPEEEERVAEPQANFNTPQALRFEELLANLLNEQHQIAKELFEQLKMKKPSAKQQKEVEKVKPQCKEVHQTLILDPAQRKRLQQQMQQHVQLLTQIHLLATCNPNLNPEASSTRICLSWEPLLKAPSPFTISTTPSFRPCSNPVT

SEQ ID NO: 6033 - protein, 210 aa, Homo sapiens
MAASVEQREGTIQVQGQALFFREALPGSGQARFSVLLLHGIRFSSETWQNLGTLHRLAQAGYRAVAIDLPGLGHSKEAAAPAPIGELAPGSFLAAVVDALELGPPVVISPSLSGMYSLPFLTAPGSQLPGFVPVAPICTDKINAANYASVKTPALIVYGDQDPMGQTSFEHLKQLPNHRVLIMKGAGHPCYLDKPEEWHTGLLDFLQGLQ

SEQ ID NO: 6034 - protein, 415 aa, Homo sapiens
MRAADSGSWERVRQLAAQGEPAPSCGAGAGPARPPGPAACEQCVDAAGPGDRPRAGVPRVRADGDCSQPVLLREEVSRLQEEVHLLRQMKEMLAKDLEESQGGKSSEVLSATELRVQLAQKEQELARAKEALQAMKADRKRLKGEKTDLVSQMQQLYATLESREEQLRDFIRNYEQHRKESEDAVKALAKEKDLLEREKWELRRQAKEATDHATALRSQLDLKDNRMKELEAELAMAKQSLATLTKDVPKRHSLAMPGETVLNGNQEWVVQADLPLTAAIRQSQQTLYHSHPPHPADRQAVRVSPCHSRQPSVISDASAAEGDRSSTPSDINSPRHRTHSLCNGDSPGPVQKNLHNPIVQSLEDLEDQKRKKKKEKMGFGSISRVFARGKQRKSLDPGLFDGTAPDYYIEEDADW

SEQ ID NO: 6035 - protein, 230 aa, Homo sapiens
MEAAETEAEAAALEVLAEVAGILEPVGLQEEAELPAKILVEFVVDSQKKDKLLCSQLQVADFLQNILAQEDTAKGLDPLASEDTSRQKAIAAKEQWKELKATYREHVEAIKIGLTKALTQMEEAQRKRTQLREAFEQLQAKKQMAMEKRRAVQNQWQLQQEKHLQHLAEVSAEGKLLFPEAEAEAENLPDDKPQQPTRPQEQSTGDTMGRDPGVSFKAVGLQPAGDVNLP

SEQ ID NO: 6036 - protein, 848 aa, Homo sapiens
MQAEAADWFSSMPFQKHVYYPLASGPEGPDVAVAAAAAGAASMACAPPSAASGPLPFFQFRPRLESVDWRRLSAIDVDKVAGAVDVLTLQENIMNITFCKLEDEKCPHCQSGVDPVLLKLIRLAQFTIEYLLHSQEFLTSQLHTLEERLRLSHCDGEQSKKLLTKQAGEIKTLKEECKRRKKMISTQQLMIEAKANYYQCHFCDKAFMNQAFLQSHIQRRHTEENSHFEYQKNAQIEKLRSEIVVLKEELQLTRSELEAAHHASAVRFSKEYEMQKTKEEDFLKLFDRWKEEEKEKLVDEMEKVKEMFMKEFKELTSKNSALEYQLSEIQKSNMQIKSNIGTLKDAHEFKEDRSPYPQDFHNVMQLLDSQESKWTARVQAIHQEHKKEKGRLLSHIEKLRTSMIDDLNASNVFYKKRIEELGQRLQEQNELIITQRQQIKDFTCNPLNSISEPKVNAPALHTLETKSSLPMVHEQAFSSHILEPIEELSEEEKGRENEQKLNNNKMHLRKALKSNSSLTKGLRTMVEQNLMEKLETLGINADIRGISSDQLHRVLKSVESERHKQEREIPNFHQIREFLEHQVSCKIEEKALLSSDQCSVSQMDTLSTGEVPKMIQLPSKNRQLIRQKAVSTDRTSVPKIKKNVMEDPFPRKSSTITTPPFSSEEEQEDDDLIRAYASPGPLPVPPPQNKGSFGKNTVKSDADGTEGSEIEDTDDSPKPAGVAVKTPTEKVEKMFPHRKNVNKPVGGTNVPEMFIKKEELQELKCADVEDEDWDISSLEEEISLGKKSGKEQKEPPPAKNEPHFAHVLNAWGAFNPKGPKGEGLQENESSTLKSSLVTVTDWSDTSDV

SEQ ID NO: 6037 - protein, 394 aa, Homo sapiens
MVVEVDSMPAASSVKKPFGLRSKMGKWCCRCFPCCRESGKSNVGTSGDHDDSAMKTLRSKMGKWCRHCFPCCRGSGKSNVGASGDHDDSAMKTLRNKMGKWCCHCFPCCRGSSKSKVGAWGDYDDSAFMEPRYHVRGEDLDKLHRAAWWGKVPRKDLIVMLRDTDVNKQDKQKRTALHLASANGNSEVVKLLLDRRCQLNVLDNKKRTALIKVCSSQLYQHEAVQCQEDECALMLLEHGTDPNIPDEYGNTTLHYAIYNEDKLMAKALLLYGADIESKNKHGLTPLLLGVHEQKQQVVKFLIKKKANLNALDRYGRTALILAVCCGSASIVSLLLEQNIDVSSQDLSGQTAREYAVSSHHHVICQLLSDYKEKQMLKISSENSNPENVSRTRNK

SEQ ID NO: 6038 - protein, 435 aa, Homo sapiens
MAPFGRNLLKTRHKNRSPTKDMDSEEKEIVVWVCQEEKLVCGLTKRTTSADVIQALLEEHEATFGEKRFLLGKPSDYCIIEKWRGSERVLPPLTRILKLWKAWGDEQPNMQFVLVKADAFLPVPLWRTAEAKLVQNTEKLWELSPANYMKTLPPDKQKRIVRKTFRKLAKIKQDTVSHDRDNMETLVHLIISQDHTIHQQVKRMKELDLEIEKCEAKFHLDRVENDGENYVQDAYLMPSFSEVEQNLDLQYEENQTLEDLSESDGIEQLEERLKYYRILIDKLSAEIEKEVKSVCIDINEDAEGEAASELESSNLESVKCDLEKSMKAGLKIHSHLSGIQKEIKYSDSLLQMKAKEYELLAKEFNSLHISNKDGCQLKENRAKESEVPSSNGEIPPFTQRVFSNYTNDTDSDTGISSNHSQDSETTVGDVVLLST

SEQ ID NO: 6039 - protein, 547 aa, Homo sapiens
MAGTKNKTRAQAKTEKKAAIQAKAGAEREATGVVRPVAKTRAKAKAKTGSKTDAVAEMKAVSKNKVVAETKEGALSEPKTLGKAMGDFTPKAGNESTSSTCKNEAGTDAWFWAGEEATINSWFWNGEEAGNSFSTKNDKPEIGAQVCAEELEPAAGADCKPRSGAEEEEEENVIGNWFWEGDDTSFDPNPKPVSRIVKPQPVYEINEKNRPKDWSEVTIWPNAPAVTPAVLGFRSQAPSEASPPSYIVLASAEENACSLPVATACRPSRNTRSCSQPIPECRFDSDPCIQTIDEIRRQIRIREVNGIKPFACPCKMECYMDSEEFEKLVSLLKSTTDPLIHKIARIAMGVHNVHPFAQEFINEVGVVTLIESLLSFPSPEMRKKTVITLNPPSGDERQRKIELHVKHMCKETMSFPLNSPGQQSGLKILGQLTTDFVHHYIVANYFSELFHLLSSGNCKTRNLVLKLLLNMSENPTAARDMINMKALAALKLIFNQKEAKANLVSGVAIFINIKEHIRKGSIVVVDHLSYNTLMAIFREVKEIIETM

SEQ ID NO: 6040 - protein, 453 aa, Homo sapiens
MARKVVSRKRKAPASPGAGSDAQGPQFGWDHSLHKRKRLPPVKRSLVYYLKNREVRLQNETSYSRVLHGYAAQQLPSLLKEREFHLGTLNKVFASQWLNHRQVVCGTKCNTLFVVDVQTSQITKIPILKDREPGGVTQQGCGIHAIELNPSRTLLATGGDNPNSLAIYRLPTLDPVCVGDDGHKDWIFSIAWISDTMAVSGSRDGSMGLWEVTDDVLTKSDARHNVSRVPVYAHITHKALKDIPKEDTNPDNCKVRALAFNNKNKELGAVSLDGYFHLWKAENTLSKLLSTKLPYCRENVCLAYGSEWSVYAVGSQAHVSFLDPRQPSYNVKSVCSRERGSGIRSVSFYEHIITVGTGQGSLLFYDIRAQRFLEERLSACYGSKPRLAGENLKLTTGKGWLNHDETWRNYFSDIDFFPNAVYTHCYDSSGTKLFVAGGPLPSGLHGNYAGLWS

SEQ ID NO: 6041 - protein, 812 aa, Homo sapiens
MEAFQELRKPSARLECDHCSFRGTDYENVQIHMGTIHPEFCDEMDAGGLGKMIFYQKSAKLFHCHKCFFTSKMYSNVYYHITSKHASPDKWNDKPKNQLNKETDPVKSPPLPEHQKIPCNSAEPKSIPALSMETQKLGSVLSPESPKPTPLTPLEPQKPGSVVSPELQTPLPSPEPSKPASVSSPEPPKSVPVCESQKLAPVPSPEPQKPAPVSPESVKATLSNPKPQKQSHFPETLGPPSASSPESPVLAASPEPWGPSPAASPESRKSARTTSPEPRKPSPSESPEPWKPFPAVSPEPRRPAPAVSPGSWKPGPPGSPRPWKSNPSASSGPWKPAKPAPSVSPGPWKPIPSVSPGPWKPTPSVSSASWKSSSVSPSSWKSPPASPESWKSGPPELRKTAPTLSPEHWKAVPPVSPELRKPGPPLSPEIRSPAGSPELRKPSGSPDLWKLSPDQRKTSPASLDFPESQKSSRGGSPDLWKSSFFIEPQKPVFPETRKPGPSGPSESPKAASDIWKPVLSIDTEPRKPALFPEPAKTAPPASPEARKRALFPEPRKHALFPELPKSALFSESQKAVELGDELQIDAIDDQKCDILVQEELLASPKKLLEDTLFPSSKKLKKDNQESSDAELSSSEYIKTDLDAMDIKGQESSSDQEQVDVESIDFSKENKMDMTSPEQSRNVLQFTEEKEAFISEEEIAKYMKRGKGKYYCKICCCRAMKKGAVLHHLVNKHNVHSPYKCTICGKAFLLESLLKNHVAAHGQSLLKCPRCNFESNFPRGFKKHLTHCQSRHNEEANKKLMEALEPPLEEQQI

SEQ ID NO: 6042 - protein, 657 aa, Homo sapiens
MDEQEALNSIMNDLVALQMNRRHRMPGYETMKNKDTGHSNRQKKHNSSSSALLNSPTVTTSSCAGASEKKKFLSDVRIKFEHNGERRIIAFSRPVKYEDVEHKVTTVFGQPLDLHYMNNELSILLKNQDDLDKAIDILDRSSSMKSLRILLLSQDRNHNSSSPHSGVSRQVRIKASQSAGDINTIYQPPEPRSRHLSVSSQNPGRSSPPPGYVPERQQHIARQGSYTSINSEGEFIPETSEQCMLDPLSSAENSLSGSCQSLDRSADSPSFRKSRMSRAQSFPDNRQEYSDRETQLYDKGVKGGTYPRRYHVSVHHKDYSDGRRTFPRIRRHQGNLFTLVPSSRSLSTNGENMGLAVQYLDPRGRLRSADSENALSVQERNVPTKSPSAPINWRRGKLLGQGAFGRVYLCYDVDTGRELASKQVQFDPDSPETSKEVSALECEIQLLKNLQHERIVQYYGCLRDRAEKTLTIFMEYMPGGSVKDQLKAYGALTESVTRKYTRQILEGMSYLHSNMIVHRDIKGANILRDSAGNVKLGDFGASKRLQTICMSGTGMRSVTGTPYWMSPEVISGEGYGRKADVWSLGCTVVEMLTEKPPWAEYEAMAAIFKIATQPTNPQLPSHISEHGRDFLRRIFVEARQRPSAEELLTHHFAQLMY

SEQ ID NO: 6043 - protein, 848 aa, Homo sapiens; identical to SEQ ID NO: 6036

SEQ ID NO: 6044 - protein, 1356 aa, Homo sapiens
MADTDLFMECEEEELEPWQKISDVIEDSVVEDYNSVDKTTTAGNPLVQQGGQPLILTQNPAPGLGTMVTQPVLRPVQVMQNANHVTSSPVASQPIFITTQGFPVRNVRPVQNAMNQVGIVLNVQQGQTVRPITLVPAPGTQFVKPTVGVPQVFSQMTPVRPGSTMPVRPTTNTFTTVIPATLTIRSTVPQSQSQQTKSTPSTSTTPTATQPTSLGQLAVQSPGQSNQTTNPKLAPSFPSPPAVSIASFVTVKRPGVTGENSNEVAKLVNTLNTIPSLGQSPGPVVVSNNSSAHGSQRTSGPESSMKVTSSIPVFDLQDGGRKICPRCNAQFRVTEALRGHMCYCCPEMVEYQKKGKSLDSEPSVPSAAKPPSPEKTAPVASTPSSTPIPALSPPTKVPEPNENVGDAVQTKLIMLVDDFYYGRDGGKVAQLTNFPKVATSFRCPHCTKRLKNNIRFMNHMKHHVELDQQNGEVDGHTICQHCYRQFSTPFQLQCHLENVHSPYESTTKCKICEWAFESEPLFLQHMKDTHKPGEMPYVCQVCQYRSSLYSEVDVHFRMIHEDTRHLLCPYCLKVFKNGNAFQQHYMRHQKRNVYHCNKCRLQFLFAKDKIEHKLQHHKTFRKPKQLEGLKPGTKVTIRASRGQAAVPVSSNDTPPSALQEAAPLTSSMDPLPVFLYPPVQRSIQKRAVRKMSVMGRQTCLECSFEIPDFPNHFPTYVHCSLCRYSTCCSRAYANHMINNHVPRKSPKYLALFKNSVSGIKLACTSCTFVTSVGDAMAKHLVFNPSHRSSSILPRGLTWIAHSRHGQTRDRVHDRNVKNMYPPPSFPTNKAATVKSAGATPAEPEELLTPLAPALPSPASTATPPPTPTHPQALALPPLATEGAECLNVDDQDEGSPVTQEPELASGGGGSGGVGKKEQLSVKKLRVVLFALCCNTEQAAEHFRNPQRRIRRWLRRFQASQGENLEGKYLSFEAEEKLAEWVLTQREQQLPVNEETLFQKATKIGRSLEGGFKISYEWAVRFMLRHHLTPHARRAVAHTLPKDVAENAGLFIDFVQRQIHNQDLPLSMIVAIDEISLFLDTEVLSSDDRKENALQTVGTGEPWCDVVLAILADGTVLPTLVFYRGQMDQPANMPDSILLEAKESGYSDDEIMELWSTRVWQKHTACQRSKGMLVMDCHRTHLSEEVLAMLSASSTLPAVVPAGCSSKIQPLDVCIKRTVKNFLHKKWKEQAREMADTACDSDVLLQLVLVWLGEVLGVIGDCPELVQRSFLVASVLPGPDGNINSPTRNADMQEELIASLEEQLKLSGEHSESSTPRPRSSPEETIEPESLHQLFEGESETESFYGFEEADLDLMEI

SEQ ID NO: 6045 - protein, 966 aa, Homo sapiens
MGPGQPASTCVHLAAAQLDGRSDPKVLQTQNQLQFNRNVPTHSSNLAIRYSCPHAIRIEKLKHSYNESYHCKDADCRVGPDLGSSVSFSVISQERLSYAVHLARRDVKRRQFEKHIKEHHLRSQPQSSQKCGHTKYKIPDHRVERKESKSQAACQCSHQPSKVEISSSGAKVYLYSSHPGQSDLTVPNSPPTHDPGLQPHPRIGDHKNISEQKSLLEVQRLQKELSSCIHKIEEVTKKDRLEEALDPDEERRIRIRRQEQAARSARMLYVLQQQVKEIQEELDKLSPHKIKHTKKSWAMSKLAAAHRGAIRALQMFVTQFTDRGEHPLPARCKELGSLIRQLSLCSVKLDADPSVPDVVIDILQQIEALESLLEKKLSPKKVKKCFSEIRSRFPIGSQKALERWPSTSPKGERRPLTAKDTFPQETSRPSVAKQLLADKYQPDTELPETQRLQSELDVLDADIVLEEGPFILDQSASFKDEVLAVAKTKAGKKKPVTENVPFRKKDTLAPARQQGLRKAERGRQSQPHSKSRVQQTTVSSRLKMNRQPVKDRKAPWIPPNPTSPPASPKCAAWLKVKTSPRDATKEPLQQEDPQEESHLTGAVEHEAARLAWLDAETSKRLKELEELKAKEIDSMQKQRLDWLDAETSRRTKELNELKAEEMYRLQQLSVSATHLADKVEEAVLDRLKPLLVKAQRVNSTTEANIHLKDGSSVNTAKAQPAQEVAAVDFESNNIRQLDDFLEDCASELWAVTHAKILGSETLATVEDSKDSPDLEIMMRRMEEMEKYQESVRQRYNKIAYADPRLWMQEENNDQKISAISEKPLSPHPIRITKTVDRKDPAVNIMLERPCNGNSLDESVGTEEGSEKREAPLLSLAEDSQQKEGRAPLFVPPGMQHSIGDYCSRFEQYLRIISHEAVGSFNPWLIAESFSEELVDEALGAVAAELQDMCEDYAEAVFTSEFLEAAT

SEQ ID NO: 6046 - protein, 2283 aa, Homo sapiens
MYRSSARSSVSSHRPKDDGGGGPRSGRSSGSSSGPARRSSPPPPPSGSSSRTPARRPRSPSGHRGRRASPSPPRGRRVSPSPPRARRGSPSPPRGRRLFPPGPAGFRGSSRGESRADYARDGRGDHPGDSGSRRRSPGLCSDSLEKSLRITVGNDHFCVSTPERRRLSDRLGSPVDNLEDMDRDDLTDDSVFTRSSQCSRGLERYISQEEGPLSPFLGQLDEDYRTKETFLHRSDYSPHISCHDELLRGTERNREKLKGYSIRSEERSREAKRPRYDDTVKINSMGGDHPSFTSGTRNYRQRRRSPSPRFLDPEFRELDLARRKREEEEERSRSLSQELVGVDGGGTGCSIPGLSGVLTASEPGYSLHRPEEVSVMPKKSILKKRIEVDIMEPSMQLESFSSSTSSSQDHPLYSGHPSLPLSGAIAAFASEIENKGTMVETALKEPQGNLYQWGPLPGIPKDNSPLREKFGSFLCHKDNLDLKAEGPERHTDFLLPHERASQDGSGFSRILSMLADSTSTQEKRRRSFPDIEDEEKFLYGDEEEDLKAESVPKPLGSSESEVMRQKASSLPSSAPAVKLESLEETNPEYAKIHDLLKTIGLDIGVAEISQLAARTQERLHGKKPSLRSSADRRSSVDRYFSADHCSSVDHRFSADRCSSVDHCFSADRRSSDPHRLESREAHHSNTHSPEVSHPHPPSPVDPYLLTKNSPPFLKSDHPVGHISGPEVVGSGFQSSVAVRCMLPSAPSAPIRLPHTAALSQFHMPRASQFAAARIPPNYQGPAIPPASFDAYRHYMAYAASRWPMYPTSQPSNHPVPEPHRIMPITKQATRSRPNLRVIPTVTPDKPKQKESLRGSIPAAQVPVQVSIPSLIRYNPEKISDEKNRASQKQKVIEEREKLKNDREARQKKMYYLRTELERLHKQQGEMLRKKRREKDGHKDPLLVEVSRLQDNIMKDIAELRQEAEEAEKKQSELDKVAQILGINIFDKSQKSLSDSREPTEKPGKAEKSKSPEKVSSFSNSSSNKESKVNNEKFRTKSPKPAESPQSATKQLDQPTAAYEYYDAGNHWCKDCNTICGTMFDFFTHMHNKKHTQTLDPYNRPWASKTQSEAKQDAIKRTDKITVPAKGSEFLVPISGFYCQLCEEFLGDPISGEQHVKGHQHNEKYKKYVDENPLYEERRNLDRQAGLAVVLETERRRQSELKRKLSEKPKEEKKEKKAKAVKEVKEDDKVSEKLEDQLSEGRNSPEKAENKRNTGIKLQLKEEVKKESPTSSSFGKFSWKKPEKEEEKSSLVTPSISKEEILESSKDKEDGKTEAGKAKPIKIKLSGKTVVAHTSPWMPVVTTSTQTKIRPNLPIPSTVLARGSSCSATMSKPAPLNTFLSIKSSGTTAKPLPVVKESSADLLLPPDIISKAFGGEEVILKGSPEEKVVLAEKSEPSHLPEQILPPPPPPPPPPPPPPPVIPHPAAPSAAQANAILAPVKSNPVVSQTLSPGFVGPNILNPVLPVAIMASAQPAAIPSDETAPGVSESDRDQTLFSVLVRPPPPLSSVFSEQAKKLEKRNSCLATANAKDLYDIFYSSGGKGAPETKGAPETKLSGGPLANGENSNLSRTKSSDTSSTSPLNSSASQEELHQDEGLVAAPIVSNSEKPIAKTLVALGKWSVVEHVGPKSTGSTYGFLQPLTRLCQSRPYETITPKTDTLAIWTSSSFQSDTSRDISPEKSELDLGEPGPPGVEPPPQLLDIQCKESQKLVEIHLRESVNQDKESQELARGSSEDCRESEIETNTELKERVKELSEGIVDEGVSTSIGPHSIDDSNLNHGNRYMWEGEVKQPNLLMIDKEAEQSNKLMTGSETPSKVVIKLSPQACSFTKAKLDSFLSEARSLLNPQDTPVKISAPELLLHSPARSAMCLTGSPQEQGVSVVSEEGLENSAPESASRTSRYRSLKLKRERSKDFQVKKIYELAVWDENKKRPETWESPEKPKTEALELQDVHPELTVTIESKALEDFEATDLKVEELTALGNLGDMPVDFCTTRVSPAHRSPTVLCQKVCEENSVSPIGCNSSDPADFEPIPSFSGFPLDSPKTLVLDFETEGERNSPNPRSVRIPSPNILKTGLTENVDRGLGGLEGTHQALDLLAGGMMPEEVKESSQLDKQESLGLELKTINSAGLGPSPCLPDLVDFVTRTSGVQKDKLCSPLSEPGDPSKCSSLELGPLQLEISNASTTEVAILQVDDDSGDPLNLVKAPVSRSPPREQVIEDNMVPQGMPEQETTVGAIQDHTESSVHN

SEQ ID NO: 6047 - protein, 643 aa, Homo sapiens
MGQESSKPVWPNPTGGYQSNTGRRYGRRHAYVSFRPPTSQRERIASQRKTNSEVPMHRSAPSQTTKRSRSPFSTTRRSWDDSESSGTNLNIDNEDYSRYPPREYRASGSRRGMAYGHIDSYGADDSEEEGAGPVERPPVRGKTGKFKDDKLYDPEKGARSLAGPPPHFSSFSRDVREERDKLDPVPAARCSASRADFLPQSSVASQSSSEGKLATKGDSSERERREQNLPARPSRAPVSICGGGENTSKSAEEPVVRPKIRNLASPNCVKPKIFFDTDDDDDMPHSTSRWRDTANDNEGHSDGLARRGRGESSSGYPEPKYPEDKREARSDQVKPEKVPRRRRTMADPDFWTHSDDYYKYCDEDSDSDKEWIAALRRKYRSREQTLSSSGESWETLPGKEEREPPQAKVSASTGTSPGPGASASAGAGAGASAGSNGSNYLEEVREPSLQEEQASLEEGEIPWLQYHENDSSSEGDNDSGHELMQPGVFMLDGNNNLEDDSSVSEDLEVDWSLFDGFADGLGVAEAISYVDPQFLTYMALEERLAQAMETALAHLESLAVDVEVANPPASKESIDALPEILVTEDHGAVGQEMCCPICCSEYVKGEVATELPCHHYFHKPCVSIWLQKSGTCPVCRCMFPPPL

SEQ ID NO: 6048 - protein, 370 aa, Homo sapiens
MPTETLQTGSMVKPVSPAGTFTSAVPLRILNKGPDYFRRQAEPNPKRLSAVERLEADKAKYVKSQEVINAKQEPVKPAVLAKPPVCPAAKRALGSPTLKVFGNHAKTESGVQRENLKLEILKNIINSSEGSSSGSGHKHSSRNWPPHRSEATDLHRHSFAESLKVYPTQGRRSPQEGGSHVGRRLLEQSAESFLHVSHSSSDIRKVTSVKPLKAIPCSSSAPPLPPKPKIAAIASMKSPEADPVEPACGVSRRPSLQRSKSDLSDRYFRVDADVERFFNYCGLDPEELENLGMENFARANSDIISLNFRSASMISSDCEQSQDSNSDLRNDDSANDRVPYGISAIERNARIIKWLYSIKQARESQKVSHV

SEQ ID NO: 6049 - protein, 1040 aa, Homo sapiens
MAAAAAAGAASGLPGPVAQGLKEALVDTLTGILSPVQEVRAAAEEQIKVLEVTEEFGVHLAELTVDPQGALAIRQLASVILKQYVETHWCAQSEKFRPPETTERAKIVIRELLPNGLRESISKVRSSVAYAVSAIAHWDWPEAWPQLFNLLMEMLVSGDLNAVHGAMRVLTEFTREVTDTQMPLVAPVILPEMYKIFTMAEVYGIRTRSRAVEIFTTCAHMICNMEELEKGAAKVLIFPVVQQFTEAFVQALQIPDGPTSDSGFKMEVLKAVTALVKNFPKHMVSSMQQILPIVWNTLTESAAFYVRTEVNYTEEVEDPVDSDGEVLGFENLVFSIFEFVHALLENSKFKSTVKKALPELIYYIILYMQITEEQIKVWTANPQQFVEDEDDDTFSYTVRIAAQDLLLAVATDFQNESAAALAAAATRHLQEAEQTKNSGTEHWWKIHEACMLALGSVKAIITDSVKNGRIHFDMHGFLTNVILADLNLSVSPFLLGRALWAASRFTVAMSPELIQQFLQATVSGLHETQPPSVRISAVRAIWGYCDQLKVSESTHVLQPFLPSILDGLIHLAAQFSSEVLNLVMETLCIVCTVDPEFTASMESKICPFTIAIFLKYSNDPVVASLAQDIFKELSQIEACQGPMQMRLIPTLVSIMQAPADKIPAGLCATAIDILTTVVRNTKPPLSQLLICQAFPAVAQCTLHTDDNATMQNGGECLRAYVSVTLEQVAQWHDEQGHNGLWYVMQVVSQLLDAASEFTAAFVGRLVSTLISKAGRELGENLDQILRAILSKMQQAETLSVMQSLIMVFAHLVHTQLEPLLEFLCSLPGPTGKPALEFVMAEWTSRQHLFYGQYEGKVSSVALCKLLQHGINADDKRLQDIRVKGEEIYSMDEGIRTRSKSAKNPERWTNIPLLVKILKLIINELSNVMEANAARQATPAEWSQDDSNDMWEDQEEEEEEEEDGLAGQLLSDILATSKYEEDYYEDDEEDDPDALKDPLYQIDLQAYLTDFLCQFAQQPCYIMFSGHLNDNERRVLQTIGI

SEQ ID NO: 6050 - protein, 51 aa, Homo sapiens [sequence omitted]

SEQ ID NO: 6051 - protein, 1210 aa, Homo sapiens
MDSLPDEFFVRHPAVEDQRKEETENKLEKSSGQLNKQENDIPTDLVPVNLLLEVKKLLNAINTLPKGVVPHIKKFLQEDFSFQTMQREVAANSQNGEEIVPALTLRFLITQLEAALRNIQAGNYTAHQINIGYYLTLLFLYGVALTERGKKEDYTEAENKFLVMKMMIQENEICENFMSLVYFGRGLLRCAQKRYNGGLLEFHKSLQEIGDKNDHWFDIDPTEDEDLPTTFKDLLNNFIKTTESNIMKQTICSYLDCERSCEADILKNTSYKGFFQLMCSKSCCVYFHKICWKKFKNLKYPGENDQSFSGKKCLKEGCTGDMVRMLQCDVPGIVKILFEVVRKDEYITIENLGASYRKLISLKITDTDIRPKISLKFNTKDEMPIFKLDYNYFYHLLHIIIISGTDIVRQIFDEAMPPPLLKKELLIHKNVLESYYNHLWTNHPLGGSWHLLYPPNKELPQSKQFDLCLLLALIKHLNVFPAPKKGWNMEPPSSDISKSADILRLCKYRDILLSEILMNGLTESQFNSIWKKVSDILLRLGMMQEDIDKVKENPIENISLDYHQLSVYLGIPVPEIIQRMLSCYQQGIALQSITGSQRIEIEELQNEEEELSPPLMEYNINVKSHPEIQFAEINKDGTSIPSESSTESLKDLQEVKSKQRKKKKTKNKKNKDSKEDQVPYVVEKEEQLRKEQANPHSVSRLIKDDASDVQEDSAMEDKFYSLDELHILDMIEQGSAGKVTTDYGETEKERLARQRQLYKLHYQCEDFKRQLRTVTFRWQENQMQIKKKDKIIASLNQQVAFGINKVSKLQRQIHAKDNEIKNLKEQLSMKRSQWEMEKHNLESTMKTYVSKLNAETSRALTAEVYFLQCRRDFGLLHLEQTEKECLNQLARVTHMAASNLESLQLKAAVDSWNAIVADVRNKIAFLRTQYNEQINKVKQGFALSTLPPVQLPPPPPSPEILMQQFLGRPLVKESFFRPILTVPQMPAVCPGVVSATGQPRAPLMTGIAWALPAPVGDAVPPSAGLRSDPSIMNWERITDRLKTAFPQQTARGSELTDFLRKLKDAYGKSLSELTFDEIVCKISQFIDPKKSQSQGKSVSNVNCVSPSHSPSQPDAAQPPKPAWRPLTSQGPATWEGASNPDEEEEEEEPCVICHENLSPENLSVLPCAHKFHAQCIRPWLMQQGTCPTCRLHVLLPEEFPGHPSRQLPKI

SEQ ID NO: 6052 - protein, 331 aa, Homo sapiens
MSRQLSRARPATVLGAMEMGRRMDAPTSAAVTRAFLERGHTEIDTAFVYSEGQSETILGGLGLRLGGSDCRVKIDTKAIPLFGNSLKPDSLRFQLETSLKRLQCPRVDLFYLHMPDHSTPVEETLRACHQLHQEGKFVELGLSNYAAWEVAEICTLCKSNGWILPTVYQGMYNAITRQVETELFPCLRHFGLRFYAFNPLAGGLLTGKYKYEDKNGKQPVGRFFGNTWAEMYRNRYWKEHHFEGIALVEKALQAAYGASAPSMTSATLRWMYHHSQLQGAHGDAVILGMSSLEQLEQNLAAAEEGPLEPAVVDAFNQAWHLVTHECPNYFR

SEQ ID NO: 6053 - protein, 376 aa, Homo sapiens
MSPEVALNRISPMLSPFISSVVRNGKVGLDATNCLRITDLKSGCTSLTPGPNCDRFKLHIPYAGETLKWDIIFNAQYPELPPDFIFGEDAEFLPDPSALQNLASWNPSNPECLLLVVKELVQQYHQFQCSRLRESSRLMFEYQTLLEEPQYGENMEIYAGKKNNWTGEFSARFLLKLPVDFSNIPTYLLKDVNEDPGEDVALLSVSFEDTEATQVYPKLYLSPRIEHALGGSSALHIPAFPGGGCLIDYVPQVCHLLTNKVQYVIQGYHKRREYIAAFLSHFGTGVVEYDAEGFTKLTLLLMWKDFCFLVHIDLPLFFPRDQPTLTFQSVYHFTNSGQLYSQAQKNYPYSPRWDGNEMAKRAKRESNRDGEESSSA

SEQ ID NO: 6054 - protein, 626 aa, Homo sapiens
MDEQEALNSIMNDLVALQMNRRHRMPGYETMKNKDTGHSNRQSDVRIKFEHNGERRIIAFSRPVKYEDVEHKVTTVFGQPLDLHYMNNELSILLKNQDDLDKAIDILDRSSSMKSLRILLLSQDRNHNSSSPHSGVSRQVRIKASQSAGDINTIYQPPEPRSRHLSVSSQNPGRSSPPPGYVPERQQHIARQGSYTSINSEGEFIPETSEQCMLDPLSSAENSLSGSCQSLDRSADSPSFRKSRMSRAQSFPDNRQEYSDRETQLYDKGVKGGTYPRRYHVSVHHKDYSDGRRTFPRIRRHQGNLFTLVPSSRSLSTNGENMGLAVQYLDPRGRLRSADSENALSVQERNVPTKSPSAPINWRRGKLLGQGAFGRVYLCYDVDTGRELASKQVQFDPDSPETSKEVSALECEIQLLKNLQHERIVQYYGCLRDRAEKTLTIFMEYMPGGSVKDQLKAYGALTESVTRKYTRQILEGMSYLHSNMIVHRDIKGANILRDSAGNVKLGDFGASKRLQTICMSGTGMRSVTGTPYWMSPEVISGEGYGRKADVWSLGCTVVEMLTEKPPWAEYEAMAAIFKIATQPTNPQLPSHISEHGRDFLRRIFVEARQRPSAEELLTHHFAQLMY

SEQ ID NO: 6055 - protein, 566 aa, Homo sapiens; identical to SEQ ID NO: 5875

SEQ ID NO: 6056 - protein, 151 aa, Homo sapiens
MEGCVSNLMVCNLAYSGKLEELKESILADKSLATRTDQDSRTALHWACSAGHTEIVEFLLQLGVPVNDKDDAGWSPLHIAASAGRDEIVKALLGKGAQVNAVNQNGCTPLHYAASKNRHEIAVMLLEGGANPDAKDHYEATAMHRAAAKDT

SEQ ID NO: 6057 - protein, 739 aa, Homo sapiens; identical to SEQ ID NO: 5973

SEQ ID NO: 6058 - protein, 563 aa, Homo sapiens
MSRPSSRAIYLHRKEYSQNLTSEPTLLQHRVEHLMTCKQGSQRVQGPEDALQKLFEMDAQGRVWSQDLILQVRDGWLQLLDIETKEELDSYRLDSIQAMNVALNTCSYNSILSITVQEPGLPGTSTLLFQCQEVGAERLKTSLQKALEEELEQRPRLGGLQPGQDRWRGPAMERPLPMEQARYLEPGIPPEQPHQRTLEHSLPPSPRPLPRHTSAREPSAFTLPPPRRSSSPEDPERDEEVLNHVLRDIELFMGKLEKAQAKTSRKKKFGKKNKDQGGLTQAQYIDCFQKIKHSFNLLGRLATWLKETSAPELVHILFKSLNFILARCPEAGLAAQVISPLLTPKAINLLQSCLSPPESNLWMGLGPAWTTSRADWTGDEPLPYQPTFSDDWQLPEPSSQAPLGYQDPVSLRPSSPKPAQPALKMQVLYEFEARNPRELTVVQGEKLEVLDHSKRWWLVKNEAGRSGYIPSNILEPLQPGTPGTQGQSPSRVPMLRLSSRPEEVTDWLQAENFSTATVRTLGSLTGSQLLRIRPGELQMLCPQEAPRILSRLEAVRRMLGISP

SEQ ID NO: 6059 - protein, 174 aa, Homo sapiens
MTCCQTSFCGYPSFSISGTCGSSCCQPSCCETSCCQPRSCQTSFCGFPSFSTSGTCSSSCCQPSCCETSCCQPSCCETSCCQPSCCQISSCGTGCGIGGGISYGQEGSSGAVSTRIRWCRPDSRVEGTYLPPCCVVSCTPPSCCQLHHAQASCCRPSYCGQSCCRPVCCCEPTC

SEQ ID NO: 6060 - protein, 390 aa, Homo sapiens
MRGDRGRGRGGRFGSRGGPGGGFRPFVPHIPFDFYLCEMAFPRVKPAPDETSFSEALLKRNQDLAPNSAEQASILSLVTKINNVIDNLIVAPGTFEVQIEEVRQVGSYKKGTMTTGHNVADLVVILKILPTLEAVAALGNKVVESLRAQDPSEVLTMLTNETGFEISSSDATVKILITTVPPNLRKLDPELHLDIKVLQSALAAIRHARWFEENASQSTVKVLIRLLKDLRIRFPGFEPLTPWILDLLGHYAVMNNPTRQPLALNVAYRRCLQILAAGLFLPGSVGITDPCESGNFRVHTVMTLEQQDMVCYTAQTLVRILSHGGFRKILGQEGDASYLASEISTWDGVIVTPSEKAYEKPPEKKEGEEEEENTEEPPQGEEEESMETQE

SEQ ID NO: 6061 - protein, 1201 aa, Homo sapiens
MPRGEAPGPGRRGAKDEALGEESGERWSPEFHLQRKLADSSHSEQQDRNRVSEELIMVVQEMKKYFPSERRNKPSTLDALNYALRCVHSVQANSEFFQILSQNGAPQADVSMYSLEELATIASEHTSKNTDTFVAVFSFLSGRLVHISEQAALILNRKKDVLASSHFVDLLAPQDMRVFYAHTARAQLPFWNNWTQRAARYECAPVKPFFCRIRGGEDRKQEKCHSPFRIIPYLIHVHHPAQPELESEPCCLTVVEKIHSGYEAPRIPVNKRIFTTTHTPGCVFLEVDEKAVPLLGYLPQDLIGTSILSYLHPEDRSLMVAIHQKVLKYAGHPPFEHSPIRFCTQNGDYIILDSSWSSFVNPWSRKISFIIGRHKVRTSPLNEDVFATKIKKMNDNDKDITELQEQIYKLLLQPVHVSVSSGYGSLGSSGSQEQLVSIASSSEASGHRVEETKAEQMTLQQVYASVNKIKNLGQQLYIESMTKSSFKPVTGTRTEPNGGGECKTFTSFHQTLKNNSVYTEPCEDLRNDEHSPSYQQINCIDSVIRYLKSYNIPALKRKCISCTNTTSSSSEEDKQNHKADDVQALQAGLQIPAIPKSEMPTNGRSIDTGGGAPQILSTAMLSLGSGISQCGYSSTIVHVPPPETARDATLFCEPWTLNMQPAPLTSEEFKHVGLTAAVLSAHTQKEEQNYVDKFREKILSSPYSSYLQQESRSKAKYSYFQGDSTSKQTRSAGCRKGKHKRKKLPEPPDSSSSNTGSGPRRGAHQNAQPCCPSAASSPHTSSPTFPPAAMVPSQAPYLVPAFPLPAATSPGREYAAPGTAPEGLHGLPLSEGLQPYPAFPFPYLDTFMTVFLPDPPVCPLLSPSFLPCPFLGATASSAISPSMSSAMSPTLDPPPSVTSQRREEEKWEAQSEGHPFITSRSSSPLQLNLLQEEMPRPSESPDQMRRNTCPQTEYCVTGNNGSESSPATTGALSTGSPPRENPSHPTASALSTGSPPMKNPSHPTASALSTGSPPMKNPSHPTASTLSMGLPPSRTPSHPTATVLSTGSPPSESPSRTGSAASGSSDSSIYLTSSVYSSKISQNGQQSQDVQKKETFPNVAEEPIWRMIRQTPERILMTYQVPERVKEVVLKEDLEKLESMRQQQPQFSHGQKEELAKVYNWIQSQTVTQEIDIQACVTCENEDSADGAATSCGQVLVEDSC

SEQ ID NO: 6062 - protein, 431 aa, Homo sapiens
MSDQIKFIMDSLNKEPFRKNYNLITFDSLEPMQLLQVLSDVLAEIDPKQLVDIREEMPEQTAKRMLSLLGILKYKPSGNATDMSTFRQGLVIGSKPVIYPVLHWLLQRTNELKKRAYLARFLIKLEVPSEFLQDETVADTNKQYEELMEAFKTLHKEYEQLKISGFSTAEIRKDISAMEEEKDQLIKRVEHLKKRVETAQNHQWMLKIARQLRVEKEREEYLAQQKQEQKNQLFHAVQRLQRVQNQLKSMRQAAADAKPESLMKRLEEEIKFNLYMVTEKFPKELENKKKELHFLQKVVSEPAMGHSDLLELESKINEINTEINQLIEKKMMRNEPIEGKLSLYRQQASIISRKKEAKAEELQEAKEKLASLEREASVKRNQTREFDGTEVLKGDERQDLTLSPRLECGGVIMAYCSLKLLGSSDPPTSAS

SEQ ID NO: 6063 - protein, 372 aa, Homo sapiens
MASSASARTPAGKRVINQEELRRLMKEKQRLSTSRKRIESPFAKYNRLGQLSCALCNTPVKSELLWQTHVLGKQHREKVAELKGAKEASQGSSASSAPHSVKRKAPDADDQDVKRAKATLVPQVQPSTSAWTTNFDKIGKEFIRATPSKPSGLSLLPDYEDEEEEEEEEEGDGERKRGDASKPLSDAQGKEHSVSSSREVTSSVLPNDFFSTNPPKAPIIPHSGSIEKAEIHEKVVERRENTAEALPEGFFDDPEVDARVRKVDAPKDQMDKEWDEFQKAMRQVNTISEAIVAEEDEEGRLDRQIGEIDEQIECYRRVEKLRNRQDEIKNKLKEILTIKELQKKEEENADSDDEGELQDLLSQDWRVKGALL

SEQ ID NO: 6064 - protein, 593 aa, Homo sapiens
MSRPSSRAIYLHRKEYSQNLTSEPTLLQHRVEHLMTCKQGSQRVQGPEDALQKLFEMDAQGRVWSQDLILQVRDGWLQLLDIETKEELDSYRLDSIQAMNVALNTCSYNSILSITVQEPGLPGTSTLLFQCQEVGAERLKTSLQKALEEELEQRPRLGGLQPGQDRWRGPAMERPLPMEQARYLEPGIPPEQPHQRTLEHSLPPSPRPLPRHTSAREPSAFTLPPPRRSSSPEDPERDEEVLNHVLRDIELFMGKLEKAQAKTSRKKKFGKKNKDQGGLTQAQYIDCFQKIKHSFNLLGRLATWLKETSAPELVHILFKSLNFILARCPEAGLAAQVISPLLTPKAINLLQSCLSPPESNLWMGLGPAWTTSRADWTGDEPLPYQPTFSDDWQLPEPSSQAPLGYQDPVSLRRGSHRLGSTSHFPQEKTHNHDPQPGDPNSRPSSPKPAQPALKMQVLYEFEARNPRELTVVQGEKLEVLDHSKRWWLVKNEAGRSGYIPSNILEPLQPGTPGTQGQSPSRVPMLRLSSRPEEVTDWLQAENFSTATVRTLGSLTGSQLLRIRPGELQMLCPQEAPRILSRLEAVRRMLGISP

SEQ ID NO: 6065 - protein, 349 aa, Homo sapiens
MKLTSEKLPKNPFYASVSQYAAKNQKFFQWKKEKTESDYTHANLVDKALQLLKERILKGDTLAYFLRGQLYFEEGWYEEALEQFEEIKEKDHQATYQLGVMYYDGLGTTLDAEKGVDYMKKILDSPCPKARHLKFAAAYNLGRAYYEGKGVKRSNEEAERLWLIAADNGNPKASVKAQSMLGLYYSTKEPKELEKAFYWHSEACGNGNLESQGALGLMYLYGQGIRQDTEAALQCLREAAERGNVYAQGNLVEYYYKMKFFTKCVAFSKRIADYDEVHDIPMIAQVTDCLPEFIGRGMAMASFYHARCLQLGLGITRDETTAKHYYSKACRLNPALADELHSLLIRQRI

SEQ ID NO: 6066 - protein, 411 aa, Homo sapiens
MGLKKMKGLSYDEAFAMANDPLEGFHEVNLASPTSPDLLGVYESGTQEQTTSPSVIYRPHPSALSSVPIQANALDVSELPTQPVYSSPRRLNCAEISSISFHVTDPAPCSTSGVTAGLTKLTTRKDNYNAEREFLQGATITEACDGSDDIFGLSTDSLSRLRSPSVLEVREKGYERLKEELAKAQRELKLKDEECERLSKVRDQLGQELEELTASLFEEAHKMVREANIKQATAEKQLKEAQGKIDVLQAEVAALKTLVLSSSPTSPTQEPLPGGKTPFKKGHTRNKSTSSAMSGSHQDLSVIQPIVKDCKEADLSLYNEFRLWKDEPTMDRTCPFLDKIYQEDIFPCLTFSKSELASAVLEAVENNTLSIEPVGLQPIRFVKASAVECGGPKSLLYVTFLHTFDTFSRDS

SEQ ID NO: 6067 - protein, 715 aa, Homo sapiens
MFGRKRSVSFGGFGWIDKTMLASLKVKKQELANSSDATLPDRPLSPPLTAPPTMKSSEFFEMLEKMQDDYIPYPSIDEVVEKGGPYPQVILPQFGGYWIEDPENVGTPTSLGSSICEEEEEDNLSPNTFGYKLECKGEARAYRRHFLGKDHLNFYCTGSSLGNLILSVKCEEAEGIEYLRVILRSKLKTVHERIPLAGLSKLPSVPQIAKAFCDDAVGLRFNPVLYPKASQMIVSYDEHEVNNTFKFGVIYQKARQTLEEELFGNNEESPAFKEFLDLLGDTITLQDFKGFRGGLDVTHGQTGVESVYTTFRDREIMFHVSTKLPFTDGDAQQLQRKRHIGNDIVAIIFQEENTPFVPDMIASNFLHAYIVVQVETPGTETPSYKVSVTAREDVPTFGPPLPSPPVFQKGPEFREFLLTKLTNAENACCKSDKFAKLEDRTRAALLDNLHDELHAHTQAMLGLGPEEDKFENGGHGGFLESFKRAIRVRSHSMETMVGGQKKSHSGGIPGSLSGGISHNSMEVTKTTFSPPVVAATVKNQSRSPIKRRSGLFPRLHTGSEGQGDSRARCDSTSSTPKTPDGGHSSQEIKSETSSNPSSPEICPNKEKPFMKLKENGRAISRSSSSTSSVSSTAGEGEAMEEGDSGGSQPSTTSPFKQEVFVYSPSPSSESPSLGAAATPIIMSRSPTDAKSRNSPRSNLKFRFDKLSHASSGAGH

SEQ ID NO: 6068 - protein, 756 aa, Homo sapiens
MEEELKCPVCGSLFREPIILPCSHNVCLPCARTIAVQTPDGEQHLPQPLLLSRGSGLQAGAAAAASLEHDAAAGPACGGAGGSAAGGLGGGAGGGGDHADKLSLYSETDSGYGSYTPSLKSPNGVRVLPMVPAPPGSSAAAARGAACSSLSSSSSSITCPQCHRSASLDHRGLRGFQRNRLLEAIVQRYQQGRGAVPGTSAAAAVAICQLCDRTPPEPAATLCEQCDVLYCSACQLKCHPSRGPFAKHRLVQPPPPPPPPAEAASGPTGTAQGAPSGGGGCKSPGGAGAGATGGSTARKFPTCPEHEMENYSMYCVSCRTPVCYLCLEEGRHAKHEVKPLGAMWKQHKAQLSQALNGVSDKAKEAKEFLVQLKNILQQIQENGLDYEACLVAQCDALVDALTRQKAKLLTKVTKEREHKLKMVWDQINHCTLKLRQSTGLMEYCLEVIKENDPSGFLQISDALIKRVQVSQEQWVKGALEPKVSAEFDLTLDSEPLLQAIHQLDFIQMKCRVPPVPLLQLEKCCTRNNSVTLAWRMPPFTHSPVDGYILELDDGAGGQFREVYVGKETLCTIDGLHFNSTYNARVKAFNSSGVGPYSKTVVLQTSDVAWFTFDPNSGHRDIILSNDNQTATCSSYDDRVVLGTAAFSKGVHYWELHVDRYDNHPDPAFGVARASVVKDMMLGKDDKAWAMYVDNNRSWFMHCNSHTNRTEGGVCKGATVGVLLDLNKHTLTFFINGQQQGPTAFSHEVQPSVTSLF

SEQ ID NO: 6069 - protein, 783 aa, Homo sapiens
MEEELKCPVCGSLFREPIILPCSHNVCLPCARTIAVQTPDGEQHLPQPLLLSRGSGLQAGAAAAASLEHDAAAGPACGGAGGSAAGGLGGGAGGGGDHADKLSLYSETDSGYGSYTPSLKSPNGVRVLPMVPAPPGSSAAAARGAACSSLSSSSSSITCPQCHRSASLDHRGLRGFQRNRLLEAIVQRYQQGRGAVPGTSAAAAVAICQLCDRTPPEPAATLCEQCDVLYCSACQLKCHPSRGPFAKHRLVQPPPPPPPPAEAASGPTGTAQGAPSGGGGCKSPGGAGAGATGGSTARKFPTCPEHEMENYSMYCVSCRTPVCYLCLEEGRHAKHEVKPLGAMWKQHKAQLSQALNGVSDKAKEAKEFLVQLKNILQQIQENGLDYEACLVAQCDALVDALTRQKAKLLTKVTKEREHKLKMVWDQINHCTLKLRQSTGLMEYCLEVIKENDPSGFLQISDALIKRVQVSQEQWVKGALEPKVSAEFDLTLDSEPLLQAIHQLDFIQMKCRVPPVPLLQLEKCCTRNNSVTLAWRMPPFTHSPVDGYILELDDGAGGQFREVYVGKETLCTIDGLHFNSTYNARVKAFNSSGVGPYSKTVVLQTSDVAWFTFDPNSGHRDIILSNDNQTATCSSYDDRVVLGTAAFSKGVHYWELHVDRYDNHPDPAFGVARASVVKDMMLGKDDKAWAMYVDNNRSWFMHCNSHTNRTEGGVCKGATVGVLLDLNKHTLTFFINGQQQGPTAFSHVDGVFMPALSLNRNVQVTLHTGLEVPTNLGRPKLSGN

SEQ ID NO: 6070 - protein, 156 aa, Homo sapiens
MVPVFTSSALPVKDVEDKPEQQTRTRETDKSPTSTEPRQQPSALFARGNRKAVKSPQRSSSKIKENKHPFALYGWGEKQTDTGSQKTHNVCASAPVHEIHESALRAKNRRQVEKRKLVAQRQRAHSVDVEKNRKMKASSSENPWMTEYMRCYSARA

SEQ ID NO: 6071 - protein, 270 aa, Homo sapiens; identical to SEQ ID NO: 5082

SEQ ID NO: 6072 - protein, 385 aa, Homo sapiens
MAAPDLSTNLQEEATCAICLDYFTDPVMTDCGHNFCRECIRRCWGQPEGPYACPECRELSPQRNLRPNRPLAKMAEMARRLHPPSPVPQGVCPAHREPLAAFCGDELRLLCAACERSGEHWAHRVRPLQDAAEDLKAKLEKSLEHLRKQMQDALLFQAQADETCVLWQKMVESQRQNVLGEFERLRRLLAEEEQQLLQRLEEEELEVLPRLREGAAHLGQQSAHLAELIAELEGRCQLPALGLLQDIKDALRRVQDVKLQPPEVVPMELRTVCRVPGLVETLRRFRGRCGGPRWGDDSRRGPAKDLGSQPRVLCPATASSKLTVSWWWVVGKTSSAHTSDISCVGIFTPNNSSTSGNELGIQGFHSALNRIASADTTGVSTDPTD

SEQ ID NO: 6073 - protein, 416 aa, Homo sapiens
MPLYNDSFHEISHKGRRHTLVLKSIQRADAGIVRASSLKVSTSARLEVRVKPVVFLKALDDLSAEERGTLALQCEVSDPEAHVVWRKDGVQLGPSDKYDFLHTAGTRGLVVHDVSPEDAGLYTCHVGSEETRARVRVHDLHVGITKRLKTMEVLEGESCSFECVLSHESASDPAMWTVGGKTVGSSSRFQATRQGRKYILVVREAAPSDAGEVVFSVRGLTSKASLIVRERPAAIIKPLEDQWVAPGEDVELRCELSRAGTPVHWLKDRKAIRKSQKYDVVCEGTMAMLVIRGASLKDAGEYTCEVEASKSTASLHVEEKANCFTEELTNLQVEEKGTAVFTCKTEHPAATVTWRKGLLELRASGKHQPSQEGLTLRLTISALEKADSDTYTCDIGQAQSRAQLLVQGEAAKCARA

SEQ ID NO: 6074 - protein, 709 aa, Homo sapiens
MEKHRGVLECQVSRASAQVRWFKGSQELQPGPKYELVSDGLYRKLIISDVHAEDEDTYTCDAGDVKTSAQFFVEEQSITIVRGLQDVTVMEPAPAWFECETSIPSVRPPKWLLGKTVLQAGGNVGLEQEGTVHRLMLRRTCSTMTGPVHFTVGKSRSSARLVVSDIPVVLTRPLEPKTGRELQSVVLSCDFRPAPKAVQWYKDDTPLSPSEKFKMSLEGQMAELRILRLMPADAGVYRCQAGSAHSSTEVTVEAREVTVTGPLQDAEATEEGWASFSCELSHEDEEVEWSLNGMPLYNDSFHEISHKGRRHTLVLKSIQRADAGIVRASSLKVSTSARLEVRVKPVVFLKALDDLSAEERGTLALQCEVSDPEAHVVWRKDGVQLGPSDKYDFLHTAGTRGLVVHDVSPEDAGLYTCHVGSEETRARVRVHDLHVGITKRLKTMEVLEGESCSFECVLSHESASDPAMWTVGGKTVGSSSRFQATRQGRKYILVVREAAPSDAGEVVFSVRGLTSKASLIVRERPAAIIKPLEDQWVAPGEDVELRCELSRAGTPVHWLKDRKAIRKSQKYDVVCEGTMAMLVIRGASLKDAGEYTCEVEASKSTASLHVEEKANCFTEELTNLQVEEKGTAVFTCKTEHPAATVTWRKGLLELRASGKHQPSQEGLTLRLTISALEKADSDTYTCDIGQAQSRAQLLVQGEAAKCARA

SEQ ID NO: 6075 - protein, 5608 aa, Homo sapiens
MLVIRGASLKDAGEYTCEVEASKSTASLHVEEKANCFTEELTNLQVEEKGTAVFTCKTEHPAATVTWRKGLLELRASGKHQPSQEGLTLRLTISALEKADSDTYTCDIGQAQSRAQLLVQGRRVHIIEDLEDVDVQEGSSATFRCRISPANYEPVHWFLDKTPLHANELNEIDAQPGGYHVLTLRQLALKDSGTIYFEAGDQRASAALRVTEKPSVFSRELTDATITEGEDLTLVCETSTCDIPVCWTKDGKTLRGSARCQLSHEGHRAQLLITGATLQDSGRYKCEAGGACSSSIVRVHARPVRFQEALKDLEVLEGGAATLRCVLSSVAAPVKWCYGNNVLRPGDKYSLRQEGAMLELVVRNLRPQDSGRYSCSFGDQTTSATLTVTALPAQFIGKLRNKEATEGATATLRCELSKAAPVEWRKGSETLRDGDRYCLRQDGAMCELQIRGLAMVDAAEYSCVCGEERTSASLTIRPMPAHFIGRLRHQESIEGATATLRCELSKAAPVEWRKGRESLRDGDRHSLRQDGAVCELQICGLAVADAGEYSCVCGEERTSATLTVKALPAKFTEGLRNEEAVEGATAMLWCELSKVAPVEWRKGPENLRDGDRYILRQEGTRCELQICGLAMADAGEYLCVCGQERTSATLTIRALPARFIEDVKNQEAREGATAVLQCELNSAAPVEWRKGSETLRDGDRYSLRQDGTKCELQIRGLAMADTGEYSCVCGQERTSAMLTVRALPIKFTEGLRNEEATEGATAVLRCELSKMAPVEWWKGHETLRDGDRHSLRQDGARCELQIRGLVAEDAGEYLCMCGKERTSAMLTVRAMPSKFIEGLRNEEATEGDTATLWCELSKAAPVEWRKGHETLRDGDRHSLRQDGSRCELQIRGLAVVDAGEYSCVCGQERTSATLTVRALPARFIEDVKNQEAREGATAVLQCELSKAAPVEWRKGSETLRGGDRYSLRQDGTRCELQIHGLSVADTGEYSCVCGQERTSATLTVRALPARFTQDLKTKEASEGATATLQCELSKVAPVEWKKGPETLRDGGRYSLKQDGTRCELQIHDLSVADAGEYSCMCGQERTSATLTVRALPARFTEGLRNEEAMEGATATLQCELSKAAPVEWRKGLEALRDGDKYSLRQDGAVCELQIHGLAMADNGVYSCVCGQERTSATLTVRALPARFIEDMRNQKATEGATVTLQCKLRKAAPVEWRKGPNTLKDGDRYSLKQDGTSCELQIRGLVIADAGEYSCICEQERTSATLTVRALPARFIEDVRNHEATEGATAVLQCELSKAAPVEWARGSGSETLRDGDRYSLRQDGTRCELQIRGLAVEDTGEYLCVCGQERTSATLTVRALPARFIDNMTNQEAREGATATLHCELSKVAPVEWRKGPETLRDGDRHSLRQDGTRCELQIRGLSVADAGEYSCVCGQERTSATLTIREATEGATAMLQCELSKVAPVEWRKGPETLRDGDRYNLRQDGTRCELQIHGLSVADTGEYSCVCGQEKTSATLTVKAPQPVFREPLQSLQAEEGSTATLQCELSEPTATVVWSKGGLQLQANGRREPRLQGCTAELVLQDLQREDTGEYTCTCGSQATSATLTVTAAPVRFLRELQHQEVDEGGTAHLCCELSRAGASVEWRKGSLQLFPCAKYQMVQDGAAAELLVRGVEQEDAGDYTCDTGHTQSMASLSVRVPRPKFKTRLQSLEQETGDIARLCCQLSDAESGAVVQWLKEGVELHAGPKYEMRSQGATRELLIHQLEAKDTGEYACVTGGQKTAASLRVTEPEVTIVRGLVDAEVTADEDVEFSCEVSRAGATGVQWCLQGLPLQSNEVTEVAVRDGRIHTLRLKGVTPEDAGTVSFHLGNHASSAQLTVRAPEVTILEPLQDVQLSEGQDASFQCRLSRASGQEARWALGGVPLQANEMNDITVEQGTLHLLTLHKVTLEDAGTVSFHVGTCSSEAQLKVTAKNTVVRGLENVEALEGGEALFECQLSQPEVAAHTWLLDDEPVHTSENAEVVFFENGLRHLLLLKNLRPQDSCRVTFLAGDMVTSAFLTVRGWRLEILEPLKNAAVRAGAQACFTCTLSEAVPVGEASWYINGAAVQPDDSDWTVTADGSHHALLLRSAQPHHAGEVTFACRDAVASARLTVLGLPDPPEDAEVVARSSHTVTLSWAAPMSDGGGGLCGYRVEVKEGATGQWRLCHELVPGPECVVDGLAPGETYRFRVAAVGPVGAGEPVHLPQTVRLAEPPKPVPPQPSAPESRQVAAGEDVSLELEVVAEAGEVIWHKGMERIQPGGRFEVVSQGRQQMLVIKGFTAEDQGEYHCGLAQGSICPAAATFQVALSPASVDEAPQPSLPPEAAQEGDLHLLWEALARKRRMSREPTLDSISELPEEDGRSQRLPQEAEEVAPDLSEGYSTADELARTGDADLSHTSSDDESRAGTPSLVTYLKKAGRPGTSPLASKVGAPAAPSVKPQQQQEPLAAVRPPLGDLSTKDLGDPSMDKAAVKIQAAFKGYKVRKEMKQQEGPMFSHTFGDTEAQVGDALRLECVVASKADVRARWLKDGVELTDGRHHHIDQLGDGTCSLLITGLDRADAGCYTCQVSNKFGQVTHSACVVVSGSESEAESSSGGELDDAFRRAARRLHRLFRTKSPAEVSDEELFLSADEGPAEPEEPADWQTYREDEHFICIRFEALTEARQAVTRFQEMFATLGIGVEIKLVEQGPRRVEMCISKETPAPVVPPEPLPSLLTSDAAPVFLTELQNQEVQDGYPVSFDCVVTGQPMPSVRWFKDGKLLEEDDHYMINEDQQGGHQLIITAVVPADMGVYRCLAENSMGVSSTKAELRVDLTSTDYDTAADATESSSYFSAQGYLSSREQEGTESTTDEGQLPQVVEELRDLQVAPGTRLAKFQLKVKGYPAPRLYWFKDGQPLTASAHIRMTDKKILHTLEIISVTREDSGQYAAYISNAMGAAYSSARLLVRGPDEPEEKPASDVHEQLVPPRMLERFTPKKVKKGSSITFSVKVEGRPVPTVHWLREEAERGVLWIGPDTPGYTVASSAQQHSLVLLDVGRQHQGTYTCIASNAAGQALCSASLHVSGLPKVEEQEKVKEALISTFLQGTTQAISAQGLETASFADLGGQARGSEEPLAAKEALGHLSLAEVGTEEFLQKLTSQITEMVSAKITQAKLQVPGGDSDEDSKTPSASPRHGRSRPSSSIQESSSESEDGDARGEIFDIYVVTADYLPLGAEQDAITLREGQYVEVLDAAHPLRWLVRTKPTKSSPSRQGWVSPAYLDRRLKLSPEWGAAEAPEFPGEAVSEDEYKARLSSVIQELLSSEQAFVEELQFLQSHHLQHLERCPHVPIAVAGQKAVIFRNVRDIGRFHSSFLQELQQCDTDDDVAMCFIKNQAAFEQYLEFLVGRVQAESVVVSTAIQEFYKKYAEEALLAGDPSQPPPPPLQHYLEQPVERVQRYQALLKELIRNKARNRQNCALLEQAYAVVSALPQRAENKLHVSLMENYPGTLQALGEPIRQGHFIVWEGAPGARMPWKGHNRHVFLFRNHLVICKPRRDSRTDTVSYVFRNMMKLSSIDLNDQVEGDDRAFEVWQEREDSVRKYLLQARTAIIKSSWVKEICGIQQRLALPVWRPPDFEEELADCTAELGETVKLACRVTGTPKPVISWYKDGKAVQVDPHHILIEDPDGSCALILDSLTGVDSGQYMCFAASAAGNCSTLGKILVQVPPRFVNKVRASPFVEGEDAQFTCTIEGAPYPQIRWYKDGALLTTGNKFQTLSEPRSGLLVLVIRAASKEDLGLYECELVNRLGSARASAELRIQSPMLQAQEQCHREQLVAAVEDTTLERADQEVTSVLKRLLGPKAPGPSTGDLTGPGPCPRGAPALQETGSQPPVTGTSEAPAVPPRVPQPLLHEGPEQEPEAIARAQEWTVPIRMEGAAWPGAGTGELLWDVHSHVVRETTQRTYTYQAIDTHTARPPSMQVTIEDVQAQTGGTAQFEAIIEGDPQPSVTWYKDSVQLVDSTRLSQQQEGTTYSLVLRHVASKDAGVYTCLAQNTGGQVLCKAELLVLGGDNEPDSEKQSHRRKLHSFYEVKEEIGRGVFGFVKRVQHKGNKILCAAKFIPLRSRTRAQAYRERDILAALSHPLVTGLLDQFETRKTLILILELCSSEELLDRLYRKGVVTEAEVKVYIQQLVEGLHYLHSHGVLHLDIKPSNILMVHPAREDIKICDFGFAQNITPAELQFSQYGSPEFVSPEIIQQNPVSEASDIWAMGVISYLSLTCSSPFAGESDRATLLNVLEGRVSWSSPMAAHLSEDAKDFIKATLQRAPQARPSAAQCLSHPWFLKSMPAEEAHFINTKQLKFLLARSRWQRSLMSYKSILVMRSIPELLRGPPDSPSLGVARHLCRDTGGSSSSSSSSDNELAPFARAKSLPPSPVTHSPLLHPRGFLRPSASLPEEAEASERSTEAPAPPASPEGAGPPAAQGCVPRHSVIRSLFYHQAGESPEHGALAPGSRRHPARRRHLLKGGYIAGALPGLREPLMEHRVLEEEAAREEQATLLAKAPSFETALRLPASGTHLAPGHSHSLEHDSPSTPRPSSEACGEAQRLPSAPSGGAPIRDMGHPQGSKQLPSTGGHPGTAQPERPSPDSPWGQPAPFCHPKQGSAPQEGCSPHPAVAPCPPGSFPPGSCKEAPLVPSSPFLGQPQAPPAPAKASPPLDSKMGPGDISLPGRPKPGPCSSPGSASQASSSQVSSLRVGSSQVGTEPGPSLDAEGWTQEAEDLSDSTPTLQRPQEQATMRKFSLGGRGGYAGVAGYGTFAFGGDAGGMLGQGPMWARIAWAVSQSEEEEQEEARAESQSEEQQEARAESPLPQVSARPVPEVGRAPTRSSPEPTPWEDIGQVSLVQIRDLSGDAEAADTISLDISEVDPAYLNLSDLYDIKYLPFEFMIFARGSVPKSAQPEPPSPMAEEELAEFPEPTWPWPGELGPHAGLEITEESEDVDALLAEAAVGRKRKWSSPSRSLFHFPGRHLPLDEPAELGLRERVKASVEHISRILKGRPEGLEKEGPPRKKPGLASFRLSGLKSWDRAPTFLRELSDETVVLGQSVTLACQVSAQPAAQATWSKDGAPLESSSRVLISATLKNFQLLTILVVVAEDLGVYTCSVSNALGTVTTTGVLRKAERPSSSPCPDIGEVYADGVLLVWKPVESYGPVTYIVQCSLEGGSWTTLASDIFDCCYLTSKLSRGGTYTFRTACVSKAGMGPYSSPSEQVLLGGPSHLASEEESQGRSAQPLPSTKTFAFQTQIQRGRFSVVRQCWEKASGRALAAKIIPYHPKDKTAVLREYEALKGLRHPHLAQLHAAYLSPRHLVLILELCSGPELLPCLAERASYSESEVKDYLWQMLSATQYLHNQHILHLDLRSENMIITEYNLLKVVDLGNAQSLSQEKVLPSDKFKDYLETMAPELLEGQGAVPQTDIWAIGVTAFIMLSAEYPVSSEGARDLQRGLRKGLVRLSRCYAGLSGGAVAFLRSTLCAQPWGRPCASSCLQCPWLTEEGPACSRPAPVTFPTARLRVFVRNREKRRALLYKRHNLAQVR

SEQ ID NO: 6076 - protein, 3741 aa, Homo sapiens
MLVIRGASLKDAGEYTCEVEASKSTASLHVEEKANCFTEELTNLQVEEKGTAVFTCKTEHPAATVTWRKGLLELRASGKHQPSQEGLTLRLTISALEKADSDTYTCDIGQAQSRAQLLVQGRRVHIIEDLEDVDVQEGSSATFRCRISPANYEPVHWFLDKTPLHANELNEIDAQPGGYHVLTLRQLALKDSGTIYFEAGDQRASAALRVTEKPSVFSRELTDATITEGEDLTLVCETSTCDIPVCWTKDGKTLRGSARCQLSHEGHRAQLLITGATLQDSGRYKCEAGGACSSSIVRVHARPVRFQEALKDLEVLEGGAATLRCVLSSVAAPVKWCYGNNVLRPGDKYSLRQEGAMLELVVRNLRPQDSGRYSCSFGDQTTSATLTVTALPAQFIGKLRNKEATEGATATLRCELSKAAPVEWRKGSETLRDGDRYCLRQDGAMCELQIRGLAMVDAAEYSCVCGEERTSASLTIRPMPAHFIGRLRHQESIEGATATLRCELSKAAPVEWRKGRESLRDGDRHSLRQDGAVCELQICGLAVADAGEYSCVCGEERTSATLTVKALPAKFTEGLRNEEAVEGATAMLWCELSKVAPVEWRKGPENLRDGDRYILRQEGTRCELQICGLAMADAGEYLCVCGQERTSATLTIRALPARFIEDVKNQEAREGATAVLQCELNSAAPVEWRKGSETLRDGDRYSLRQDGTKCELQIRGLAMADTGEYSCVCGQERTSAMLTVRALPIKFTEGLRNEEATEGATAVLRCELSKMAPVEWWKGHETLRDGDRHSLRQDGARCELQIRGLVAEDAGEYLCMCGKERTSAMLTVRAMPSKFIEGLRNEEATEGDTATLWCELSKAAPVEWRKGHETLRDGDRHSLRQDGSRCELQIRGLAVVDAGEYSCVCGQERTSATLTVRALPARFIEDVKNQEAREGATAVLQCELSKAAPVEWRKGSETLRGGDRYSLRQDGTRCELQIHGLSVADTGEYSCVCGQERTSATLTVRAPQPVFREPLQSLQAEEGSTATLQCELSEPTATVVWSKGGLQLQANGRREPRLQGCTAELVLQDLQREDTGEYTCTCGSQATSATLTVTAAPVRFLRELQHQEVDEGGTAHLCCELSRAGASVEWRKGSLQLFPCAKYQMVQDGAAAELLVRGVEQEDAGDYTCDTGHTQSMASLSVRVPRPKFKTRLQSLEQETGDIARLCCQLSDAESGAVVQWLKEGVELHAGPKYEMRSQGATRELLIHQLEAKDTGEYACVTGGQKTAASLRVTEPEVTIVRGLVDAEVTADEDVEFSCEVSRAGATGVQWCLQGLPLQSNEVTEVAVRDGRIHTLRLKGVTPEDAGTVSFHLGNHASSAQLTVRAPEVTILEPLQDVQLSEGQDASFQCRLSRASGQEARWALGGVPLQANEMNDITVEQGTLHLLTLHKVTLEDAGTVSFHVGTCSSEAQLKVTAKNTVVRGLENVEALEGGEALFECQLSQPEVAAHTWLLDDEPVHTSENAEVVFFENGLRHLLLLKNLRPQDSCRVTFLAGDMVTSAFLTVRGWRLEILEPLKNAAVRAGAQACFTCTLSEAVPVGEASWYINGAAVQPDDSDWTVTADGSHHALLLRSAQPHHAGEVTFACRDAVASARLTVLGLPDPPEDAEVVARSSHTVTLSWAAPMSDGGGGLCGYRVEVKEGATGQWRLCHELVPGPECVVDGLAPGETYRFRVAAVGPVGAGEPVHLPQTVRLAEPPKPVPPQPSAPESRQVAAGEDVSLELEVVAEAGEVIWHKGMERIQPGGRFEVVSQGRQQMLVIKGFTAEDQGEYHCGLAQGSICPAAATFQVALSPASVDEAPQPSLPPEAAQEGDLHLLWEALARKRRMSREPTLDSISELPEEDGRSQRLPQEAEEVAPDLSEGYSTADELARTGDADLSHTSSDDESRAGTPSLVTYLKKAGRPGTSPLASKVGAPAAPSVKPQQQQEPLAAVRPPLGDLSTKDLGDPSMDKAAVKIQAAFKGYKVRKEMKQQEGPMFSHTFGDTEAQVGDALRLECVVASKADVRARWLKDGVELTDGRHHHIDQLGDGTCSLLITGLDRADAGCYTCQVSNKFGQVTHSACVVVSGSESEAESSSGGELDDAFRRAARRLHRLFRTKSPAEVSDEELFLSADEGPAEPEEPADWQTYREDEHFICIRFEALTEARQAVTRFQEMFATLGIGVEIKLVEQGPRRVEMCISKETPAPVVPPEPLPSLLTSDAAPVFLTELQNQEVQDGYPVSFDCVVTGQPMPSVRWFKDGKLLEEDDHYMINEDQQGGHQLIITAVVPADMGVYRCLAENSMGVSSTKAELRVDLTSTDYDTAADATESSSYFSAQGYLSSREQEGTESTTDEGQLPQVVEELRDLQVAPGTRLAKFQLKVKGYPAPRLYWFKDGQPLTASAHIRMTDKKILHTLEIISVTREDSGQYAAYISNAMGAAYSSARLLVRGPDEPEEKPASDVHEQLVPPRMLERFTPKKVKKGSSITFSVKVEGRPVPTVHWLREEAERGVLWIGPDTPGYTVASSAQQHSLVLLDVGRQHQGTYTCIASNAAGQALCSASLHVSGLPKVEEQEKVKEALISTFLQGTTQAISAQGLETASFADLGGQARGSEEPLAAKEALGHLSLAEVGTEEFLQKLTSQITEMVSAKITQAKLQVPGGDSDEDSKTPSASPRHGRSRPSSSIQESSSESEDGDARGEIFDIYVVTADYLPLGAEQDAITLREGQYVEVLDAAHPLRWLVRTKPTKSSPSRQGWVSPAYLDRRLKLSPEWGAAEAPEFPGEAVSEDEYKARLSSVIQELLSSEQAFVEELQFLQSHHLQHLERCPHVPIAVAGQKAVIFRNVRDIGRFHSSFLQELQQCDTDDDVAMCFIKNQAAFEQYLEFLVGRVQAESVVVSTAIQEFYKKYAEEALLAGDPSQPPPPPLQHYLEQPVERVQRYQALLKELIRNKARNRQNCALLEQAYAVVSALPQRAENKLHVSLMENYPGTLQALGEPIRQGHFIVWEGAPGARMPWKGHNRHVFLFRNHLVICKPRRDSRTDTVSYVFRNMMKLSSIDLNDQVEGDDRAFEVWQEREDSVRKYLLQARTAIIKSSWVKEICGIQQRLALPVWRPPDFEEELADCTAELGETVKLACRVTGTPKPVISWYKDGKAVQVDPHHILIEDPDGSCALILDSLTGVDSGQYMCFAASAAGNCSTLGKILVQVPPRFVNKVRASPFVEGEDAQFTCTIEGAPYPQIRWYKDGALLTTGNKFQTLSEPRSGLLVLVIRAASKEDLGLYECELVNRLGSARASAELRIQSPMLQAQEQCHREQLVAAVEVTEQETKVPKKTVIIEETITTVVKSPRGQRRSPSKSPSRSPSRCSASPLRPGLLAPDLLYLPGAGQPRRPEAEPGQKPVVPTLYVTEAEAHSPALPGLSGPQPKWVEVEETIEVRVKKMGPQGVSPTTEVPRSSSGHLFTLPGATPGGDPNSNNSNNKLLAQEAWAQGTAMVGVREPLVFRVDARGSVDWAASGMGSLEEEGTMEEAGEEEGEDGDAFVTEESQDTHSLGDRDPKILTHNGRMLTLADLEDYVPGEGETFHCGGPGPGAPDDPPCEVSVIQREIGEPTVGQPVLLSVGHALGPRGPLGLFRPEPRGASPPGPQVRSLEGTSFLLREAPARPVGSAPWTQSFCTRIRRSADSGQSSFTTELSTQTVNFGTVGETVTLHICPDRDGDEAAQP

SEQ ID NO: 6077 - protein, 355 aa, Homo sapiens
MATAALLRGATPGRGGPVWRWRLRAAPRCRLAHSSCSPGGDPTAGAAWACFRLDGRTLLRVRGPDAAPFLLGLLTNELPLPSPAAAGAPPAARAGYAHFLNVQGRTLYDVILYGLQEHSEVSGFLLECDSSVQGALQKHLALYRIRRKVTVEPHPELRVWAVLPSSPEACGAASLQERAGAAAILIRDAAARMGWRLLTQDEGPALVPGGRLGDLWDYHQHRYLQGVPEGVRDLPPGVALPLESNLAFMNGVSFTKGCYIGQELTARTHHMGVIRKRLFPVRFLDPLPTSGITPGATVLTASGQTVGKFRAGQGNVGLALLWSEKIKGPLHIRASEGAQVALAASVPDWWPTVSK

SEQ ID NO: 6078 - protein, 463 aa, Homo sapiens
MRAARRGLHCAGAERPRRRGRLWDSSGVPQRQKRPGPWRTQTQEQMSRDVCIHTWPCTYYLEPKRRWVTGQLSLTSLSLRFMTDSTGEILVSFPLSSIVEIKKEASHFIFSSITILEKGHAKHWFSSLRPSRNVVFSIIEHFWRELLLSQPGAVADASVAARGEELTGLMAGSQKRLEDTARVLHHQGQQLDSVMRGLDKMESDLEVADRLLTELESPAWWPFSSKLWKTPPETKPREDVSMTSCEPFGKEGILIKIPAVISHRTESHVKPGRLTVLVSGLEIHDSSSLLMHRFEREDVDDIKVHSPYEISIRQRFIGKPDMAYRLISAKMPEVIPILEVQFSKKMELLEDALVLRSARTSSPAEKSCSVWHAASGLMGRTLHREPPAGDQEGTALHLQTSLPALSEADTQELTQILRRMKGLALEAESELERQDEALDGVAAAVDRATLTIDKHNRRMKRLT

SEQ ID NO: 6079 - protein, 222 aa, Homo sapiens
MTSCEPFGKEGILIKIPAVISHRTESHVKPGRLTVLVSGLEIHDSSSLLMHRFEREDVDDIKVHSPYEISIRQRFIGKPDMAYRLISAKMPEVIPILEVQFSKKMELLEDALVLRSARTSSPAEKSCSVWHAASGLMGRTLHREPPAGDQEGTALHLQTSLPALSEADTQELTQILRRMKGLALEAESELERQDEALDGVAAAVDRATLTIDKHNRRMKRLT

SEQ ID NO: 6080 - protein, 66 aa, Homo sapiens
MPQYQTWEEFSRAAEKLYLADPMKARVVLKYRHSDGNLCVKVTDDLVQWHLNYCTLRHGIAGGLET

SEQ ID NO: 6081 - protein, 82 aa, Homo sapiens
MPQYQTWEEFSRAAEKLYLADPMKARVVLKYRHSDGNLCVKVTDDLVRQCLALLLRLQCSGMIIAHCILDLLGSSGPLASAS

SEQ ID NO: 6082 - protein, 216 aa, Homo sapiens
MQANGAGGGGGGGGGGGGGGGGGGGQGQTPELACLSAQNGESSPSSSSSAGDLAHANGLLPSAPSAASNNSNSLNVNNGVPGGAAAASSATVAAASATTAASSSLATPELGSSLKKKKRLSQSDEDVIRLIGQHLNGLGLNQTVDLLMQESGCRLEHPSATKFRNHVMEGDWDKAENDLNELKPLVHSPHAIVAQTFSETSINFFPLTAAFCHVRG

SEQ ID NO: 6083 - protein, 779 aa, Homo sapiens; identical to SEQ ID NO: 5853

SEQ ID NO: 6084 - protein, 221 aa, Homo sapiens
MAAASGSVLQRCIVSPAGRHSASLIFLHGSGDSGQGLRMWIKQVLNQDLTFQHIKIIYPTAPPRFKITNDCPEHLESIDVMCQVLTDLIDEEVKSGIKKNRILIGGFSMGGCMAIHLAYRNHQDVAGVFALSSFLNKASAVYQALQKSNGVLPELFQCHGTADELVLHSWAEETNSMLKSLGVTTKFHSFPNVYHELSKTELDILKLWILTKLPGEMEKQK

SEQ ID NO: 6085 - protein, 237 aa, Homo sapiens
MAAASGSVLQRCIVSPAGRHSASLIFLHGSGDSGQGLRMWIKQVLNQDLTFQHIKIIYPTAPPRSYTPMKGGISNVWFDRFKITNDCPEHLESIDVMCQVLTDLIDEEVKSGIKKNRILIGGFSMGGCMAIHLAYRNHQDVAGVFALSSFLNKASAVYQALQKSNGVLPELFQCHGTADELVLHSWAEETNSMLKSLGVTTKFHSFPNVYHELSKTELDILKLWILTKLPGEMEKQK

SEQ ID NO: 6086 - protein, 156 aa, Homo sapiens
METAKEMTRESLPIKCLEAVILGIYLTNGQPSIERFPISFKTYFSGNYFHHVVLGIYCNGRYGSLGMSRRAELMDKPLTFRTLSDLIFDFEDSYKKYLHTVKKVKIGLYVPHEPHSFQPIEWKQLVLNVSKMLRADIRKELEKYARDMRMKGLCSH

SEQ ID NO: 6087 - protein, 311 aa, Homo sapiens
MTGSAADTHRCPHPKGAKGTRSRSSHARPVSLATSGGSEEEDKDGGVLFHVNKSGFPIDSHTWERMWMHVAKVHPKGGEMVGAIRNAAFLAKPSIPQVPNYRLSMTIPDWLQAIQNYMKTLHYLTNGQPSIERFPISFKTYFSGNYFHHVVLGIYCNGRYGSLGMSRRAELMDKPLTFRTLSDLIFDFEDSYKKYLHTVKKVKIGLYVPHEPHSFQPIEWKQLVLNVSKMLRADIRKELEKYARDMRMKILKPASAHSPTQVRSRGKSLSPRRRQASPPRRLGRREKSPALPEKKVADLSTLNEVGYQIRI

SEQ ID NO: 6088 - protein, 290 aa, Homo sapiens
MWMHVAKVHPKGGEMVGAIRNAAFLAKPSIPQVPNYRLSMTIPDWLQAIQNYMKTLQYNHTGTQFFEIRKMRPLSGLMETAKEMTRESLPIKCLEAVILGIYLTNGQPSIERFPISFKTYFSGNYFHHVVLGIYCNGRYGSLGMSRRAELMDKPLTFRTLSDLIFDFEDSYKKYLHTVKKVKIGLYVPHEPHSFQPIEWKQLVLNVSKMLRADIRKELEKYARDMRMKILKPASAHSPTQVRSRGKSLSPRRRQASPPRRLGRREKSPALPEKKVADLSTLNEVGYQIRI

SEQ ID NO: 6089 - protein, 251 aa, Homo sapiens
MTIPDWLQAIQNYMKTLQYNHTGTQFFEIRKMRPLSGLMETAKEMTRESLPIKCLEAVILGIYLTNGQPSIERFPISFKTYFSGNYFHHVVLGIYCNGRYGSLGMSRRAELMDKPLTFRTLSDLIFDFEDSYKKYLHTVKKVKIGLYVPHEPHSFQPIEWKQLVLNVSKMLRADIRKELEKYARDMRMKILKPASAHSPTQVRSRGKSLSPRRRQASPPRRLGRREKSPALPEKKVADLSTLNEVGYQIRI

SEQ ID NO: 6090 - protein, 290 aa, Homo sapiens; identical to SEQ ID NO: 6088

SEQ ID NO: 6091 - protein, 240 aa, Homo sapiens
MAGSPELVVLDPPWDKELAAGTESQALVSATPREDFRVRCTSKRAVTEMLQLCGRFVQKLGDALPEEIREPALRDAQWTFESAVQENISINGQAWQEASDNCFMDSDIKVLEDQFDEIIVDIATKRKQYPRKILECVIKTIKAKQEILSLPALIEQGEGFSQVLRMQPVIHLQRIHQEVFSSCHRKPDAKPENFITQIETTPTETASRKTSDMVLKRKQTKDCPQRKWYPLRPKKINLDT

SEQ ID NO: 6092 - protein, 172 aa, Homo sapiens
MAGSPELVVLDPPWDKELAAGTESQALVSATPREDFRVRCTSKRAVTEMLQLCGRFVQKLGDALPEEIREPALRDAQWTFESAVQENISINGQAWQEASDNCFMDSDIKVLEDQFDEIIVDIATKRKQYPRKILECVIKTIKAKQEILKQYHPVVHPLDLKYDPDPVLACIN

SEQ ID NO: 6093 - protein, 281 aa, Homo sapiens
MAGSPELVVLDPPWDKELAAGTESQALVSATPREDFRVRCTSKRAVTEMLQLCGRFVQKLGDALPEEIREPALRDAQWTFESAVQENISINGQAWQEASDNCFMDSDIKVLEDQFDEIIVDIATKRKQYPRKILECVIKTIKAKQEILKQYHPVVHPLDLKYDPDPAPHMENLKCRGETVAKEISEAMKSLPALIEQGEGFSQVLRMQPVIHLQRIHQEVFSSCHRKPDAKPENFITQIETTPTETASRKTSDMVLKRKQTKDCPQRKWYPLRPKKINLDT

SEQ ID NO: 6094 - protein, 75 aa, Homo sapiens
MDSDIKVLEDQFDEIIVDIATKRKQYPRKILECVIKTIKAKQEILKQYHPVVHPLDLKYDPDPGAKPGGLALGAV

SEQ ID NO: 6095 - protein, 92 aa, Homo sapiens
MEDYQAAEETAFVVDEVSNIVKEAIESAIGGNAYQHSKVNQWTTNVVEQTLSQLTKLGKPFKYIGNGVLFLLYLRDGFLTLIRGASSTRNNS

SEQ ID NO: 6096 - protein, 67 aa, Homo sapiens [sequence omitted]

SEQ ID NO: 6097 - protein, 113 aa, Homo sapiens
MEDYQAAEETAFVVDEVSNIVKEAIESAIGGNAYQHSKVNQWTTNVVEQTLSQLTKLGKPFKYIVTCVIMQKNGAGLHTASSCFWDSSTDGSCTVRWENKTMYCIVSAFGLSI

SEQ ID NO: 6098 - protein, 677 aa, Homo sapiens
MYAAVEHGPVLCSDSNILCLSWKGRVPKSEKEKPVCRRRYYEEGWLATGNGRGVVGVTFTSSHCRRDRSTPQRINFNLRGHNSEVVLVRWNEPYQKLATCDADGGIFVWIQYEGRWSVELVNDRGAQVSDFTWSHDGTQALISYRDGFVLVGSVSGQRHWSSEINLESQITCGIWTPDDQQVLFGTADGQVIVMDCHGRMLAHVLLHESDGVLGMSWNYPIFLVEDSSESDTDSDDYAPPQDGPAAYPIPVQNIKPLLTVSFTSGDISLMNNYDDLSPTVIRSGLKEVVAQWCTQGDLLAVAGMERQTQLGELPNGPLLKSAMVKFYNVRGEHIFTLDTLVQRPIISICWGHRDSRLLMASGPALYVVRVEHRVSSLQLLCQQAIASTLREDKDVSKLTLPPRLCSYLSTAFIPTIKPPIPDPNNMRDFVSYPSAGNERLHCTMKRTEDDPEVGGPCYTLYLEYLGGLVPILKGRRISKLRPEFVIMDAADSKPDEIYGNSLISTVIDSCNCSDSSDIELSDDWAAKKSPKISRASKSPKLPRISIEARKSPKLPRAAQELSRSPRLPLRKPSVGSPSLTRREFPFEDITQHNYLAQVTSNIWGTKFKIVGLAAFLPTNLGAVIYKTSLLHLQPRQMTIYLPEVRKISMDYINLPVFNPNVFSEDEDDLPGDAVWTD

SEQ ID NO: 6099 - protein, 1541 aa, Homo sapiens
MYAAVEHGPVLCSDSNILCLSWKGRVPKSEKEKPVCRRRYYEEGWLATGNGRGVVGVTFTSSHCRRDRSTPQRINFNLRGHNSEVVLVRWNEPYQKLATCDADGGIFVWIQYEGRWSVELVNDRGAQVSDFTWSHDGTQALISYRDGFVLVGSVSGQRHWSSEINLESQITCGIWTPDDQQVLFGTADGQVIVMDCHGRMLAHVLLHESDGVLGMSWNYPIFLVEDSSESDTDSDDYAPPQDGPAAYPIPVQNIKPLLTVSFTSGDISLMNNYDDLSPTVIRSGLKEVVAQWCTQGDLLAVAGMERQTQLGELPNGPLLKSAMVKFYNVRGEHIFTLDTLVQRPIISICWGHRDSRLLMASGPALYVVRVEHRVSSLQLLCQQAIASTLREDKDVSKLTLPPRLCSYLSTAFIPTIKPPIPDPNNMRDFVSYPSAGNERLHCTMKRTEDDPEVGGPCYTLYLEYLGGLVPILKGRRISKLRPEFVIMDAADSKPDEIYGNSLISTVIDSCNCSDSSDIELSDDWAAKKSPKISRASKSPKLPRISIEARKSPKLPRAAQELSRSPRLPLRKPSVGSPSLTRREFPFEDITQHNYLAQVTSNIWGTKFKIVGLAAFLPTNLGAVIYKTSLLHLQPRQMTIYLPEVRKISMDYINLPVFNPNVFSEDEDDLPVTGASGVPENSPPCTVNIPIAPIHSSAQAMSPTQSIGLVQSLLANQNVQLDVLTNQTTAVGTAEHAGDSATQYPVSNRYSNPGQVIFGSVEMGRIIQNPPPLSLPPPPQGPMQLSTVGHGDRDHEHLQKSAKALRPTPQLAAEGDAVVFSAPQEVQVTKINPPPPYPGTIPAAPTTAAPPPPLPPPQPPVDVCLKKGDFSLYPTSVHYQTPLGYERITTFDSSGNVEEVCRAARMLCSQNTYTLPGPGSSATLRLTATEKKVPQPCSSATLNRLTVPRYSIPTGDPPPYPEIASQLAQGRGAAQRSDNSLIHATLRRNNREATLKMAQLADSPRAPLQPLAKSKGGPGGVVTQLPARPPPALYTCSQCSGTGPSSQPGASLAHTASASPLASQSSYSLLSPPDSARDRTDYVNSAFTEDEALSQHCQLEKPLRHPPLPEAAVTLKRPPPYQWDPMLGEDVWVPQERTAQTSGPNPLKLSSLMLSQGQHLDVSRLPFISPKSPASPTATFQTGYGMGVPYPGSYNNPPLPGVQAPCSPKDALSPTQFAQQEPAVVLQPLYPPSLSYCTLPPMYPGSSTCSSLQLPPVALHPWSSYSACPPMQNPQGTLPPKPHLVVEKPLVSPPPADLQSHLGTEVMVETADNFQEVLSLTESPVPQRTEKFGKKNRKRLDSRAEEGSVQAITEGKVKKEARTLSDFNSLISSPHLGREKKKVKSQKDQLKSKKLNKTNEFQDSSESEPELFISGDELMNQSQGSRKGWKSKRSPRAAGELEEAKCRRASEKEDGRLGSQGFVYVMANKQPLWNEATQVYQLDFGGRVTQESAKNFQIELEGRQVMQFGRIDGSAYILDFQYPFSAVQAFAVALANVTQRLK

SEQ ID NO: 6100 - protein, 1077 aa, Homo sapiens
MDSKMKKMAELQLSVVSDPKNRKAIENQIQQWEQNLEKFHMDLFRMRCYLASLQGGELPNPKSLLAAASRPSKLALGRLGILSVSSFHALVCSRDDSALRKRTLSLTQRGRNKKGIFSSLKGLDTLARKGKEKRPSITQIFDSSGSHGFSGTQLPQNSSNSSEVDELLHIYGSTVDGVPRDNAWEIQTYVHFQDNHGVTVGIKPEHRVEDILTLACKMRQLEPSHYGLQLRKLVDDNVEYCIPAPYEYMQQQVYDEIEVFPLNVYDVQLTKTGSVCDFGFAVTAQVDERQHLSRIFISDVLPDGLAYGEGLRKGNEIMTLNGEAVSDLDLKQMEALFSEKSVGLTLIARPPDTKATLCTSWSDSDLFSRDQKSLLPPPNQSQLLEEFLDNFKKNTANDFSNVPDITTGLKRSQTDGTLDQVSHREKMEQTFRSAEQITALCRSFNDSQANGMEGPRENQDPPPRSLARHLSDADRLRKVIQELVDTEKSYVKDLSCLFELYLEPLQNETFLTQDEMESLFGSLPEMLEFQKVFLETLEDGISASSDFNTLETPSQFRKLLFSLGGSFLYYADHFKLYSGFCANHIKVQKVLERAKTDKAFKAFLDARNPTKQHSSTLESYLIKPVQRVLKYPLLLKELVSLTDQESEEHYHLTEALKAMEKVASHINEMQKIYEDYGTVFDQLVAEQSGTEKEVTELSMGELLMHSTVSWLNPFLSLGKARKDLELTVFVFKRAVILVYKENCKLKKKLPSNSRPAHNSTDLDPFKFRWLIPISALQVRLGNPAGTENNSIWELIHTKSEIEGRPETIFQLCCSDSESKTNIVKVIRSILRENFRRHIKCELPLEKTCKDRLVPLKNRVPVSAKLASSRSLKVLKNSSSNEWTGETGKGTLLDSDEGSLSSGTQSSGCPTAEGRQDSKSTSPGKYPHPGLADFADNLIKESDILSDEDDDHRQTVKQGSPTKDIEIQFQRLRISEDPDVHPEAEQQPGPESGEGQKGGEQPKLVRGHFCPIKRKANSTKRDRGTLLKAQIRHQSLDSQSENATIDLNSVLEREFSVQSLTSVVSEECFYETESHGKS

SEQ ID NO: 6101 - protein, 192 aa, Homo sapiens
MSQCACLEEVHLPNIKPGEGLGMYIKSTYDGLHVITGTTENVGWQLKNLVKKLRENPTGVVLLLKKRPTGSFNFTPAPLKNLRWKPPLVQTSPPPATTQSPESTMDTSLKKEKSAILDLYIPPPPAVPYSPRDENGSFVYGGSSKCKQPLPGPKGSESPNSFLDQESRRRRFTIADSDQLPGYSVETNILPT

SEQ ID NO: 6102 - protein, 555 aa, Homo sapiens
MEPVTKWSPKQVVDWTRGLDDCLQQYVHKFEREKINGEQLLQISHQDLEELGVTRIGHQELVLEAVDLLCALNYGLETDNMKNLVLKLRASSHNLQNYISSRRKSPAYDGNTSRKAPNEFLTSVVELIGAAKALLAWLDRAPFTGITDFSVTKNKIIQLCLDLTTTVQKDCFVAEMEDKVLTVVKVLNGICDKTIRSTTDPVMSQCACLEEVHLPNIKPGEGLGMYIKSTYDGLHVITGTTENSPADRSQKIHAGDEVIQVNQQTVVGWQLKNLVKKLRENPTGVVLLLKKRPTGSFNFTPAPLKNLRWKPPLVQTSPPPATTQSPESTMDTSLKKEKSAILDLYIPPPPAVPYSPRDENGSFVYGGSSKCKQPLPGPKGSESPNSFLDQESRRRRFTIADSDQLPGYSVETNILPTKMREKTPSYGKPRPLSMPADGNWMGIVDPFARPRGHGRKGEDALCRYFSNERIPPIIEESSSPPYRFSRPTTERHLVRGADYIRGSRCYINSDLHSSATIPFQEEGTKKKSGSSATKSSSTEPSLLVSWFTRLKLLTH

SEQ ID NO: 6103 - protein, 235 aa, Homo sapiens
MRSRVLWGAARWLWPRRAVGPARRPLSSGSPPLEELFTRGGPLRTFLERQAGSEAHLKVRRPELLAVIKLLNEKERELRETEHLLHDENEDLRKLAENEITLCQKEITQLKHQIILLLVPSEETDENDLILEVTAGVGGGLRHASASIGGSEAYRHMKFEGGVHRVQRVPKTEKQGRVHTSTMTVAILPQPTEINLVINPKDLRIDTKRASGAGGQHVNTTDSAVRIVHLPTDWK

SEQ ID NO: 6104 - protein, 271 aa, Homo sapiens
MRSRVLWGAARWLWPRRAVGPARRPLSSGSPPLEELFTRGGPLRTFLERQAGSEAHLKVRRPELLAVIKLLNEKERELRETEHLLHDENEDLRKLAENEITLCQKEITQLKHQIILLLVPSEETDENDLILEVTAGVGGQEAMLFTSEIFDMYQQYAAFKRWHFETLEYFPSELGGLRHASASIGGSEAYRHMKFEGGVHRVQRVPKTEKQGRVHTSTMTVAILPQPTEINLVINPKDLRIDTKRASGAGGQHVNTTDSAVRIVHLPTDWK

SEQ ID NO: 6105 - protein, 380 aa, Homo sapiens
MRSRVLWGAARWLWPRRAVGPARRPLSSGSPPLEELFTRGGPLRTFLERQAGSEAHLKVRRPELLAVIKLLNEKERELRETEHLLHDENEDLRKLAENEITLCQKEITQLKHQIILLLVPSEETDENDLILEVTAGVGGQEAMLFTSEIFDMYQQYAAFKRWHFETLEYFPSELGGLRHASASIGGSEAYRHMKFEGGVHRVQRVPKTEKQGRVHTSTMTVAILPQPTEINLVINPKDLRIDTKRASGAGGQHVNTTDSAVRIVHLPTGVVSECQQERSQLKNKELAMTKLRAKLYSMHLEEEINKRQNARKIQIGSKGRSEKIRTYNFPQNRVTDHRINKTLHDLETFMQGDYLLDELVQSLKEYADYESLVEIISQKV

SEQ ID NO: 6106 - protein, 1185 aa, Homo sapiens
MCEVMPTINEGDRLGPPHGADADANFEQLMVNMLDEREKLLESLRESQETLAATQSRLQDAIHERDQLQRHLNSALPQEFATLTRELSMCREQLLEREEEISELKAERNNTRLLLEHLECLVSRHERSLRMTVVKRQAQSPSGVSSEVEVLKALKSLFEHHKALDEKVRERLRAALERVTTLEEQLAGAHQQVSALQQGAGVRDGAAEEEGTVELGPKRLWKEDTGRVEELQELLEKQNFELSQARERLVTLTTTVTELEEDLGTARRDLIKSEELSSKHQRDLREALAQKEDMEERITTLEKRYLAAQREATSIHDLNDKLENELANKESLHRQCEEKARHLQELLEVAEQKLQQTMRKAETLPEVEAELAQRIAALTKAEERHGNIEEHLRQLEGQLEEKNQELARVRQREKMNEDHNKRLSDTVDRLLSESNERLQLHLKERMAALEEKGRLSEEIEKLRQEVDQLKGRGGPFVDGVHSRSHMGSAADVRFSLGTTTHAPPGVHRRYSALREESAKDWETSPLPGMLAPAAGPAFDSDPEISDVDEDEPGGLVGSADVVSPSGHSDAQTLAMMLQEQLDAINEEIRMIQEEKESTELRAEEIETRVTSGSMEALNLKQLRKRGSIPTSLTALSLASASPPLSGRSTPKLTSRSAAQDLDRMGVMTLPSDLRKHRRKLLSPVSREENREDKATIKCETSPPSSAALRLEKLGHPALSQEEGKSALEDQGSNPSSSNSSQDSLHKGAKRKGIKSSIGRLFGKKEKGRLIQLSRDGATGHVLLTDSEFSMQEPMVPAKLGTQAEKDRRLKKKHQLLEDARRKGMPFAQWDGPTVVSWLELWVGMPAWYVAACRANVKSGAIMSALSDTEIQREIGISNALHRLKLRLAIQEMVSLTSPSAPPTSRTSSGNVWVTHEEMETLETSTKTDSEEGSWAQTLAYGDMNHEWIGNEWLPSLGLPQYRSYFMECLVDARMLDHLTKKDLRVHLKMVDSFHRTSLQYGIMCLKRLNYDRKELEKRREESQHEIKDVLVWTNDQVVHWVQSIGLRDYAGNLHESGVHGALLALDENFDHNTLALILQIPTQNTQARQVMEREFNNLLALGTDRKLDDGDDKVFRRAPSWRKRFRPREHHGRGGMLSASAETLPAGFRVSTLGTLQPPPAPPKKIMPEAHSHYLYGHMLSAFRD

SEQ ID NO: 6107 - protein, 600 aa, Homo sapiens
MSRVAKYRRQVSEDPDIDSLLETLSPEEMEELEKELDVVDPDGSVPVGLRQRNQTEKQSTGVYNREAMLNFCEKETKKLMQREMSMDESKQVETKTDAKNGEERGRDASKKALGPRRDSDLGKEPKRGGLKKSFSRDRDEAGGKSGEKPKEEKIIRGIDKGRVRAAVDKKEAGKDGRGEERAVATKKEEEKKGSDRNTGLSRDKDKKREEMKEVAKKEDDEKVKGERRNTDTRKEGEKMKRAGGNTDMKKEDEKVKRGTGNTDTKKDDEKVKKNEPLHEKEAKDDSKTKTPEKQTPSGPTKPSEGPAKVEEEAAPSIFDEPLERVKNNDPEMTEVNVNNSDCITNEILVRFTEALEFNTVVKLFALANTRADDHVAFAIAIMLKANKTITSLNLDSNHITGKGILAIFRALLQNNTLTELRFHNQRHICGGKTEMEIAKLLKENTTLLKLGYHFELAGPRMTVTNLLSRNMDKQRQKRLQEQRQAQEAKGEKKDLLEVPKAGAVAKGSPKPSPQPSPKPSPKNSPKKGGAPAAPPPPPPPLAPPLIMENLKNSLSPATQRKMGDKVLPAQEKNSRDQLLAAIRSSNLKQLKKVEVPKLLQ

SEQ ID NO: 6108 - protein, 275 aa, Homo sapiens
MGTRLPLVLRQLRRPPQPPGPPRRLRVPCRASSGGGGGGGGGREGLLGQRRPQDGQARSSCSPGGRTPAARDSIVREVIQNSKEVLSLLQEKNPAFKPVLAIIQAGDDNLMQEINQNLAEEAGLNITHICLPPDSSEAEIIDEILKINEDTRVHGLALQISENLFSNKVLNALKPEKDVDGVTDINLGKLVRGDAHECFVSPVAKAVIELLEKSGVNLDGKKILVVGAHGSLEAALQCLFQRKGSMTMSIQWKTRQLQSKTESRSVTRLECRRVI

SEQ ID NO: 6109 - protein, 332 aa, Homo sapiens
  VARIANT 1: note = X can be any amino acid
XGREGLLGQRRPQDGQARSSCSPGGRTPAARDSIVREVIQNSKEVLSLLQEKNPAFKPVLAIIQAGDDNLMQEINQNLAEEAGLNITHICLPPDSSEAEIIDEILKINEDTRVHGLALQISENLFSNKVLNALKPEKDVDGVTDINLGKLVRGDAHECFVSPVAKAVIELLEKSVGVNLDGKKILVVGAHGSLEAALQCLFQRKGSMTMSIQWKTRQLQSKLHEADIVVLGSPKPEEIPLTWIQPGTTVLNCSHDFLSGKVGCGSPRIHFGGLIEEDDVILLAAALRIQNMVSSGRRWLREQQHRRWRLHCLKLQPLSPVPSDIEISRGQTP

SEQ ID NO: 6110 - protein, 978 aa, Homo sapiens
MGTRLPLVLRQLRRPPQPPGPPRRLRVPCRASSGGGGGGGGGREGLLGQRRPQDGQARSSCSPGGRTPAARDSIVREVIQNSKEVLSLLQEKNPAFKPVLAIIQAGDDNLMQEINQNLAEEAGLNITHICLPPDSSEAEIIDEILKINEDTRVHGLALQISENLFSNKVLNALKPEKDVDGVTDINLGKLVRGDAHECFVSPVAKAVIELLEKSGVNLDGKKILVVGAHGSLEAALQCLFQRKGSMTMSIQWKTRQLQSKLHEADIVVLGSPKPEEIPLTWIQPGTTVLNCSHDFLSGKVGCGSPRIHFGGLIEEDDVILLAAALRIQNMVSSGRRWLREQQHRRWRLHCLKLQPLSPVPSDIEISRGQTPKAVDVLAKEIGLLADEIEIYGKSKAKVRLSVLERLKDQADGKYVLVAGITPTPLGEGKSTVTIGLVQALTAHLNVNSFACLRQPSQGPTFGVKGGAAGGGYAQVIPMEEFNLHLTGDIHAITAANNLLAAAIDTRILHENTQTDKALYNRLVPLVNGVREFSEIQLARLKKLGINKTDPSTLTEEEVSKFARLDIDPSTITWQRVLDTNDRFLRKITIGQGNTEKGHYRQAQFDIAVASEIMAVLALTDSLADMKARLGRMVVASDKSGQPVTADDLGVTGALTVLMKDAIKPNLMQTLEGTPVFVHAGPFANIAHGNSSVLADKIALKLVGEEGFVVTEAGFGADIGMEKFFNIKCRASGLVPNVVVLVATVRALKMHGGGPSVTAGVPLKKEYTEENIQLVADGCCNLQKQIQITQLFGVPVVVALNVFKTDTRAEIDLVCELAKRAGAFDAVPCYHWSVGGKGSVDLARAVREAASKRSRFQFLYDVQVPIVDKIRTIAQAVYGAKDIELSPEAQAKIDRYTQQGFGNLPICMAKTHLSLSHQPDKKGVPRDFILPISDVRASIGAGFIYPLVGTMSTMPGLPTRPCFYDIDLDTETEQVKGLF

SEQ ID NO: 6111 - protein, 135 aa, Homo sapiens
MIPNGYLMFEDENFIESSVAKLNALRKSGQFCDVRLQVCGHEMLAHRAVLACCSPYLFEIFNSDSDPHGISHVKFDDLNPEAVEVLLNYAYTAQLKADKELVKDVYSAAKKLKMDRVKQHLLYFCLHSTSTSSLL

SEQ ID NO: 6112 - protein, 642 aa, Homo sapiens
MIPNGYLMFEDENFIESSVAKLNALRKSGQFCDVRLQVCGHEMLAHRAVLACCSPYLFEIFNSDSDPHGISHVKFDDLNPEAVEVLLNYAYTAQLKADKELVKDVYSAAKKLKMDRVKQVCGDYLLSRMDVTSCISYRNFASCMGDSRLLNKVDAYIQEHLLQISEEEEFLKLPRLKLEVMLEDNVCLPSNGKLYTKVINWVQRSIWENGDSLEELMEEVQTLYYSADHKLLDGNLLDGQAEVFGSDDDHIQFVQKKPPRENGHKQISSSSTGCLSSPNATVQSPKHEWKIVASEKTSNNTYLCLAVLDGIFCVIFLHGRNSPQSSPTSTPKLSKSLSFEMQQDELIEKPMSPMQYARSGLGTAEMNGKLIAAGGYNREECLRTVECYNPHTDHWSFLAPMRTPRARFQMAVLMGQLYVVGGSNGHSDDLSCGEMYDSNIDDWIPVPELRTNRCNAGVCALNGKLYIVGGSDPYGQKGLKNCDVFDPVTKLWTSCAPLNIRRHQSAVCELGGYLYIIGGAESWNCLNTVERYNPENNTWTLIAPMNVARRGAGVAVLNGKLFVCGGFDGSHAISCVEMYDPTRNEWKMMGNMTSPRSNAGIATVGNTIYAVGGFDGNEFLNTVEVYNLESNEWSPYTKIFQF

SEQ ID NO: 6113 - protein, 135 aa, Homo sapiens
MSKNTVSSARFRKVDVDEYDENKFVDEEDGGDGQAGPDEGEVDSCLRQGNMTAALQAALKNPPINTKSQAVKDRAGSIVLKVLISFKANDIEKAVQSLDKNGVDLLMKYIYKGFESPSDNSSAMLLQWHEKVPLV

SEQ ID NO: 6114 - protein, 282 aa, Homo sapiens
MASSFLPAGAITGDSGGELSSGDDSGEVEFPHSPEIEETSCLAELFEKAAAHLQGLIQVASREQLLYLYARYKQVKVGNCNTPKPSFFDFEGKQKWEAWKALGDSSPSQAMQEYIAVVKKLDPGWNPQIPEKKGKEANTGFGGPVISSLYHEETIREEDKNIFDYCRENNIDHITKAIKSKNVDVNVKDEEGRALLHWACDRGHKELVTVLLQHRADINCQDNEGQTALHYASACEFLDIVELLLQSGADPTLRDQDGCLPEEVTGCKTVSLVLQRHTTGKA

SEQ ID NO: 6115 - protein, 3121 aa, Homo sapiens
MRSSKSKEVPLPNPRNSQSKDTVQADITTSWDALSQTKAALRHIENKLEVAPTSTAVCDSVMDTKKSSTSATRKISRKDGRYLDDSWVNAPISKSTKSRKEKSRSPLRATTLESNVKKNNRVEFREPLVSYREIHGAPSNFSSSHLESKHVYCVDVNEEKTESGNWMIGSREERNIRSCDFESSQSSVINDTVVRFLNDRPAIDALQNSECLIRMGASMRTEEEMPNRTKGSENNLKLSVNNMAHDTDPKALRLTDSSPSSTSTSNSQRLDILKRRQHDVKLEKLKERIRKQWEHSEETNGRGQKLGHIDHPVMVVNVDNSVTAKVRKVATAPPAPAYKGFNPSETKIRTPDGKVWQEAEFQNMSRELYRDLALHFADDISIKEKPAEKSKEKKVVKPVRKVQKVAQLSSTECRTGSSHLISTSSWRDGQKLVKKILGPAPRMEPKEQRTASSDRGGRERTAKSGGHIGRAESDPRLDVLHRHLQRNSERSRSKSRSENNIKKLASSLPDNKQEENTALNKDFLPIEIRGILDDLQLDSTAHTAKQDTVELQNQKSSAPVHAPRSHSPVKRKPDKITANEDPPVISKRRHYDTDEVRQYIVRQQEERKRKQNEEKKAQKEATEQKNKRLQELYRKQKEAFTKVKNVPPSEPSATRRLQETYSKLLLEKTLLEEPSHQHVTQETQAKPGYQPSGESDKENKVQERPPSASSSSDMSLSEPPQPLARKDLMESTWMQPERLSPQVHHSQPQPFAGTAGSLLSHLLSLEHVGILHKDFESILPTRKNHNMASRPLTFTPQPYVTSPAAYTDALLKPSASQYKSKLDRIEALKATAASLSSRIESEAKKLAGASINYGSAWNTEYDVQQAPQEDGPWTKAVTPPVKDDNEDVFSARIQKMLGSCVSHATFDDDLPGVGNLSEFKKLPEMIRPQSAISSFRVRSPGPKPEGLLAQLCKRQTDSSSSDMQACSQDKAKISLGSSIDSVSEGPLLSEGSLSEEEGDQDGQPLLKVAEILKEKEFCPGERNSYEPIKEFQKEAEKFLPLFGHIGGTQSKGPWEELAKGSPHSVINIFTKSYQLYGKGFEDKLDRGTSTSRPLNATATPLSGVSYEDDFVSSPGTGTSTEKKSTLEPHSTLSPQEDHSNRKSAYDPSSVDVTSQHSSGAQSAASSRSSTSSKGKKGKKEKTEWLDSFTGNVQNSLLDEEKAERGSHQGKKSGTSSKLSVKDFEQTLDTDSTLEDLSGHSVSVSSDKGRSQKTPTSPLSPSSQKSLQFDVAGTSSERSKSSVMPPTITGFKPNAPLTDLNPAASRTTTENMAPIPGSKRFSPAGLHHRMAAELSYLNAIEESVRQLSDVERVRGISLAQQESVSLAQIIKAQQQRHERDLALLKLKAEQEALESQRQLEETRNKAAQVHAESLQQVVQSQREVTEVLQEATCKIAAQQSETARLTTDAARQICEMAELTRTHISDAVVASGAPLAILYDHQRQHLPDFVKQLRTRTETDARGSSPSVSLSQSKEGTLDSKHQKYSASYDSYSESSGYKNHDRRSSSGSSRQESPSVPSCKENEKKLNGEKIESSIDEQVQTAADDSLRSDSVPSLPDEKDSTSIATEYSLKFDESMTEDEIEEQSFRSLLPSESHRRFNMEKRRGHHDDSDEEASPEKTTLSTAKELNMPFSGGQDSFSKFTMEMVRQYMKEEEMRAAHQSSLLRLREKALKEKTKAELAWLEHQKKHLRDKGEDDKMPPLARGSKQRGLLLRLQQEKAEIKRLQEANKAARKERQLILKQQEEIEKIRQTTIKLQEKLKSAGESKLDSHSDDDTKDNKATSPGPTDLETRSPSPISISSSETSSIMQKLKKMRSRMDEKFLTKREQKLMQRRQHAEELLEWKRRLDAEEAEIRQMEKQALAAWDKELIKPKTPKKELEDQRTEQKEIASEEESPVPLYSHLNSESSIPEELGSPAVEYVPSESIGQEQPGSPDHSILTEEMICSQELESSTSPSKHSLPKSCTSVSKQESSKGSHRTGGQCHLPIKSHQHCYSWSDESLSMTQSETTSDQSDIEGRIRALKDELRKRKSVVNQLKKEQKKRQKERLKAQEASLIKQLESYDEFIKKTEAELSQDLETSPTAKPQIKTLSSASEKPKIKPLTPLHRSETAKNWKSLTESERSRGSLESIAEHVDASLSGSERSVSERSLSAYAKRVNEWDSRTEDFQTPSPVLRSSRKIREESGDSLENVPALHLLKELNATSRILDMSDGKVGESSKKSEIKEIEYTKLKKSKIEDAFSKEGKSDVLLKLVLEQGDSSEILSKKDLPLDSENVQKDLVGLAIENLHKSEEMLKERQSDQDMNHSPNIQSGKDIHEQKNTKEKDLSWSEHLFAPKEIPYSEDFEVSSFKKEISAELYKDDFEVSSLLSLRKDSQSCRDKPQPMRSSTSGATSFGSNEEISECLSEKSLSIHSNVHSDRLLELKSPTELMKSKERSDVEHEQQVTESPSLASVPTADELFDFHIGDRVLIGNVQPGILRFKGETSFAKGFWAGVELDKPEGNNNGTYDGIAYFECKEKHGIFAPPQKISHIPENFDDYVDINEDEDCYSDERYQCYNQEQNDTEGPKDREKDVSEYFYEKSLPSVNDIEASVNRSRSLKIETDNVQDISGVLEAHVHQQSSVDSQISSKENKDLISDATEKVSIAAEDDTLDNTFSEELEKQQQFTEEEDNLYAEASEKLCTPLLDLLTREKNQLEAQLKSSLNEEKKSKQQLEKISLLTDSLLKVFVKDTVNQLQQIKKTRDEKIQLSNQELLGDDQKKVTPQDLSQNVEEQSPSISGCFLSSELEDEKEEISSPDMCPRPESPVFGASGQEELAKRLAELELSREFLSALGDDQDWFDEDFGLSSSHKIQKNKAEETIVPLMAEPKRVTQQPCETLLAVPHTAEEVEILVHNAAEELWKWKELGHDLHSISIPTKLLGCASKGLDIESTSKRVYKQAVFDLTKEIFEEIFAEDPNLNQPVWMKPCRINSSYFRRVKNPNNLDEIKSFIASEVLKLFSLKKEPNHKTDWQKMMKFGRKKRDRVDHILVQELHEEEAQWVNYDEDELCVKMQLADGIFETLIKDTIDVLNQISEKQGRMLLV

SEQ ID NO: 6116 - protein, 981 aa, Homo sapiens; identical to SEQ ID NO: 5143

SEQ ID NO: 6117 - protein, 215 aa, Homo sapiens
MSAKRAELKKTHLVKERHCWTSKNYKAVCLELKPEPTKTFDYKAVKQEGRFTKAGVTQDLKNELREVREELKEKMEEIKQIKDLMDKDFDKLHEFVEIMKEMQKDMDEKMDILINTQKNYKLPLRRAPKEQQELRLMGKTHREPQLRPKKMDGASGVNGAPCALHKKTMAPQKTKQGSLDPLHHCGTCCEKCLLCALKNNYNRGIYAAVGLLDLW

SEQ ID NO: 6118 - protein, 201 aa, Homo sapiens
MSAKRAELKKTHLSKNYKAVCLELKPEPTKTFDYKAVKQEGRFTKAGVTQDLKNELREVREELKEKMEEIKQIKDLMDKDFDKLHEFVEIMKEMQKDMDEKMDILINTQKNYKLPLRRAPKEQQELRLMGKTHREPQLRPKKMDGASGVNGAPCALHKKTMAPQKTKQGSLDPLHHCGTCCVSETLPEPSTGARPLAPAPW

SEQ ID NO: 6119 - protein, 99 aa, Homo sapiens
MSAKRAELKKTHLSKNYKAVCLELKPEPTKVRSPFEAMQAARPEIHGEVTRSQGSFADPSGQDLSQTFDYKAVKQEGRFTKAGRTPRLLEELSLLLLPL

SEQ ID NO: 6120 - protein, 212 aa, Homo sapiens
MSAKRAELKKTHLSKNYKAVCLELKPEPTKTFDYKAVKQEGRFTKAGVTQDLKNELREVREELKEKMEEIKQIKDLMDKDFDKLHEFVEIMKEMQKDMDEKMDILINTQKNYKLPLRRAPKEQQELRLMGKTHREPQLRPKKMDGASGVNGAPCALHKKTMAPQKTKQGSLDPLHHCGTCCEKCLLCALKNNYNRAQLQNLPAVPIHHLQAP

SEQ ID NO: 6121 - protein, 133 aa, Homo sapiens
  VARIANT 1: note = X csn be any amino acid
XYELREEHLDKIFKHRELQQKLVDAKLEQAQEMMKEAEERHKREKEYLLNQAAEWKLQAKVLKEQETVLQAQVRPGGRGMGVLSSLSPDKKAGAKGGQQKSSYVAGDGGMGIGNEEQLHIYSYFQVKIKAQYY

SEQ ID NO: 6122 - protein, 228 aa, Homo sapiens
MASEELQKDLEEVKVLLEKATRKRVRDALTAEKSKIETEIKNKMQQKSQKKAELLDNEKPAAVVAPITTGYTVKISNYGWDQSDKFVKIYITLTGVHQVPTENVQVHFTERSFDLLVKNLNGKSYSMIVNNLLKPISVEGSSKKVKTDTVLILCRKKVENTRWDYLTQVEKECKEKEKPSYDTETDPSEGLMNVLKKIYEDGDDDMKRTINKAWVESREKQAKGDTEF

SEQ ID NO: 6123 - protein, 185 aa, Homo sapiens
MQQKSQKKAELLDNEKPAAVVAPITTGYTVKISNYGWDQSDKFVKIYITLTGVHQVPTENVQVHFTERSFDLLVKNLNGKSYSMIVNNLLKPISVEGSSKKVKTDTVLILCRKKVENTRWDYLTQVEKECKEKEKPSYDTETDPSEGLMNVLKKIYEDGDDDMKRTINKAWVESREKQAKGDTEF

SEQ ID NO: 6124 - protein, 377 aa, Homo sapiens
MEQLPDLHSHFSDLNLEAHMYASQWFLTLFTAKFPLCMVFHIIDLLLCEGLNIIFHVALALLKTSKEDLLQADFEGALKFFRVQLPKRYRAEENARRLMEQACNIKVPTKKLKKYEKEYQTMRESQLQQEDPMDRYKRENRRLQEASMRLEQENDDLAHELVTSKIALRNDLDQAEDKADVLNKELLLTKQRLVETEEEKRKQEEETAQLKEVFRKQLEKAEYEIKKTTAIIAEYKQICSQLSTRLEKQQAASKEELEVVKGKMMACKHCSDIFSKEGALKLAATGREDQGIETDDEKDSLKKQLREMELELAQTKLQLVEAKCKIQELEHQRGALMNEIQAAKNSWFSKTLNSIKTATGTQPLQPAPVTQPPKEST

SEQ ID NO: 6125 - protein, 253 aa, Homo sapiens
MIENSSWSMTFEERENRRLQEASMRLEQENDDLAHELVTSKIALRNDLDQAEDKADVLNKELLLTKQRLVETEEEKRKQEEETAQLKEVFRKQLEKAEYEIKKTTAIIAEYKQICSQLSTRLEKQQAASKEELEVVKGKMMACKHCSDIFSKEGALKLAATGREDQGIETDDEKDSLKKQLREMELELAQTKLQLVEAKCKIQELEHQRGALMNEIQAAKNSWFSKTLNSIKTATGTQPLQPAPVTQPPKEST

SEQ ID NO: 6126 - protein, 252 aa, Homo sapiens
MGKSYDGRAYVITGMWNPNAPVFLALNEETPKDKQVYMTVAVDMVVTEVVEPVRFLLETVVRVYPANERFWYFSRKTFTETFFMRLKQSEGKGHTNAGDAIYEVVSLQRESDKEEPVTPTSGGGPMSPQDDEAEEESDNELSSGTGDVSKDCPEKILYSWGELLGKWHSNLGARPKGLSTLVKSGVPEALRAEVWQLLAGCHDNQAMLDRYRILITKVCWSLLEVHSRPCLPGYHQWKLQNSKYCRMANVAA

SEQ ID NO: 6127 - protein, 827 aa, Homo sapiens
MEVRASLQKVSGSSDSVATMNSEEFVLVPQYADDNSTKHEEKPQLKIVSNGDEQLEKAMEEILRDSEKRPSSLLVDCQSSSEISDHSFGDIPASQTNKPSLQLILDPSNTEISTPRPSSPGGLPEEDSVLFNKLTYLGCMKVSSPRNEVEALRAMATMKSSSQYPFPVTLYVPNVPEGSVRIIDQSSNVEIASFPIYKVLFCARGHDGTTESNCFAFTESSHGSEEFQIHVFSCEIKEAVSRILYSFCTAFKRSSRQVSDVKDSVIPTPDSDVFTFSVSLEVKEDDGKGNFRLLVIPIPFEYFSPVPKDRDKFYFKLKQGIEKKVVITVQQLSNKELAIERCFGMLLSPGRNVKNSDMHLLDMESMGKSYDGRAYVITGMWNPNAPVFLALNEETPKDKQVYMTVAVDMVVTEVVEPVRFLLETVVRVYPANERFWYFSRKTFTETFFMRLKQSEGKGHTNAGDAIYEVVSLQRESDKEEPVTPTSGGGPMSPQDDEAEEESDNELSSGTGDVSKDCPEKILYSWGELLGKWHSNLGARPKGLSTLVKSGVPEALRAEVWQLLAGCHDNQAMLDRYRILITKDSAQESVITRDIHRTFPAHDYFKDTGGDGQESLYKICKAYSVYDEDIGYCQGQSFLAAVLLLHMPEEQAFCVLVKIMYDYGLRDLYRNNFEDLHCKFYQLERLMQEQLPDLHSHFSDLNLEAHMYASQWFLTLFTAKFPLCMVFHIIDLLLCEGLNIIFHVALALLKTSKEDLLQADFEGALKFFRVQLPKRYRAEENARRLMEQACNIKVPTKKLKKYEKEYQTMRESQLQQEDPMDRYKFFFL

SEQ ID NO: 6128 - protein, 859 aa, Homo sapiens
MGNREMEELIPLVNRLQDAFSALGQSCLLELPQIAVVGGQSAGKSSVLENFVGRDFLPRGSGIVTRRPLVLQLVTSKAEYAEFLHCKGKKFTDFDEVRLEIEAETDRVTGMNKGISSIPINLRVYSPHVLNLTLIDLPGITKVPVGDQPPDIEYQIREMIMQFITRENCLILAVTPANTDLANSDALKLAKEVDPQGLRTIGVITKLDLMDEGTDARDVLENKLLPLRRGYVGVVNRSQKDIDGKKDIKAAMLAERKFFLSHPAYRHIADRMGTPHLQKVLNQQLTNHIRDTLPNFRNKLQGQLLSIEHEVEAYKNFKPEDPTRKTKALLQMVQQFAVDFEKRIEGSGDQVDTLELSGGAKINRIFHERFPFEIVKMEFNEKELRREISYAIKNIHGIRTGLFTPDMAFEAIVKKQIVKLKGPSLKSVDLVIQELINTVKKCTKKLANFPRLCEETERIVANHIREREGKTKDQVLLLIDIQVSYINTNHEDFIGFANAQQRSSQVHKKTTVGNQVIRKGWLTISNIGIMKGGSKGYWFVLTAESLSWYKDDEEKEKKYMLPLDNLKVRDVEKSFMSSKHIFALFNTEQRNVYKDYRFLELACDSQEDVDSWKASLLRAGVYPDKSVAENDENGQAENFSMDPQLERQVETIRNLVDSYMSIINKCIRDLIPKTIMHLMINNVKDFINSELLAQLYSSEDQNTLMEESAEQAQRRDEMLRMYQALKEALGIIGDISTATVSTPAPPPVDDSWIQHSRRSPPPSPTTQRRPTLSAPLARPTSGRGPAPAIPSPGPHSGAPPVPFRPGPLPPFPSSSDSFGAPPQVPSRPTRAPPSVPSRRPPPSPTRPTIIRPLESSLLD

SEQ ID NO: 6129 - protein, 586 aa, Homo sapiens
SESLSSAVFVEGLKRQGGCARLEEACLSEAGEDLTGVRFSLPGKNFPCGSSSSSSRSRNSSSSNSSSSSSTTTTTTSSSGAQDRMPVLERYFHPAELGRRWTGPEGVLPSSPGSRPGCQQGPLPWDLPEMIRMVKLVWKSKSELQATKQRGILDNEDALRSFPGDIRLRGQTGVRAERRGSYPFIDFRLLNSTTYSGEIGTKKKVKRLLSFQRYFHASRLLRGIIPQAPLHLLDEDYLGQARHMLSKVGMWDFDIFLFDRLTNGNSLVTLLCHLFNTHGLIHHFKLDMVTLHRFLVMVQEDYHSQNPYHNAVHAADVTQAMHCYLKEPKLASFLTPLDIMLGLLAAAAHDVDHPGVNQPFLIKTNHHLANLYQNMSVLENHHWRSTIGMLRESRLLAHLPKEMTQDIEQQLGSLILATDINRQNEFLTRLKAHLHNKDLRLEDAQDRHFMLQIALKCADICNPCRIWEMSKQWSERVCEEFYRQGELEQKFELEISPLCNQQKDSIPSIQIGFMSYIVEPLFREWAHFTGNSTLSENMLGHLAHNKAQWKSLLPRQHRSRGSSGSGPDHDHAGQGTESEEQEGDSP

SEQ ID NO: 6130 - protein, 174 aa, Homo sapiens
MTTKNLETKVTVTSSPIRGAGDGMETEEPPKSVEVTSGVQSRKHHSLQSPWKKAVPSESPGVLQLGKMLTEKAMEVKAVRILVPKAAITHDIPNKNTKVKSLGHHKGEFLGQSEGVIEPNKELSEVKNVLEKLKNSERRLLQDKEGLSNQLRVQTEVRRALIDKMSTTLYVWTF

SEQ ID NO: 6131 - protein, 400 aa, Homo sapiens; identical to SEQ ID NO: 5527

SEQ ID NO: 6132 - protein, 91 aa, Homo sapiens
MDADSDVALDILITNVVCVFRTRCHLNLRKIALEGANVIYKRDVGKVLMKLRKPRITATIWSSGKIICTGATSEEEAKFGARRLARSLQKL

SEQ ID NO: 6133 - protein, 163 aa, Homo sapiens
MDADSDVALDILITNVVCVFRTRCHLNLRKIALEGANVIYKRDVGKVLMKLRKPRITATIWSSGKIICTGATSEEEAKFGARRLARSLQKLGFQVIFTDFKVVNVLAVCNMPFEIRLPEFTKNNRPHASYEPELHPAVCYRIKSLRATLQIFSTGSITVTGIL

SEQ ID NO: 6134 - protein, 340 aa, Homo sapiens
MLEAPGPSDGCELSNPSASRVSCAGQMLEVQPGLYFGGAAAVAEPDHLREAGITAVLTVDSEEPSFKAGPGVEDLWRLFVPALDKPETDLLSHLDRCVAFIGQARAEGRAVLVHCHAGVSRSVAIITAFLMKTDQLPFEKAYEKLQILKPEAKMNEGFEWQLKLYQAMGYEVDTSSAIYKQYRLQKVTEKYPELQNLPQELFAVDPTTVSQGLKDEVLYKCRKCRRSLFRSSSILDHREGSGPIAFAHKRMTPSSMLTTGRQAQCTSYFIEPVQWMESALLGVMDGQLLCPKCSAKLGSFNWYGEQCSCGRWITPAFQIHKNRVDEMKILPVLGSQTGKI

SEQ ID NO: 6135 - protein, 268 aa, Homo sapiens
MWPLTALLLLATLEKPILSLHPPWTTIFKGERVTLKCDGYHPLLLELQPISTLWYLGHLLLPSHKKSIEVQTPGVYRCQTRGAPVSDPIHLSVSNDWLILQVPYAPVFEGEPLVLRCRGWYDKVVYKLHYYHDGQAVRYFHSSANYTVLQARASDSGRYQCSGTMRIPVESAPMFSAKVAVTVQEARHAAAVRVLQVQPRGAPLRLGRRVHSPGARGRGARIVLVRGGYRHPQCPETQSVAAAPGAGFSPGPGLHHRPSSMGRSLGSW

SEQ ID NO: 6136 - protein, 311 aa, Homo sapiens
MWPLTALLLLATLEKPILSLHPPWTTIFKGERVTLKCDGYHPLLLELQPISTLWYLGHLLLPSHKKSIEVQTPGVYRCQTRGAPVSDPIHLSVSNDWLILQVPYAPVFEGEPLVLRCRGWYDKVVYKLHYYHDGQAVRYFHSSANYTVLQARASDSGRYQCSGTMRIPVESAPMFSAKVAVTVQAARCAASTGAPSTQSRSPRSRSSNRTGARRLPPPAVSGNAVRGCSSRGRVLPWTRPPPPPQLHGPQPWLLVIGRFPSESPRCPDRSRWSPPSGTPPPPGCSSRRAAPRLRGHPPALRRRPWNNRLEP

SEQ ID NO: 6137 - protein, 318 aa, Homo sapiens
MWPLTALLLLVPSSGQAATLEKPILSLHPPWTTIFKGERVTLKCDGYHPLLLELQPISTLWYLGHLLLPSHKKSIEVQTPGVYRCQTRGAPVSDPIHLSVSNDWLILQVPYAPVFEGEPLVLRCRGWYDKVVYKLHYYHDGQAVRYFHSSANYTVLQARASDSGRYQCSGTMRIPVESAPMFSAKVAVTVQAARCAASTGAPSTQSRSPRSRSSNRTGARRLPPPAVSGNAVRGCSSRGRVLPWTRPPPPPQLHGPQPWLLVIGRFPSESPRCPDRSRWSPPSGTPPPPGCSSRRAAPRLRGHPPALRRRPWNNRLEP

SEQ ID NO: 6138 - protein, 426 aa, Homo sapiens
MWPLTALLLLVPSSGQAATLEKPILSLHPPWTTIFKGERVTLKCDGYHPLLLELQPISTLWYLGHLLLPSHKKSIEVQTPGVYRCQTRGAPVSDPIHLSVSNDWLILQVPYAPVFEGEPLVLRCRGWYDKVVYKLHYYHDGQAVRYFHSSANYTVLQARASDSGRYQCSGTMRIPVESAPMFSAKVAVTVQELFRAPVLRVMGPREARGAALGGVVLRCDTRLHPQKRDTPLQFAFYKYSRAVRRFDWGAEYTVPEPEVEELESYWCEAATATRSVRKRSPWLQLPGPGSPLDPASTTAPAPWAAALAPGNRPLSFRKPPVSRSVPLVTSVRNTTSTGLQFPASGAPTAGPPACAPPTPLEQSAGALKPDVDLLLREMQLLKGLLSRVVLELKEPQALRELRGTPETPTSHFAVSPGTPETTPVES

SEQ ID NO: 6139 - protein, 122 aa, Homo sapiens
MAGGCRAPSSAPTVSLPELRSLLASGRARLFDVRSREEAAAGTIPGALNIPVSELESALQMEPAAFQALYSAEKPKLEDEHLVFFCQMGKRGLQATQLARSLGYTGARNYAGAYREWLEKES

SEQ ID NO: 6140 - protein, 74 aa, Homo sapiens
MAGVSELESALQMEPAAFQALYSAEKPKLEDEHLVFFCQMGKRGLQATQLARSLGYTGARNYAGAYREWLEKES

SEQ ID NO: 6141 - protein, 597 aa, Homo sapiens; identical to SEQ ID NO: 5494

SEQ ID NO: 6142 - protein, 597 aa, Homo sapiens; identical to SEQ ID NO: 5494

SEQ ID NO: 6143 - protein, 150 aa, Homo sapiens
MGVQPPNFSWVLPGRLAGLALPRLPAHYQFLLDLGVRHLVSLTERGPPHSDSCPGLTLHRLRIPDFCPPAPDQIDRFVQIVDEANARGEAVGVHCALGFGRTGTMLACYLVKERGLAAGDAIAEIRRLRPGSIETYEQEKAVFQFYQRTK

SEQ ID NO: 6144 - protein, 150 aa, Homo sapiens; identical to SEQ ID NO: 6143

SEQ ID NO: 6145 - protein, 150 aa, Homo sapiens; identical to SEQ ID NO: 6143

SEQ ID NO: 6146 - protein, 1620 aa, Homo sapiens
MEGCMGEESFQMWELNRRLEAYLARVKALEEQNELLSAELGGLRAQSADTSWRAHADDELAALRALVDQRWREKHAAEVARDNLAEELEGVAGRCQQLRLARERTTEEVARNRRAVEAEKCARAWLSSQVAELERELEALRVAHEEERVGLNAQAACAPRCPAPPRGPPAPAPEVEELARRLGEAWRGAVRGYQERVAHMETSLGQARERLGRAVQGAREGRLELQQLQAERGGLLERRAALEQRLEGRWQERLRATEKFQLAVEALEQEKQGLQSQIAQVLEGRQQLAHLKMSLSLEVATYRTLLEAENSRLQTPGGGSKTSLSFQDPKLELQFAAPEGRRLGSLLPVLSPTSLPSPLPATLETPVPAFLKNQEFLQARTPTLASTPIPPTPQAPSPAVDAEIRAQDAPLSLLQTQGGRKQAPEPLRAEARVAIPASVLPGPEEPGGQRQEASTGQSPEDHASLAPPLSPDHSSLEAKDGESGGSRVFSICRGEGEGQIWGLVEKETAIEGKVVSSLQQEIWEEEDLNRKEIQDSQVPLEKETLKSLGEEIQESLKTLENQSHETLERENQECPRSLEEDLETLKSLEKENKELLKDVEVVRPLEKEAVGQLKPTGKEDTQTLQSLQKENQELMKSLEGNLETFLFPGTENQELVSSLQENLESLTALEKENQEPLRSPEVGDEEALRPLTKENQEPLRSLEDENKEAFRSLEKENQEPLKTLEEEDQSIVRPLETENHKSLRSLEEQDQETLRTLEKETQQRRRSLGEQDQMTLRPPEKVDLEPLKSLDQEIARPLENENQEFLKSLKEESVEAVKSLETEILESLKSAGQENLETLKSPETQAPLWTPEEINQGAMNPLEKEIQEPLESVEVNQETFRLLEEENQESLRSLGAWNLENLRSPEEVDKESQRNLEEEENLGKGEYQESLRSLEEEGQELPQSADVQRWEDTVEKDQELAQESPPGMAGVENEDEAELNLREQDGFTGKEEVVEQGELNATEEVWIPGEGHPESPEPKEQRGLVEGASVKGGAEGLQDPEGQSQQVGAPGLQAPQGLPEAIEPLVEDDVAPGGDQASPEVMLGSEPAMGESAAGAEPGPGQGVGGLGDPGHLTREEVMEPPLEEESLEAKRVQGLEGPRKDLEEAGGLGTEFSELPGKSRDPWEPPREGREESEAEAPRGAEEAFPAETLGHTGSDAPSPWPLGSEEAEEDVPPVLVSPSPTYTPILEDAPGPQPQAEGSQEASWGVQGRAEALGKVESEQEELGSGEIPEGPQEEGEESREESEEDELGETLPDSTPLGFYLRSPTSPRWDPTGEQRPPPQGETGKEGWDPAVLASEGLEAPPSEKEEGEEGEEECGRDSDLSEEFEDLGTEAPFLPGVPGEVAEPLGQVPQLLLDPAAWDRDGESDGFADEEESGEEGEEDQEEGREPGAGRWGPGSSVGSLQALSSSQRGEFLESDSVSVSVPWDDSLRGAVAGAPKTALETESQDSAEPSGSEEESDPVSLEREDKVPGPLEIPSGMEDAGPGADIIGVNGQGPNLEGKSQHVNGGVMNGLEQSEEVGQGMPLVSEGDRGSPFQEEEGSALKTSWAGAPVHLGQGQFLKFTQREGDRESWSSGED

SEQ ID NO: 6147 - protein, 125 aa, Homo sapiens
MERHTSHPNRKVPAKEEANAVPLCRAKPSPSYINLQASSPPATFLNIQTTKLPSVDHKPKECLGLLECMYANLQLQTQLAQQQMAVLEHLQASVTQLAPGRGSNNSSLPALSPNPLLNHLPQFSK

SEQ ID NO: 6148 - protein, 125 aa, Homo sapiens; identical to SEQ ID NO: 6147

SEQ ID NO: 6149 - protein, 125 aa, Homo sapiens; identical to SEQ ID NO: 6147

SEQ ID NO: 6150 - protein, 125 aa, Homo sapiens; identical to SEQ ID NO: 6147

SEQ ID NO: 6151 - protein, 125 aa, Homo sapiens; identical to SEQ ID NO: 6147

SEQ ID NO: 6152 - protein, 207 aa, Homo sapiens
MAEASSANLGSGCEEKRHEGSSSESVPPGTTISRVKLLDTMVDTFLQKLVAAGSSPLLHWDGSAGPRLPSGGQSVKQAFSWAACRLPQGRKEEISDIKEEGNLEAVLNALDKIVEEGKVRKEPAWRPSGIPEKDLHSVMAPYFLQQRDTLRRHVQKQEAENQQLADAVLAGRRQVEELQLQVQAQQQAWQALHREQRELVAVLREPE

SEQ ID NO: 6153 - protein, 205 aa, Homo sapiens
MAEASSANLGSGCEEKRHEGSSSESVPPGTTISRVKLLDTMVDTFLQKLVAAGSYQRFTDCYKCFYQLQPAMTQQIYDKFIAQLQTSIREEISDIKEEGNLEAVLNALDKIVEEGKVRKEPAWRPSGIPEKDLHSVMAPYFLQQRDTLRRHVQKQEAENQQLADAVLAGRRQVEELQLQVQAQQQAWQALHREQRELVAVLREPE

SEQ ID NO: 6154 - protein, 179 aa, Homo sapiens
MAEASSANLGSGCEEKRHEGSSSESVPPGTTISRVKLLDTMVDTFLQKLVAAGSYQRFTDCYKCFYQLQPAMTQQIYDKFIAQLQTSIREEISDIKEEGNLEAVLNALDKIVEEGKVRKEPACNGTPCGAMCRNRRAASSWQMPSWQGGGRWRSCSYRSRPSSRPGRLYTENRGSWLLC

SEQ ID NO: 6155 - protein, 750 aa, Homo sapiens; identical to SEQ ID NO: 5802

SEQ ID NO: 6156 - protein, 888 aa, Homo sapiens
MAGVGRSGGPWGRTRGGRSGRLGVSLGALSSLPLEELPRPLCCRRCRRHFGFALRGETIPVSVAGSASSQFAPLALHLSLLLSRISASRLTRWPPPDKREGSAVDPGKRRSLAATPSSSLPCTLIALGLRHEKEANELMEDLFETFQDEMGFSNMEDDGPEEEERVAEPQANFNTPQALRFEELLANLLNEQHQIAKELFEQLKMKKPSAKQQKEVEKVKPQCKEVHQTLILDPAQRKRLQQQMQQHVQLLTQIHLLATCNPNLNPEASSTRICLKELGTFAQSSIALHHQYNPKFQTLFQPCNLMGAMQLIEDFSTHVSIDCSPHKTVKKTANEFPCLPKQVAWILATSKVFMYPELLPVCSLKAKNPQDKILFTKAEDNLLALGLKHFEGTEFLNPLISKYLLTCKTARQLTVRIKNLNMNRAPDNIIKFYKKTKQLPVLGKCCEEIQPHQWKPPIEREEHRLPFWLKASLPSIQEELRHMADGAREVGNMTGTTEINSDQGLEKDNSELGSETRYPLLLPKGVVLKLKPVADRFPKKAWRQKRSSVLKPLLIQPSPSLQPSFNPGKTPAQSTHSEAPPSKMVLRIPHPIQPATVLQTVPGVPPLGVSGGESFESPAALPAMPPEARTSFPLSESQTLLSSAPVPKVMMPSPASSMFRKPYVRRRPSKRRGARAFRCIKPAPVIHPASVIFTVPATTVKIVSLGGGCNMIQPVNAAVAQSPQTIPIATLLVNPTSFPCPLNQPLVASSVSPLIVSGNSVNLPIPSTPEDKAHMNVDIACAVADGENAFQGLEPKLEPQELSPLSATVFPKVEHSPGPPPVDKQCQEGLSENSAYRWTVVKTEEGRQALEPLPQGIQESLNNSSPGDLEEVVKMEPEDATEEISGFL

SEQ ID NO: 6157 - protein, 868 aa, Homo sapiens
MAGVGRSGGPWGRTRGGRSGRLGVSLGALSSLPLEELPRPLCCRRCRRHFGFALRGETIPVSVAGSASSQFAPLALHLSLLLSRISASRLTRWPPPDKREGSAVDPGKRRSLAATPSSSLPCTLIALGLRHEKEANELMEDLFETFQDEMGFSNMEDDGPEEEERVAEPQANFNTPQALRFEELLANLLNEQHQIAKELFEQLKMKKPSAKQQKEVEKVKPQCKEVHQTLILDPAQRKRLQQQMQQHVQLLTQIHLLATCNPNLNPEASSTRICLKELGTFAQSSIALHHQYNPKFQTLFQPCNLMGAMQLIEDFSTHVSIDCSPHKTVKKTANEFPCLPKQVAWILATSKVFMYPELLPVCSLKAKNPQDKILFTKAEDNKYLLTCKTARQLTVRIKNLNMNRAPDNIIKFYKKTKQLPVLGKCCEEIQPHQWKPPIEREEHRLPFWLKASLPSIQEELRHMADGAREVGNMTGTTEINSDQGLEKDNSELGSETRYPLLLPKGVVLKLKPVADRFPKKAWRQKRSSVLKPLLIQPSPSLQPSFNPGKTPAQSTHSEAPPSKMVLRIPHPIQPATVLQTVPGVPPLGVSGGESFESPAALPAMPPEARTSFPLSESQTLLSSAPVPKVMMPSPASSMFRKPYVRRRPSKRRGARAFRCIKPAPVIHPASVIFTVPATTVKIVSLGGGCNMIQPVNAAVAQSPQTIPIATLLVNPTSFPCPLNQPLVASSVSPLIVSGNSVNLPIPSTPEDKAHMNVDIACAVADGENAFQGLEPKLEPQELSPLSATVFPKVEHSPGPPPVDKQCQEGLSENSAYRWTVVKTEEGRQALEPLPQGIQESLNNSSPGDLEEVVKMEPEDATEEISGFL

SEQ ID NO: 6158 - protein, 524 aa, Homo sapiens
MAGGAREVLTLQLGHFAGFVGAHWWNQQDAALGRATDSKEPPGELCPDVLYRTGRTLHGQETYTPRLILMDLKGSLSSLKEEGGLYRDKQLDAAIAWQGKLTTHKGSSPLPTATTPKPLIPTEASIRVWSDFLRVHLHPRSICMIQKYNHDGEAGRLEAFGQGESVLKEPKYQEELEDRLHFYVEECDYLQGFQILCDLHDGFSGVGAKAAELLQDEYSGRGIITWGLLPGPYHRGEAQRNIYRLLNTAFGLVHLTAHSSLVCPLSLGGSLGLRPEPPVSFPYLHYDATLPFHCSAILATALDTVTVPYRLCSSPVSMVHLADMLSFCGKKVVTAGAIIPFPLAPGQSLPDSLMQFGGATPWTPLSACGEPSGTRCFAQSVVLRGIDRACHTSQLTPGTPPPSALHACTTGEEILAQYLQQQQPGVMSSSHLLLTPCRVAPPYPHLFSSCSPPAVESIPVFGALCSSSSLHQTLEALARDLTKLDLRRWASFMDAGVEHDDVAELLQELQSLAQCYQGGDSLVD

SEQ ID NO: 6159 - protein, 492 aa, Homo sapiens
MPPTCSPGLRRQDWAPGRCAGLHLPPRAPSSPALQALAGQAGVRSSWSFAGVPGAQRLWMAEAQSGTGQLQEQKKGLLIAVSVSVDKIISHFGAARNLVQKAQLGDSRLSPDVGHLVLTTLCPALHALVADGLKPFRKDLITGQRRSSPWSVVEASVKPGSSTRSLGTLYSQVSRLAPLSSSRSRFHAFILGLLNTKQLELWFSSLQEDAGLLSLLYLPTGFFSLARGGCPSLSTELLLLLQPLSVLTFHLDLLFEHHHHLPLGPPQAPAPPGPPPALQQTMQAMLHFGGRLAQSLRGTSKEAASDPSDSPNLPTPGSWWEQLTQASRVYASGGTEGFPLSRWAPGRHGTAAEEGAQERPLPTDEMAPGRGLWLGRLFGVPGGPAENENGALKSRRPSSWLPPTVSVLALVKRGAPPEMPSPQELEASAPRMVQTHRAVRALCDHTAARPDQLSFRRGEVLRVITTVDEDWLRCGRDGMEGLVPVGYTSLVL

SEQ ID NO: 6160 - protein, 433 aa, Homo sapiens; identical to SEQ ID NO: 5130

SEQ ID NO: 6161 - protein, 902 aa, Homo sapiens
MLSPQRALLCNLNHIHLQHVSLGLHLSRRPELQEGPLSTPPPPGDTGGKESRGPCSGTLVDANSNSPAVPCRCCQEHGPGLENRQDPSQEEEGAASPSDPGCSSSLSSCSDLSPDESPVSVYLRDLPGDEDAHPQPSIIPLEQGSPLASAGPGTCSPDSFCCSPDSCSGASSSPDPGLDSNCNALTTCQDVPSPGLEEEDERAEQDLPTSELLEADDGKIDAGKTEPSWKINPIWKIDTEKTKAEWKTTENNNTGWKNNGNVNSSWKSEPEKFDSGWKTNTRITDSGSKTDAGKIDGGWRSDVSEEPVPHRTITSFHELAQKRKRGPGLPLVPQAKKDRSDWLIVFSPDTELPPSGSPGGSSAPPREVTTFKELRSRSRAPAPPVPPRDPPVGWALVPPRPPPPPVPPRRKKNRPGLQPIAEGQSEEGRAVSPAAGEEAPAAKEPGAQAGLEVRSSWSFAGVPGAQRLWMAEAQSGTGQLQEQKKGLLIAVSVSVDKIISHFGAARNLVQKAQLGDSRLSPDVGHLVLTTLCPALHALVADGLKPFRKDLITGQRRSSPWSVVEASVKPGSSTRSLGTLYSQVSRLAPLSSSRSRFHAFILGLLNTKQLELWFSSLQEDAGLLSLLYLPTGFFSLARGGCPSLSTELLLLLQPLSVLTFHLDLLFEHHHHLPLGPPQAPAPPGPPPALQQTMQAMLHFGGRLAQSLRGTSKEAASDPSDSPNLPTPGSWWEQLTQASRVYASGGTEGFPLSRWAPGRHGTAAEEGAQERPLPTDEMAPGRGLWLGRLFGVPGGPAENENGALKSRRPSSWLPPTVSVLALVKRGAPPEMPSPQELEASAPRMVQTHRAVRALCDHTAARPDQLSFRRGEVLRVITTVDEDWLRCGRDGMEGLVPVGYTSLVL

SEQ ID NO: 6162 - protein, 796 aa, Homo sapiens
MLSPQRALLCNLNHIHLQHVSLGLHLSRRPELQEGPLSTPPPPGDTGGKESRGPCSGTLVDANSNSPAVPCRCCQEHGPGLENRQDPSQEEEGAASPSDPGCSSSLSSCSDLSPDESPVSVYLRDLPGDEDAHPQPSIIPLEQGSPLASAGPGTCSPDSFCCSPDSCSGASSSPDPGLDSNCNALTTCQDVPSPGLEEEDERAEQDLPTSELLEADDGKIDAGKTEPSWKINPIWKIDTEKTKAEWKTTENNNTGWKNNGNVNSSWKSEPEKFDSGWKTNTRITDSGSKTDAGKIDGGWRSDVSEEPVPHRTITSFHELAQKRKRGPGLPLVPQAKKDRSDWLIVFSPDTELPPSGSPGGSSAPPREVTTFKELRSRSRAPAPPVPPRDPPVGWALVPPRPPPPPVPPRRKKNRPGLQPIAEGQSEEGRAVSPAAGEEAPAAKEPGAQAGLEVRSSWSFAGVPGAQRLWMAEAQSGTGQLQEQKKGLLIAVSVSVDKIISHFGAARNLVQKAQLGDSRLSPDVGHLVLTTLCPALHALVADGLKPFRKDLITGQRRSSPWSVVEASVKPGSSTRSLGTLYSQVSRLAPLSSSRSRFHAFILGLLNTKQLELWFSSLQEDAGSWWEQLTQASRVYASGGTEGFPLSRWAPGRHGTAAEEGAQERPLPTDEMAPGRGLWLGRLFGVPGGPAENENGALKSRRPSSWLPPTVSVLALVKRGAPPEMPSPQELEASAPRMVQTHRAVRALCDHTAARPDQLSFRRGEVLRVITTVDEDWLRCGRDGMEGLVPVGYTSLVL

SEQ ID NO: 6163 - protein, 169 aa, Homo sapiens
MASVSSATFSGHGARSLLQFLRLVGQLKRVAAGWVYRNVQRPESVSDHMYRMAVMAMVIKDDRLNKDREAMKQITQLLPEDLRKELYELWEEYETQSSAEAKFVKQLDQCEMILQASEYEDLEHKPGRLQDFYDSTAGKFNHPEIVQLVSELEAERSTNIAAAASEPHS

SEQ ID NO: 6164 - protein, 131 aa, Homo sapiens
MEAQAQGLLETEPLQGTDEDAVASADFSSMLSEEEKEELKAELVQLEDEITTLRQVLSAKERHLVEIKQKLGMNLMNELKQNFSKSWHDMQTTTAYKKTHETLSHAGQKATAAFSNVGTAISKKFGDMRRK

SEQ ID NO: 6165 - protein, 144 aa, Homo sapiens
MEAQAQGLLETEPLQGTDEDAVASADFSSMLSEEEKEELKAELVQLEDEITTLRQVLSAKERHLVEIKQKLGMNLMNELKQNFSKSWHDMQTTTAYKKTHETLSHAGQKATAAFSNVGTAISKKFGDMSYSIRHSISMPAMRRK

SEQ ID NO: 6166 - protein, 315 aa, Homo sapiens
MASCPDSDNSWVLAGSESLPVETLGPASRMDPESERALQAPHSPSKTDGKELAGTMDGEGTLFQTESPQSGSILTEETEVKGTLEGDVCGVEPPGPGDTVVQGDLQETTVVTGLGPDTQDLEGQSPPQSLPSTPKAAWIREEGRCSSSDDDTDVDMEGLRRRRGREAGPPQPMVPLAVENQAGGGLSESETGPMEEVERQVLPDPEVLEAVGDRQDGLREQLQAPVPPDSVPSLQNMGLLLDKLAKENQDIRLLQAQLQVGTGRRGWARVTHLGQASVLASSPKRNVSYLPTHPDPPLSHYSQGVFPVLGSHPLC

SEQ ID NO: 6167 - protein, 731 aa, Homo sapiens
MASCPDSDNSWVLAGSESLPVETLGPASRMDPESERALQAPHSPSKTDGKELAGTMDGEGTLFQTESPQSGSILTEETEVKGTLEGDVCGVEPPGPGDTVVQGDLQETTVVTGLGPDTQDLEGQSPPQSLPSTPKAAWIREEGRCSSSDDDTDVDMEGLRRRRGREAGPPQPMVPLAVENQAGGEGAGGELGISLNMCLLGALVLLGLGVLLFSGGLSESETGPMEEVERQVLPDPEVLEAVGDRQDGLREQLQAPVPPDSVPSLQNMGLLLDKLAKENQDIRLLQAQLQAQKEELQSLMHQPKGLEEENAQLRGALQQGEAFQRALESELQQLRARLQGLEADCVRGPDGVCLSGGRGPQGDKAIREQGPREQEPELSFLKQKEQLEAEAQALRQELERQRRLLGSVQQDLERSLQDASRGDPAHAGLAELGHRLAQKLQGLENWGQDPGVSANASKAWHQKSHFQNSREWSGKEKWWDGQRDRKAEHWKHKKEESGRERKKNWGGQEDREPAGRWKEGRPRVEESGSKKEGKRQGPKEPPRKSGSFHSSGEKQKQPRWREGTKDSHDPLPSWAELLRPKYRAPQGCSGVDECARQEGLTFFGTELAPVRQQELASLLRTYLARLPWAGQLTKELPLSPAFFGEDGIFRHDRLRFRDFVDALEDSLEEVAVQQTGDDDEVDDFEDFIFSHFFGDKALKKRSGKKDKHSQSPRAAGPREGHSHSHHHHHRG

SEQ ID NO: 6168 - protein, 702 aa, Homo sapiens
MDPESERALQAPHSPSKTDGKELAGTMDGEGTLFQTESPQSGSILTEETEVKGTLEGDVCGVEPPGPGDTVVQGDLQETTVVTGLGPDTQDLEGQSPPQSLPSTPKAAWIREEGRCSSSDDDTDVDMEGLRRRRGREAGPPQPMVPLAVENQAGGEGAGGELGISLNMCLLGALVLLGLGVLLFSGGLSESETGPMEEVERQVLPDPEVLEAVGDRQDGLREQLQAPVPPDSVPSLQNMGLLLDKLAKENQDIRLLQAQLQAQKEELQSLMHQPKGLEEENAQLRGALQQGEAFQRALESELQQLRARLQGLEADCVRGPDGVCLSGGRGPQGDKAIREQGPREQEPELSFLKQKEQLEAEAQALRQELERQRRLLGSVQQDLERSLQDASRGDPAHAGLAELGHRLAQKLQGLENWGQDPGVSANASKAWHQKSHFQNSREWSGKEKWWDGQRDRKAEHWKHKKEESGRERKKNWGGQEDREPAGRWKEGRPRVEESGSKKEGKRQGPKEPPRKSGSFHSSGEKQKQPRWREGTKDSHDPLPSWAELLRPKYRAPQGCSGVDECARQEGLTFFGTELAPVRQQELASLLRTYLARLPWAGQLTKELPLSPAFFGEDGIFRHDRLRFRDFVDALEDSLEEVAVQQTGDDDEVDDFEDFIFSHFFGDKALKKRSGKKDKHSQSPRAAGPREGHSHSHHHHHRG

SEQ ID NO: 6169 - protein, 808 aa, Homo sapiens
MIWRNNWKSTTGRLNVKLQSDKLQHGCGPDYSSAWLPANESLWQATTVPSNHRNNHIRRHSIASDSGDTGIGTSCSDSVEDHSTSSGTLSFKPSQSLITLPTAHVMPSNSSASISKLRESLTPDGSKWSTSLMQTLGNHSRGEQDSSLDMKDFRPLRKWSSLSKLTAPDNCGQGGTVCREESRNGLEKIGKAKALTSQLRTIGPSCLHDSMEMLRLEDKEINKKRSSTLDCKYKFESCSKEDFRASSSTLRRQPVDMTYSALPESKPIMTSSEAFEPPKYLMLGQQAVGGVPIQPSVRTQMWLTEQLRTNPLEGRNTEDSYSLAPWQQQQIEDFRQGSETPMQVLTGSSRQSYSPGYQDFSKWESMLKIKEGLLRQKEIVIDRQKQQITHLHERIRDNELRAQHAMLGHYVNCEDSYVASLQPQYENTSLQTPFSEESVSHSQQGEFEQKLASTEKEVLQLNEFLKQRLSLFSEEKKKLEEKLKTRDRYISSLKKKCQKESEQNKEKQRRIETLEKYLADLPTLDDVQSQSLQLQILEEKNKNLQEALIDTEKKLEEIKKQCQDKETQLICQKKKEKELVTTVQSLQQKVERCLEDGIRLPMLDAKQLQNENDNLRQQNETASKIIDSQQDEIDRMILEIQSMQGKLSKEKLTTQKMMEELEKKERNVQRLTKALLENQRQTDETCSLLDQGQEPDQSRQQTVLSKRPLFDLTVIDQLFKEMSCCLFDLKALCSILNQRAQGKEPNLSLLLGIRSMNCSAEETENDHSTETLTKKLSDVCQLRRDIDELRTTISDRYAQDMGDNCITQ

SEQ ID NO: 6170 - protein, 805 aa, Homo sapiens
MWGRFLAPEASGRDSPGGARSFPAGPDYSSAWLPANESLWQATTVPSNHRNNHIRRHSIASDSGDTGIGTSCSDSVEDHSTSSGTLSFKPSQSLITLPTAHVMPSNSSASISKLRESLTPDGSKWSTSLMQTLGNHSRGEQDSSLDMKDFRPLRKWSSLSKLTAPDNCGQGGTVCREESRNGLEKIGKAKALTSQLRTIGPSCLHDSMEMLRLEDKEINKKRSSTLDCKYKFESCSKEDFRASSSTLRRQPVDMTYSALPESKPIMTSSEAFEPPKYLMLGQQAVGGVPIQPSVRTQMWLTEQLRTNPLEGRNTEDSYSLAPWQQQQIEDFRQGSETPMQVLTGSSRQSYSPGYQDFSKWESMLKIKEGLLRQKEIVIDRQKQQITHLHERIRDNELRAQHAMLGHYVNCEDSYVASLQPQYENTSLQTPFSEESVSHSQQGEFEQKLASTEKEVLQLNEFLKQRLSLFSEEKKKLEEKLKTRDRYISSLKKKCQKESEQNKEKQRRIETLEKYLADLPTLDDVQSQSLQLQILEEKNKNLQEALIDTEKKLEEIKKQCQDKETQLICQKKKEKELVTTVQSLQQKVERCLEDGIRLPMLDAKQLQNENDNLRQQNETASKIIDSQQDEIDRMILEIQSMQGKLSKEKLTTQKMMEELEKKERNVQRLTKALLENQRQTDETCSLLDQGQEPDQSRQQTVLSKRPLFDLTVIDQLFKEMSCCLFDLKALCSILNQRAQGKEPNLSLLLGIRSMNCSAEETENDHSTETLTKKLSDVCQLRRDIDELRTTISDRYAQDMGDNCITQ

SEQ ID NO: 6171 - protein, 495 aa, Homo sapiens
MVEEHELRKERIQEDYNDKYWDQRYTIVQQQIPSFLQKMADKILSTGKYLNVVRECGHDVTCPVAKEIIYTLKERAYVEQIEKAFNYASKVLLDFLMEEKELVAHLRSIKRYFLMDQGDFFVHFMDLAEEELRKPVEDITPPRLEALLELALRMSTANTDPFKDDLKIDLMPHDLITQLLRVLAIETKQEKAMAHADPTELALSGLEAFSFDYIVKWPLSLIINRKALTRYQMLFRHMFYCKHVERQLCSVWISNKTAKQHSLHSAQWFAGAFTLRQRMLNFVQNIQYYMMFEVMEPTWHILEKNLKSASNIDDVLGHHTGFLDTCLKDCMLTNPELLKVFSKLMSVCVMFTNCMQKFTQSMKLDGELGGQTLEHSTVLGLPAGAEERARKELARKHLAEHADTVQLVSGFEATINKFDKNFSAHLLDLLARLSIYSTSDCEHGMASVISRLDFNGFYTERLERLSAERSQKATPQVPVLRGPPAPAPRVAVTAQ

SEQ ID NO: 6172 - protein, 902 aa, Homo sapiens; identical to SEQ ID NO: 4825

SEQ ID NO: 6173 - protein, 539 aa, Homo sapiens; identical to SEQ ID NO: 5897

SEQ ID NO: 6174 - protein, 150 aa, Homo sapiens
MRGDRGRGRGGRFGSRGGPGGGFRPFVPHIPFDFYLCEMAFPRVKPAPDETSFSEALLKRNQDLAPNSAEQASILSLVTKINNVIDNLIVAPGTFEVQIEEVRQVGSYKKGTMTTGHNVADLVVILKILPTCECACFWSWEQNIALGLGV

SEQ ID NO: 6175 - protein, 115 aa, Homo sapiens
MAFPRVKPAPDETSFSEALLKRNQDLAPNSAEQASILSLVTKINNVIDNLIVAPGTFEVQIEEVRQVGSYKKGTMTTGHNVADLVVILKILPTLEAVAALGNKVVESLRAQDPSE

SEQ ID NO: 6176 - protein, 103 aa, Homo sapiens
MSDCYTELEKAVIVLVENFYKYVSKYSLVKNKISKSSFREMLQKELNHMLSDTGNRKAADKLIQNLDANHDGRISFDEYWTLIGGITGPIAKLIHEQEQQSSS

SEQ ID NO: 6177 - protein, 103 aa, Homo sapiens; identical to SEQ ID NO: 6176

SEQ ID NO: 6178 - protein, 103 aa, Homo sapiens; identical to SEQ ID NO: 6176

SEQ ID NO: 6179 - protein, 103 aa, Homo sapiens; identical to SEQ ID NO: 6176

SEQ ID NO: 6180 - protein, 101 aa, Homo sapiens; identical to SEQ ID NO: 5525

SEQ ID NO: 6181 - protein, 101 aa, Homo sapiens; identical to SEQ ID NO: 5525

SEQ ID NO: 6182 - protein, 73 aa, Homo sapiens
MSYQQQQCKQPCQPPPVCPTPKCPEPCPPPKCPEPYLPPPCPPEHCPPPPCQDKCPPVQPYPPCQQKYPPKSK

SEQ ID NO: 6183 - protein, 72 aa, Homo sapiens
MSYQQQQCKQPCQPPPVCPTPKCPEPCPPPKCPEPCPPPKCPQPCPPQQCQQKCPPVTPSPPCQPKCPPKSK

SEQ ID NO: 6184 - protein, 72 aa, Homo sapiens; identical to SEQ ID NO: 6183

SEQ ID NO: 6185 - protein, 72 aa, Homo sapiens; identical to SEQ ID NO: 6006

SEQ ID NO: 6186 - protein, 72 aa, Homo sapiens; identical to SEQ ID NO: 6006

SEQ ID NO: 6187 - protein, 72 aa, Homo sapiens; identical to SEQ ID NO: 6006

SEQ ID NO: 6188 - protein, 2850 aa, Homo sapiens
MPKLLQGVITVIDVFYQYATQHGEYDTLNKAELKELLENEFHQILKNPNDPDTVDIILQSLDRDHNKKVDFTEYLLMIFKLVQARNKIIGKDYCQVSGSKLRDDTHQHQEEQEETEKEENKRQESSFSHSSWSAGENDSYSRNVRGSLKPGTESISRRLSFQRDFSGQHNSYSGQSSSYGEQNSDSHQSSGRGQCGSGSGQSPNYGQHGSGSGQSSSNDTHGSGSGQSSGFSQHKSSSGQSSGYSQHGSGSGHSSGYGQHGSRSGQSSRGERHRSSSGSSSSYGQHGSGSRQSLGHGRQGSGSRQSPSHVRHGSGSGHSSSHGQHGSGSSYSYSRGHYESGSGQTSGFGQHESGSGQSSGYSKHGSGSGHSSSQGQHGSTSGQASSSGQHGSSSRQSSSYGQHESASRHSSGRGQHSSGSGQSPGHGQRGSGSGQSPSSGQHGTGFGRSSSSGPYVSGSGYSSGFGHHESSSEHSSGYTQHGSGSGHSSGHGQHGSRSGQSSRGERQGSSAGSSSSYGQHGSGSRQSLGHSRHGSGSGQSPSPSRGRHESGSRQSSSYGPHGYGSGRSSSRGPYESGSGHSSGLGHQESRSGQSSGYGQHGSSSGHSSTHGQHGSTSGQSSSCGQHGATSGQSSSHGQHGSGSSQSSRYGQQGSGSGQSPSRGRHGSDFGHSSSYGQHGSGSGWSSSNGPHGSVSGQSSGFGHKSGSGQSSGYSQHGSGSSHSSGYRKHGSRSGQSSRSEQHGSSSGLSSSYGQHGSGSHQSSGHGRQGSGSGHSPSRVRHGSSSGHSSSHGQHGSGTSCSSSCGHYESGSGQASGFGQHESGSGQGYSQHGSASGHFSSQGRHGSTSGQSSSSGQHDSSSGQSSSYGQHESASHHASGRGRHGSGSGQSPGHGQRGSGSGQSPSYGRHGSGSGRSSSSGRHGSGSGQSSGFGHKSSSGQSSGYTQHGSGSGHSSSYEQHGSRSGQSSRSEQHGSSSGSSSSYGQHGSGSRQSLGHGQHGSGSGQSPSPSRGRHGSGSGQSSSYGPYRSGSGWSSSRGPYESGSGHSSGLGHRESRSGQSSGYGQHGSSSGHSSTHGQHGSTSGQSSSCGQHGASSGQSSSHGQHGSGSSQSSGYGRQGSGSGQSPGHGQRGSGSRQSPSYGRHGSGSGRSSSSGQHGSGLGESSGFGHHESSSGQSSSYSQHGSGSGHSSGYGQHGSRSGQSSRGERHGSSSGSSSHYGQHGSGSRQSSGHGRQGSGSGHSPSRGRHGSGLGHSSSHGQHGSGSGRSSSRGPYESRSGHSSVFGQHESGSGHSSAYSQHGSGSGHFCSQGQHGSTSGQSSTFDQEGSSTGQSSSYGHRGSGSSQSSGYGRHGAGSGQSPSRGRHGSGSGHSSSYGQHGSGSGWSSSSGRHGSGSGQSSGFGHHESSSWQSSGCTQHGSGSGHSSSYEQHGSRSGQSSRGERHGSSSGSSSSYGQHGSGSRQSLGHGQHGSGSGQSPSPSRGRHGSGSGQSSSYSPYGSGSGWSSSRGPYESGSSHSSGLGHRESRSGQSSGYGQHGSSSGHSSTHGQHGSTSGQSSSCGQHGASSGQSSSHGQHGSGSSQSSGYGRQGSGSGQSPGHGQRGSGSRQSPSYGRHGSGSGRSSSSGQHGSGLGESSGFGHHESSSGQSSSYSQHGSGSGHSSGYGQHGSRSGQSSRGERHGSSSRSSSRYGQHGSGSRQSSGHGRQGSGSGQSPSRGRHGSGLGHSSSHGQHGSGSGRSSSRGPYESRSGHSSVFGQHESGSGHSSAYSQHGSGSGHFCSQGQHGSTSGQSSTFDQEGSSTGQSSSHGQHGSGSSQSSSYGQQGSGSGQSPSRGRHGSGSGHSSSYGQHGSGSGWSSSSGRHGSGSGQSSGFGHHESSSWQSSGYTQHGSGSGHSSSYEQHGSRSGQSSRGEQHGSSSGSSSSYGQHGSGSRQSLGHGQHGSGSGQSPSPSRGRHGSGSGQSSSYGPYGSGSGWSSSRGPYESGSGHSSGLGHRESRSGQSSGYGQHGSSSGHSSTHGQHGSASGQSSSCGQHGASSGQSSSHGQHGSGSSQSSGYGRQGSGSGQSPGHGQRGSGSRQSPSYGRHGSGSGRSSSSGQHGPGLGESSGFGHHESSSGQSSSYSQHGSGSGHSSGYGQHGSRSGQSSRGERHGSSSGSSSRYGQHGSGSRQSSGHGRQGSGSGHSPSRGRHGSGSGHSSSHGQHGSGSGRSSSRGPYESRSGHSSVFGQHESGSGHSSAYSQHGSGSGHFCSQGQHGSTSGQSSTFDQEGSSTGQSSSHGQHGSGSSQSSSYGQQGSGSGQSPSRGRHGSGSGHSSSYGQHGSGSGWSSSSGRHGSGSGQSSGFGHHESSSWQSSGYTQHGSGSGHSSSYEQHGSRSGQSSRGERHGSSSGSSSSYGQHGSGSRQSLGHGQHGSGSGQSPSPSRGRHGSGSGQSSSYSPYGSGSGWSSSRGPYESGSGHSSGLGHRESRSGQSSGYGQHGSSSGHSSTHGQHGSTSGQSSSCGQHGASSGQSSSHGQHGSGSSQSSGYGRQGSGSGQSPGHGQRGSGSRQSPSYGRHGSGSGRSSSSGQHGSGLGESSGFGHHESSSGQSSSYSQHGSGSGHSSGYGQHGSRSGQSSRGERHGSSSGSSSHYGQHGSGSRQSSGHGRQGSGSGQSPSRGRHGSGLGHSSSHGQHGSGSGRSSSRGPYESRLGHSSVFGQHESGSGHSSAYSQHGSGSGHFCSQGQHGSTSGQSSTFDQEGSSTGQSSSYGHRGSGSSQSSGYGRHGAGSGQSLSHGRHGSGSGQSSSYGQHGSGSGQSSGYSQHGSGSGQDGYSYCKGGSNHDGGSSGSYFLSFPSSTSPYEYVQEQRCYFYQ

SEQ ID NO: 6189 - protein, 291 aa, Homo sapiens
MSSGADGGGGAAVAARSDKGSPGEDGFVPSALGTREHWDAVYERELQTFREYGDTGEIWFGEESMNRLIRWMQKHKIPLDASVLDIGTGNGVFLVELAKFGFSNITGIDYSPSAIQLSGSIIEKEGLSNIKLKVEDFLNLSTQLSGFHICIDKGTFDAISLNPDNAIEKRKQYVKSLSRVLKVKGFFLITSCNWTKEELLNEFSEGWSTVAGFWLTAALTSWAQAIFSTSASRVGGTTGTHHHAWIIFVFLAETRFCHVVQAGLELLGSSDSPTWPPKVLGLYHARPSLAF

SEQ ID NO: 6190 - protein, 210 aa, Homo sapiens
MAPWGKRLAGVRGVLLDISGVLYDSGAGGGTAIAGSVEAVARLKRSRLKVRFCTNESQKSRAELVGQLQRLGFDISEQEVTAPAPAACQILKEQGLRPYLLIHDGVRSEFDQIDTSNPNCVVIADAGESFSYQNMNNAFQVLMELEKPVLISLGKGRYYKETSGLMLDVGPYMKALEYACGIKAEVVGKPSPEFFKSALQAIGVEAHQAQ

SEQ ID NO: 6191 - protein, 270 aa, Homo sapiens
MAPWGKRLAGVRGVLLDISGVLYDSGAGGGTAIAGSVEAVARLKRSRLKVRFCTNESQKSRAELVGQLQRLGFDISEQEVTAPAPAACQILKEQGLRPYLLIHDGVRSEFDQIDTSNPNCVVIADAGESFSYQNMNNAFQVLMELEKPVLISLGKGRYYKETSGLMLDVGPYMKALEYACGIKAEVVGKPSPEFFKSALQAIGVEAHQAVMIGDDIVGDVGGAQRCGMRALQVRTGKFRPSDEHHPEVKADGYVDNLAEAVDLLLQHADK

SEQ ID NO: 6192 - protein, 1314 aa, Homo sapiens
MADTDLFMECEEEELEPWQKISDVIEDSVVEDYNSVDKTTTVSVSQQPVSAPVPIAAHASVAGHLSTSTTVSSSGAQNSDSTKKTLVTLIANNNAPGTQFVKPTVGVPQVFSQMTPVRPGSTMPVRPTTNTFTTVIPATLTIRSTVPQSQSQQTKSTPSTSTTPTATQPTSLGQLAVQSPGQSNQTTNPKLAPSFPSPPAVSIASFVTVKRPGVTGENSNEVAKLVNTLNTIPSLGQSPGPVVVSNNSSAHGSQRTSGPESSMKVTSSIPVFDLQDGGRKICPRCNAQFRVTEALRGHMCYCCPEMVEYQKKGKSLDSEPSVPSAAKPPSPEKTAPVASTPSSTPIPALSPPTKVPEPNENVGDAVQTKLIMLVDDFYYGRDGGKVAQLTNFPKVATSFRCPHCTKRLKNNIRFMNHMKHHVELDQQNGEVDGHTICQHCYRQFSTPFQLQCHLENVHSPYESTTKCKICEWAFESEPLFLQHMKDTHKPGEMPYVCQVCQYRSSLYSEVDVHFRMIHEDTRHLLCPYCLKVFKNGNAFQQHYMRHQKRNVYHCNKCRLQFLFAKDKIEHKLQHHKTFRKPKQLEGLKPGTKVTIRASRGQAAVPVSSNDTPPSALQEAAPLTSSMDPLPVFLYPPVQRSIQKRAVRKMSVMGRQTCLECSFEIPDFPNHFPTYVHCSLCRYSTCCSRAYANHMINNHVPRKSPKYLALFKNSVSGIKLACTSCTFVTSVGDAMAKHLVFNPSHRSSSILPRGLTWIAHSRHGQTRDRVHDRNVKNMYPPPSFPTNKAATVKSAGATPAEPEELLTPLAPALPSPASTATPPPTPTHPQALALPPLATEGAECLNVDDQDEGSPVTQEPELASGGGGSGGVGKKEQLSVKKLRVVLFALCCNTEQAAEHFRNPQRRIRRWLRRFQASQGENLEGKYLSFEAEEKLAEWVLTQREQQLPVNEETLFQKATKIGRSLEGGFKISYEWAVRFMLRHHLTPHARRAVAHTLPKDVAENAGLFIDFVQRQIHNQDLPLSMIVAIDEISLFLDTEVLSSDDRKENALQTVGTGEPWCDVVLAILADGTVLPTLVFYRGQMDQPANMPDSILLEAKESGYSDDEIMELWSTRVWQKHTACQRSKGMLVMDCHRTHLSEEVLAMLSASSTLPAVVPAGCSSKIQPLDVCIKRTVKNFLHKKWKEQAREMADTACDSDVLLQLVLVWLGEVLGVIGDCPELVQRSFLVASVLPGPDGNINSPTRNADMQEELIASLEEQLKLSGEHSESSTPRPRSSPEETIEPESLHQLFEGESETESFYGFEEADLDLMEI

SEQ ID NO: 6193 - protein, 801 aa, Homo sapiens
MGDTVVEPAPLKPTSEPTSGPPGNNGGSLLSVITEGVGELSVIDPEVAQKACQEVLEKVKLLHGGVAVSSRGTPLELVNGDGVDSEIRCLDDPPAQIREEEDEMGAAVASGTAKGARRRRQNNSAKQSWLLRLFESKLFDISMAISYLYNSKEPGVQAYIGNRLFCFRNEDVDFYLPQLLNMYIHMDEDVGDAIKPYIVHRCRQSINFSLQCALLLGAYSSDMHISTQRHSRGTKLRKLILSDELKPAHRKRELPSLSPAPDTGLSPSKRTHQRSKSDATASISLSSNLKRTASNPKVENEDEPVRLAPEREFIKSLMAIGKRLATLPTKEQKTQRLISELSLLNHKLPARVWLPTAGFDHHVVRVPHTQAVVLNSKDKAPYLIYVEVLECENFDTTSVPARIPENRIRSTRSVENLPECGITHEQRAGSFSTVPNYDNDDEAWSVDDIGELQVELPEVHTNSCDNISQFSVDSITSQESKEPVFIAAGDIRRRLSEQLAHTPTAFKRDPEDPSAVALKEPWQEKVRRIREGSPYGHLPNWRLLSVIVKCGDDLRQELLAFQVLKQLQSIWEQERVPLWIKPYKILVISADSGMIEPVVNAVSIHQVKKQSQLSLLDYFLQEHGSYTTEAFLSAQRNFVQSCAGYCLVCYLLQVKDRHNGNILLDAEGHIIHIDFGFILSSSPRNLGFETSAFKLTTEFVDVMGGLDGDMFNYYKMLMLQGLIAARKHMDKVVQIVEIMQQGSQLPCFHGSSTIRNLKERFHMSMTEEQLQLLVEQMVDGSMRSITTKLYDGFQYLTNGIM

SEQ ID NO: 6194 - protein, 816 aa, Homo sapiens
MGDTVVEPAPLKPTSEPTSGPPGNNGGSLLSVITEGVGELSVIDPEVAQKACQEVLEKVKLLHGGVAVSSRGTPLELVNGDGVDSEIRCLDDPPAQIREEEDEMGAAVASGTAKGARRRRQNNSAKQSWLLRLFESKLFDISMAISYLYNSKEPGVQAYIGNRLFCFRNEDVDFYLPQLLNMYIHMDEDVGDAIKPYIVHRCRQSINFSLQCALLLGAYSSDMHISTQRHSRGTKLRKLILSDELKPAHRKRELPSLSPAPDTGLSPSKRTHQRSKSDATASISLSSNLKRTASNPKVENEDEELSSSTESIDNSFSSPVRLAPEREFIKSLMAIGKRLATLPTKEQKTQRLISELSLLNHKLPARVWLPTAGFDHHVVRVPHTQAVVLNSKDKAPYLIYVEVLECENFDTTSVPARIPENRIRSTRSVENLPECGITHEQRAGSFSTVPNYDNDDEAWSVDDIGELQVELPEVHTNSCDNISQFSVDSITSQESKEPVFIAAGDIRRRLSEQLAHTPTAFKRDPEDPSAVALKEPWQEKVRRIREGSPYGHLPNWRLLSVIVKCGDDLRQELLAFQVLKQLQSIWEQERVPLWIKPYKILVISADSGMIEPVVNAVSIHQVKKQSQLSLLDYFLQEHGSYTTEAFLSAQRNFVQSCAGYCLVCYLLQVKDRHNGNILLDAEGHIIHIDFGFILSSSPRNLGFETSAFKLTTEFVDVMGGLDGDMFNYYKMLMLQGLIAARKHMDKVVQIVEIMQQGSQLPCFHGSSTIRNLKERFHMSMTEEQLQLLVEQMVDGSMRSITTKLYDGFQYLTNGIM

SEQ ID NO: 6195 - protein, 801 aa, Homo sapiens; identical to SEQ ID NO: 6193

SEQ ID NO: 6196 - protein, 828 aa, Homo sapiens; identical to SEQ ID NO: 5011

SEQ ID NO: 6197 - protein, 380 aa, Homo sapiens
MVLESTMVCVDNSEYMRNGDFLPTRLQAQQDAVNIVCHSKTRSNPENNVGLITLANDCEVLTTLTPDTGRILSKLHTVQPKGKITFCTGIRVAHLALKHRQGKNHKMRIIAFVGSPVEDNEKDLVKLAKRLKKEKVNVDIINFGEEEVNTEKLTAFVNTLNGKDGTGSHLVTVPPGPSLADALISSPILAGEGGAMLGLGASDFEFGVDPSADPELALALRVSMEEQRQRQEEEARRAAAASAAEAGIATTGTEGERDSDDALLKMTISQQEFGRTGLPDLSSMTEEEQIAYAMQMSLQGAEFGQAESADIDASSAMDTSEPAKEEDDYDVMQDPEFLQSVLENLPGVDPNNEAIRNAMGSLASQATKDGKKDKKEEDKK

SEQ ID NO: 6198 - protein, 377 aa, Homo sapiens
MVLESTMVCVDNSEYMRNGDFLPTRLQAQQDAVNIVCHSKTRSNPENNVGLITLANDCEVLTTLTPDTGRILSKLHTVQPKGKITFCTGIRVAHLALKHRQGKNHKMRIIAFVGSPVEDNEKDLVKLAKRLKKEKVNVDIINFGEEEVNTEKLTAFVNTLNGKDGTGSHLVTVPPGPSLADALISSPILAGEGGAMLGLGASDFEFGVDPSADPELALALRVSMEEQRQRQEEEARRAAAASAAEAGIATTGTEDSDDALLKMTISQQEFGRTGLPDLSSMTEEEQIAYAMQMSLQGAEFGQAESADIDASSAMDTSEPAKEEDDYDVMQDPEFLQSVLENLPGVDPNNEAIRNAMGSLASQATKDGKKDKKEEDKK

SEQ ID NO: 6199 - protein, 310 aa, Homo sapiens
MRPARHWETRFGARDFGGFQDCFFRDRLMDTARIAVVGAGVVGLSTAVCISKLVPRCSVTIISDKFTPDTTSDVAAGMLIPHTYPDTPIHTQKQWFRETFNHLFAIANSAEAGDAGVHLVSGIKGSGGWTLTRRIEDLWELHPSFDIVVNCSGLGSRQLAGDSKIFPVRGQVLQVQAPWVEHFIRDGSGLTYIYPGTSHVTLGGTRQKGDWNLSPDAENSREILSRCCALEPSLHGACNIREKVGLRPYRPGVRLQTELLARDGQRLPVVHHYGHGSGGISVHWGTALEAARLVSECVHALRTPIPKSNL

SEQ ID NO: 6200 - protein, 369 aa, Homo sapiens
MRPARHWETRFGARDFGGFQDCFFRDRLMDTARIAVVGAGVVGLSTAVCISKLVPRCSVTIISDKFTPDTTSDVAAGMLIPHTYPDTPIHTQKQWFRETFNHLFAIANSAEAGDAGVHLVSGWQIFQSTPTEEVPFWADVVLGFRKMTEAELKKFPQYVFGQAFTTLKCECPAYLPWLEKRIKGSGGWTLTRRIEDLWELHPSFDIVVNCSGLGSRQLAGDSKIFPVRGQVLQVQAPWVEHFIRDGSGLTYIYPGTSHVTLGGTRQKGDWNLSPDAENSREILSRCCALEPSLHGACNIREKVGLRPYRPGVRLQTELLARDGQRLPVVHHYGHGSGGISVHWGTALEAARLVSECVHALRTPIPKSNL

SEQ ID NO: 6201 - protein, 341 aa, Homo sapiens
MDTARIAVVGAGVVGLSTAVCISKLVPRCSVTIISDKFTPDTTSDVAAGMLIPHTYPDTPIHTQKQWFRETFNHLFAIANSAEAGDAGVHLVSGWQIFQSTPTEEVPFWADVVLGFRKMTEAELKKFPQYVFGQAFTTLKCECPAYLPWLEKRIKGSGGWTLTRRIEDLWELHPSFDIVVNCSGLGSRQLAGDSKIFPVRGQVLQVQAPWVEHFIRDGSGLTYIYPGTSHVTLGGTRQKGDWNLSPDAENSREILSRCCALEPSLHGACNIREKVGLRPYRPGVRLQTELLARDGQRLPVVHHYGHGSGGISVHWGTALEAARLVSECVHALRTPIPKSNL

SEQ ID NO: 6202 - protein, 357 aa, Homo sapiens
MGTIQEAGKKTDVGVREIAEAPELGAALRHGELELKEEWQDEEFPRLLPEEAGTSEDPEDPKGDSQAAAGTPSTLALCGQRPMRKRLSAPELRLSLTKGPGNDGASPTQSAPSSPDGSSDLEIDELETPSDSEQLDSGHEFEWEDELPRAEGLGTSETAERLGRGCMWDVTGEDGHHWRVFRMGPREQRVDMTVIEPYKKVLSHGGYHGDGLNAVILFASCYLPRSSIPNYTYVMEHLFRYMVGTLELLVAENYLLVHLSGGTSRAQVPPLSWIRQCYRTLDRRLRKNLRALVVVHATWYVKAFLALLRPFISSKFTRKIRFLDSLGELAQLISLDQVHIPEAVRQLDRDLHGSGGT

SEQ ID NO: 6203 - protein, 422 aa, Homo sapiens
MLKFLAKGEVPKGSCEDEPMDSTMDDAVAGDFALINKLDIQCDLKTLSDDIKESLESEGKNSKKEEPQELLQSQDFVGEKLGSGEPSHSVKVHTVPKPGKGADLSKPPCRKAKEIRKERKRLKLMQQNPAGELEGFQAQGHPPSLFPPKAKSNQPKSLEDLIFESLPENASHKLEVRLVPVSFEDPEFKSSFSQSFSLYVKYQVAIHQDPPDECGKTEFTRFLCSSPLEAETPPNGPDCGYGSFHQQYWLDGKIIAVGVIDILPNCVSSVYLYYDPDYSFLSLGVYSALREIAFTRQLHEKTSQLSYYYMGFYIHSCPKMKYKGQYRPSDLLCPETYVWVPIEQCLPSLENSKYCRFNQDPEAVDEDRSTEPDRLQVFHKRAIMPYGVYKKQQKDPSEEAAVLQYASLVGQKCSERMLLFRN

SEQ ID NO: 6204 - protein, 518 aa, Homo sapiens
MAFWAGGSPSVVDYFPSEDFYRCGYCKNESGSRSNGMWAHSMTVQDYQDLIDRGWRRSGKYVYKPVMNQTCCPQYTIRCRPLQFQPSKSHKKVLKKMLKFLAKGEVPKGSCEDEPMDSTMDDAVAGDFALINKLDIQCDLKTLSDDIKESLESEGKNSKKEEPQELLQSQDFVGEKLGSGEPSHSVKVHTVPKPGKGADLSKPPCRKAKEIRKERKRLKLMQQNPAGELEGFQAQGHPPSLFPPKAKSNQPKSLEDLIFESLPENASHKLEVRLVPVSFEDPEFKSSFSQSFSLYVKYQVAIHQDPPDECGKTEFTRFLCSSPLEAETPPNGPDCGYGSFHQQYWLDGKIIAVGVIDILPNCVSSVYLYYDPDYSFLSLGVYSALREIAFTRQLHEKTSQLSYYYMGFYIHSCPKMKYKGQYRPSDLLCPETYVWVPIEQCLPSLENSKYCRFNQDPEAVDEDRSTEPDRLQVFHKRAIMPYGVYKKQQKDPSEEAAVLQYASLVGQKCSERMLLFRN

SEQ ID NO: 6205 - protein, 1000 aa, Homo sapiens
MAERKPNGGSGGASTSSSGTNLLFSSSATEFSFNVPFIPVTQASASPASLLLPGEDSTDVGEEDSFLGQTSIHTSAPQTFSYFSQVSSSSDPFGNIGQSPLTTAATSVGQSGFPKPLTALPFTTGSQDVSNAFSPSISKAQPGAPPSSLMGINSYLPSQPSSLPPSYFGNQPQGIPQPGYNPYRHTPGSSRANPYIAPPQLQQCQTPGPPAHPPPSGPPVQMYQMPPGSLPPVPSSVQSPAQQQVPARPGAPSVQVPSPFLLQNQYEPVQPHWFYCKEVEYKQLWMPFSVFDSLNLEEIYNSVQPDPESVVLGTDGGRYDVYLYDRIRKAAYWEEEPAEVRRCTWFYKGDTDSRFIPYTEEFSEKLEAEYKKAVTTNQWHRRLEFPSGETIVMHNPKVIVQFQPSSVPDEWGTTQDGQTRPRVVKRGIDDNLDEIPDGEMPQVDHLVFVVHGIGPVCDLRFRSIIECVDDFRVVSLKLLRTHFKKSLDDGKVSRVEFLPVHWHSSLGGDATGVDRNIKKITLPSIGRFRHFTNETLLDILFYNSPTYCQTIVEKVGMEINHLHALFMSRNPDFKGGVSVAGHSLGSLILFDILSNQKDLNLSKCPGPLAVANGVVKQLHFQEKQMPEEPKLTLDESYDLVVENKEVLTLQETLEALSLSEYFSTFEKEKIDMESLLMCTVDDLKEMGIPLGPRKKIANFVEHKAAKLKKAASEKKAVAATSTKGQEQSAQKTKDMASLPSESNEPKRKLPVGACVSSVCVNYESFEVGAGQVSVAYNSLDFEPEIFFALGSPIAMFLTIRGVDRIDENYSLPTCKGFFNIYHPLDPVAYRLEPMIVPDLDLKAVLIPHHKGRKRLHLELKESLSRMGSDLKQGFISSLKSAWQTLNEFARAHTSSTQLQEELEKVANQIKEEEEKQVVEAEKVVESPDFSKDEDYLGKVGMLNGGRRIDYVLQEKPIESFNEYLFALQSHLCYWESEDTALLLLKEIYRTMNISPEQPQH

SEQ ID NO: 6206 - protein, 164 aa, Homo sapiens
MVNSVVFFDITVDGKPLGRISIKLFADKILKTAENFRALSTGEKGFRYKGSCFHRIIPGFMCQGGDFTRHNGTGDKSIYGEKFDDENLIRKHTGSGILSMANAGPNTNGSQFFICAAKTEWLDGKHVAFGKVKERVNIVEAMEHFGYRNSKTSKKITIADCGQF

SEQ ID NO: 6207 - protein, 141 aa, Homo sapiens
MKILDVGCGGGLLTEPGGSLFITTINKTQLSYALGIVFSEQIASIVPKGTHTWEKFVSPETLESILESNGLSVQTVVGMLYNPFSGYWHWSENTSLNYAAYAVKSRVQEHPASAEFVLKGETEELQANACTNPAVHEKLKK

SEQ ID NO: 6208 - protein, 141 aa, Homo sapiens; identical to SEQ ID NO: 6207

SEQ ID NO: 6209 - protein, 717 aa, Homo sapiens
MLMTLEMTELTDPHHTMGDYKVAHPQDPHHPSEKPVIHCHKCGEPCKGEVLRVQTKHFHIKCFTCKVCGCDLAQGGFFIKNGEYLCTLDYQRMYGTRCHGCGEFVEGEVVTALGKTYHPNCFACTICKRPFPPGDRVTFNGRDCLCQLCAQPMSSSPKETTFSSNCAGCGRDIKNGQALLALDKQWHLGCFKCKSCGKVLTGEYISKDGAPYCEKDYQGLFGVKCEACHQFITGKVLEAGDKHYHPSCARCSRCNQMFTEGEEMYLQGSTVWHPDCKQSTKTEEKLRPTRTSSESIYSRPGSSIPGSPGHTIYAKVDNEILDYKDLAAIPKVKAIYDIERPDLITYEPFYTSGYDDKQERQSLGESAALSPTPSAEGYQDVRDRMIHRSTSQGSINSPVYSRHSYTPTTSRSPQHFHRPGNEPSSGRNSPLPYRPDSRPLTPTYAQAPKHFHVPDQGINIYRKPPIYKQHAALAAQSKSSEDIIKFSKFPAAQAPDPSETPKIETDHWPGPPSFAVVGPDMKRRSSGREEDDEELLRRRQLQEEQLMKLNSGLGQLILKEEMEKESRERSSLLASRYDSPINSASHIPSSKTASLPGYGRNGLHRPVSTDFAQYNSYGDVSGGVRDYQTLPDGHMPAMRMDRGVSMPNMLEPKIFPYEMLMVTNRGRNKILREVDRTRLERHLAPEVFREIFGMSIQEFDRLPLWRRNDMKKKAKLF

SEQ ID NO: 6210 - protein, 529 aa, Homo sapiens
MFTEGEEMYLQGSTVWHPDCKQSTKTEEKLRLPNIRRSSSDFFYSKSLIRRTGRSPSLQPTRTSSESIYSRPGSSIPGSPGHTIYAKVDNEILDYKDLAAIPKVKAIYDIERPDLITYEPFYTSGYDDKQERQSLGESAALSPTPSAEGYQDVRDRMIHRSTSQGSINSPVYSRHSYTPTTSRSPQHFHRPELLSPGVQRLSYLRTSSLSPTHSDSRPNPPFRHHFIPHIKGNEPSSGRNSPLPYRPDSRPLTPTYAQAPKHFHVPDQGINIYRKPPIYKQHAALAAQSKSSEDIIKFSKFPAAQAPDPSETPKIETDHWPGPPSFAVVGPDMKRRSSGREEDDEELLRRRQLQEEQLMKLNSGLGQLILKEEMEKESRERSSLLASRYDSPINSASHIPSSKTASLPGYGRNGLHRPVSTDFAQYNSYGDVSGGVRDYQTLPDGHMPAMRMDRGVSMPNMLEPKIFPYEMLMVTNRGRNKILREVDRTRLERHLAPEVFREIFGMSIQEFDRLPLWRRNDMKKKAKLF

SEQ ID NO: 6211 - protein, 701 aa, Homo sapiens
MVKEKVAHPQDPHHPSEKPVIHCHKCGEPCKGEVLRVQTKHFHIKCFTCKVCGCDLAQGGFFIKNGEYLCTLDYQRMYGTRCHGCGEFVEGEVVTALGKTYHPNCFACTICKRPFPPGDRVTFNGRDCLCQLCAQPMSSSPKETTFSSNCAGCGRDIKNGQALLALDKQWHLGCFKCKSCGKVLTGEYISKDGAPYCEKDYQGLFGVKCEACHQFITGKVLEAGDKHYHPSCARCSRCNQMFTEGEEMYLQGSTVWHPDCKQSTKTEEKLRPTRTSSESIYSRPGSSIPGSPGHTIYAKVDNEILDYKDLAAIPKVKAIYDIERPDLITYEPFYTSGYDDKQERQSLGESAALSPTPSAEGYQDVRDRMIHRSTSQGSINSPVYSRHSYTPTTSRSPQHFHRPGNEPSSGRNSPLPYRPDSRPLTPTYAQAPKHFHVPDQGINIYRKPPIYKQHAALAAQSKSSEDIIKFSKFPAAQAPDPSETPKIETDHWPGPPSFAVVGPDMKRRSSGREEDDEELLRRRQLQEEQLMKLNSGLGQLILKEEMEKESRERSSLLASRYDSPINSASHIPSSKTASLPGYGRNGLHRPVSTDFAQYNSYGDVSGGVRDYQTLPDGHMPAMRMDRGVSMPNMLEPKIFPYEMLMVTNRGRNKILREVDRTRLERHLAPEVFREIFGMSIQEFDRLPLWRRNDMKKKAKLF

SEQ ID NO: 6212 - protein, 400 aa, Homo sapiens
MFTEGEEMYLQGSTVWHPDCKQSTKTEEKLRAKVDNEILDYKDLAAIPKVKAIYDIERPDLITYEPFYTSGYDDKQERQSLGESAALSPTPSAEGYQDVRDRMIHRSTSQGSINSPVYSRHSYTPTTSRSPQHFHRPDQGINIYRKPPIYKQHAALAAQSKSSEDIIKFSKFPAAQAPDPSETPKIETDHWPGPPSFAVVGPDMKRRSSGREEDDEELLRRRQLQEEQLMKLNSGLGQLILKEEMEKESRERSSLLASRYDSPINSASHIPSSKTASLPGYGRNGLHRPVSTDFAQYNSYGDVSGGVRDYQTLPDGHMPAMRMDRGVSMPNMLEPKIFPYEMLMVTNRGRNKILREVDRTRLERHLAPEVFREIFGMSIQEFDRLPLWRRNDMKKKAKLF

SEQ ID NO: 6213 - protein, 654 aa, Homo sapiens
MVKEKVAHPQDPHHPSEKPVIHCHKCGEPCKGEVLRVQTKHFHIKCFTCKVCGCDLAQGGFFIKNGEYLCTLDYQRMYGTRCHGCGEFVEGEVVTALGKTYHPNCFACTICKRPFPPGDRVTFNGRDCLCQLCAQPMSSSPKETTFSSNCAGCGRDIKNGQALLALDKQWHLGCFKCKSCGKVLTGEYISKDGAPYCEKDYQGLFGVKCEACHQFITGKVLEAGDKHYHPSCARCSRCNQMFTEGEEMYLQGSTVWHPDCKQSTKTEEKLRPTRTSSESIYSRPGSSIPGSPGHTIYAKVDNEILDYKDLAAIPKVKAIYDIERPDLITYEPFYTSGYDDKQERQSLGESAALSPTPSAEGYQDVRDRMIHRSTSQGSINSPVYSRHSYTPTTSRSPQHFHRPGNEPSSGRNSPLPYRPDSRPLTPTYAQAPKHFHVPDQGINIYRKPPIYKQHGPDMKRRSSGREEDDEELLRRRQLQEEQLMKLNSGLGQLILKEEMEKESRERSSLLASRYDSPINSASHIPSSKTASLPGYGRNGLHRPVSTDFAQYNSYGDVSGGVRDFQTLPDGHMPAMRMDRGVSMPNMLEPKIFPYEMLMVTNRGRNKILREVDRTRLERHLAPEVFREIFGMSIQEFDRLPLWRRNDMKKKAKLF

SEQ ID NO: 6214 - protein, 845 aa, Homo sapiens
MPAFLGLKCLGKLCSSEKSKVTSSERTSARGSNRKRLIVEDRRVSGTSFTAHRRATITHLLYLCPKDYCPRGRVCNSVDPFVAHPQDPHHPSEKPVIHCHKCGEPCKGEVLRVQTKHFHIKCFTCKVCGCDLAQGGFFIKNGEYLCTLDYQRMYGTRCHGCGEFVEGEVVTALGKTYHPNCFACTICKRPFPPGDRVTFNGRDCLCQLCAQPMSSSPKETTFSSNCAGCGRDIKNGQALLALDKQWHLGCFKCKSCGKVLTGEYISKDGAPYCEKDYQGLFGVKCEACHQFITGKVLEAGDKHYHPSCARCSRCNQMFTEGEEMYLQGSTVWHPDCKQSTKTEEKLRLPNIRRSSSDFFYSKSLIRRTGRSPSLQPTRTSSESIYSRPGSSIPGSPGHTIYAKVDNEILDYKDLAAIPKVKAIYDIERPDLITYEPFYTSGYDDKQERQSLGESAALSPTPSAEGYQDVRDRMIHRSTSQGSINSPVYSRHSYTPTTSRSPQHFHRPELLSPGVQRLSYLRTSSLSPTHSDSRPNPPFRHHFIPHIKGNEPSSGRNSPLPYRPDSRPLTPTYAQAPKHFHVPDQGINIYRKPPIYKQHAALAAQSKSSEDIIKFSKFPAAQAPDPSETPKIETDHWPGPPSFAVVGPDMKRRSSGREEDDEELLRRRQLQEEQLMKLNSGLGQLILKEEMEKESRERSSLLASRYDSPINSASHIPSSKTASLPGYGRNGLHRPVSTDFAQYNSYGDVSGGVREYQTLPDGHMPAMRMDRGVSMPNMLEPKIFPYEMLMVTNRGRNKILREVDRTRLERHLAPEVFREIFGMSIQEFDRLPLWRRNDMKKKAKLF

SEQ ID NO: 6215 - protein, 701 aa, Homo sapiens
MVPDPVAHPQDPHHPSEKPVIHCHKCGEPCKGEVLRVQTKHFHIKCFTCKVCGCDLAQGGFFIKNGEYLCTLDYQRMYGTRCHGCGEFVEGEVVTALGKTYHPNCFACTICKRPFPPGDRVTFNGRDCLCQLCAQPMSSSPKETTFSSNCAGCGRDIKNGQALLALDKQWHLGCFKCKSCGKVLTGEYISKDGAPYCEKDYQGLFGVKCEACHQFITGKVLEAGDKHYHPSCARCSRCNQMFTEGEEMYLQGSTVWHPDCKQSTKTEEKLRPTRTSSESIYSRPGSSIPGSPGHTIYAKVDNEILDYKDLAAIPKVKAIYDIERPDLITYEPFYTSGYDDKQERQSLGESAALSPTPSAEGYQDVRDRMIHRSTSQGSINSPVYSRHSYTPTTSRSPQHFHRPGNEPSSGRNSPLPYRPDSRPLTPTYAQAPKHFHVPDQGINIYRKPPIYKQHAALAAQSKSSEDIIKFSKFPAAQAPDPSETPKIETDHWPGPPSFAVVGPDMKRRSSGREEDDEELLRRRQLQEEQLMKLNSGLGQLILKEEMEKESRERSSLLASRYDSPINSASHIPSSKTASLPGYGRNGLHRPVSTDFAQYNSYGDVSGGVREYQTLPDGHMPAMRMDRGVSMPNMLEPKIFPYEMLMVTNRGRNKILREVDRTRLERHLAPEVFREIFGMSIQEFDRLPLWRRNDMKKKAKLF

SEQ ID NO: 6216 - protein, 454 aa, Homo sapiens
MFTEGEEMYLQGSTVWHPDCKQSTKTEEKLRLPNIRRSSSDFFYSKSLIRRTGRSPSLQPTRTSSESIYSRPGSSIPGSPGHTIYAKVDNEILDYKDLAAIPKVKAIYDIERPDLITYEPFYTSGYDDKQERQSLGESAALSPTPSAEGYQDVRDRMIHRSTSQGSINSPVYSRHSYTPTTSRSPQHFHRPDQGINIYRKPPIYKQHAALAAQSKSSEDIIKFSKFPAAQAPDPSETPKIETDHWPGPPSFAVVGPDMKRRSSGREEDDEELLRRRQLQEEQLMKLNSGLGQLILKEEMEKESRERSSLLASRYDSPINSASHIPSSKTASLPGYGRNGLHRPVSTDFAQYNSYGDVSGGVRDFQTLPDGHMPAMRMDRGVSMPNMLEPKIFPYEMLMVTNRGRNKILREVDRTRLERHLAPEVFREIFGMSIQEFDRLPLWRRNDMKKKAKLF

SEQ ID NO: 6217 - protein, 745 aa, Homo sapiens
MLMTLEMTELTDPHHTMGDYKVAHPQDPHHPSEKPVIHCHKCGEPCKGEVLRVQTKHFHIKCFTCKVCGCDLAQGGFFIKNGEYLCTLDYQRMYGTRCHGCGEFVEGEVVTALGKTYHPNCFACTICKRPFPPGDRVTFNGRDCLCQLCAQPMSSSPKETTFSSNCAGCGRDIKNGQALLALDKQWHLGCFKCKSCGKVLTGEYISKDGAPYCEKDYQGLFGVKCEACHQFITGKVLEAGDKHYHPSCARCSRCNQMFTEGEEMYLQGSTVWHPDCKQSTKTEEKLRLPNIRRSSSDFFYSKSLIRRTGRSPSLQPTRTSSESIYSRPGSSIPGSPGHTIYAKVDNEILDYKDLAAIPKVKAIYDIERPDLITYEPFYTSGYDDKQERQSLGESAALSPTPSAEGYQDVRDRMIHRSTSQGSINSPVYSRHSYTPTTSRSPQHFHRPGNEPSSGRNSPLPYRPDSRPLTPTYAQAPKHFHVPDQGINIYRKPPIYKQHAALAAQSKSSEDIIKFSKFPAAQAPDPSETPKIETDHWPGPPSFAVVGPDMKRRSSGREEDDEELLRRRQLQEEQLMKLNSGLGQLILKEEMEKESRERSSLLASRYDSPINSASHIPSSKTASLPGYGRNGLHRPVSTDFAQYNSYGDVSGGVRDFQTLPDGHMPAMRMDRGVSMPNMLEPKIFPYEMLMVTNRGRNKILREVDRTRLERHLAPEVFREIFGMSIQEFDRLPLWRRNDMKKKAKLF

SEQ ID NO: 6218 - protein, 304 aa, Homo sapiens
MAEASAAGADSGAAVAAHRFFCHFCKGEVSPKLPEYICPRCESGFIEEVTDDSSFLGGGGSRIDNTTTTHFAELWGHLDHTMFFQDFRPFLSSSPLDQDNRANERGHQTHTDFWGARPPRLPLGRRYRSRGSSRPDRSPAIEGILQHIFAGFFANSAIPGSPHPFSWSGMLHSNPGDYAWGQTGLDAIVTQLLGQLENTGPPPADKEKITSLPTVTVTQEQVDMGLECPVCKEDYTVEEEVRQLPCNHFFHSSCIVPWLELHDTCPVCRKSLNGEDSTRQSQSTEASASNRFSNDSQLHDRWTF

SEQ ID NO: 6219 - protein, 211 aa, Homo sapiens
MSCTIEKILTDAKTLLERLREHDAAAESLVDQSAALHRRVAAMREAGTALPDQVRQRYQEDASDMKDMSKYKPHILLSQENTQIRDLQQENRELWISLEEHQDALELIMSKYRKQMLQLMVAKKAVDAEPVLKAHQSHSAEIESQIDRICEMGEVMRKAVQVDDDQFCKIQEKLAQLELENKELRELLSISSESLQARKENSMDTASQAIK

SEQ ID NO: 6220 - protein, 816 aa, Homo sapiens
MVLMFQIRYISQTQGLPAEYLLSAGTKTTRFFNRDPNLGYPLWRLKTPEEHELETGIKSKEARKYIFNCLDDMAQVNMSTDLEGTDMLAEKADRREYIDLLKKMLTIDADKRITPLKTLNHQFVTMTHLLDFPHSNHVKSCFQNMEICKRRVHMYDTVSQIKSPFTTHVAPNTSTNLTMSFSNQLNTVHNQASVLASSSTAAAATLSLANSDVSLLNYQSALYPSSAAPVPGVAQQGVSLQPGTTQICTQTDPFQQTFIVCPPAFQTGLQATTKHSGFPVRMDNAVPIVPQAPAAQPLQIQSGVLTQGSCTPLMVATLHPQVATITPQYAVPFTLSCAAGRPALVEQTAAVLQAWPGGTQQILLPSTWQQLPGVALHNSVQPTAMIPEAMGSGQQLADWRNAHSHGNQYSTIMQQPSLLTNHVTLATAQPLNVGVAHVVRQQQSSSLPSKKNKQSAPVSSKSSLDVLPSQVYSLVGSSPLRTTSSYNSLVPVQDQHQPIIIPDTPSPPVSVITIRSDTDEEEDNKYKPSSSGLKPRSNVISYVTVNDSPDSDSSLSSPYSTDTLSALRGNSGSVLEGPGRVVADGTGTRTIIVPPLKTQLGDCTVATQASGLLSNKTKPVASVSGQSSGCCITPTGYRAQRGGTSAAQPLNLSQNQQSSAAPTSQERSSNPAPRRQQAFVAPLSQAPYTFQHGSPLHSTGHPHLAPAPAHLPSQAHLYTYAAPTSAAALGSTSSIAHLFSPQGSSRHAAAYTTHPSTLVHQVPVSVGPSLLTSASVAPAQYQHQFATQSYIGSSRGSTIYTGYPLSPTKISQYSYL

SEQ ID NO: 6221 - protein, 1165 aa, Homo sapiens
MASQLQVFSPPSVSSSAFCSAKKLKIEPSGWDVSGQSSNDKYYTHSKTLPATQGQANSSHQVANFNIPAYDQGLLLPAPAVEHIVVTAADSSGSAATSTFQSSQTLTHRSNVSLLEPYQKCGLKRKSEEVDSNGSVQIIEEHPPLMLQNRTVVGAAATTTTVTTKSSSSSGEGDYQLVQHEILCSMTNSYEVLEFLGRGTFGQVAKCWKRSTKEIVAIKILKNHPSYARQGQIEVSILSRLSSENADEYNFVRSYECFQHKNHTCLVFEMLEQNLYDFLKQNKFSPLPLKYIRPILQQVATALMKLKSLGLIHADLKPENIMLVDPVRQPYRVKVIDFGSASHVSKAVCSTYLQSRYYRAPEIILGLPFCEAIDMWSLGCVIAELFLGWPLYPGASEYDQIRYISQTQGLPAEYLLSAGTKTTRFFNRDPNLGYPLWRLKTPEEHELETGIKSKEARKYIFNCLDDMAQVNMSTDLEGTDMLAEKADRREYIDLLKKMLTIDADKRITPLKTLNHQFVTMTHLLDFPHSNHVKSCFQNMEICKRRVHMYDTVSQIKSPFTTHVAPNTSTNLTMSFSNQLNTVHNQASVLASSSTAAAATLSLANSDVSLLNYQSALYPSSAAPVPGVAQQGVSLQPGTTQICTQTDPFQQTFIVCPPAFQTGLQATTKHSGFPVRMDNAVPIVPQAPAAQPLQIQSGVLTQQAWPGGTQQILLPSTWQQLPGVALHNSVQPTAMIPEAMGSGQQLADWRNAHSHGNQYSTIMQQPSLLTNHVTLATAQPLNVGVAHVVRQQQSSSLPSKKNKQSAPVSSKSSLDVLPSQVYSLVGSSPLRTTSSYNSLVPVQDQHQPIIIPDTPSPPVSVITIRSDTDEEEDNKYKPSSSGLKPRSNVISYVTVNDSPDSDSSLSSPYSTDTLSALRGNSGSVLEGPGRVVADGTGTRTIIVPPLKTQLGDCTVATQASGLLSNKTKPVASVSGQSSGCCITPTGYRAQRGGTSAAQPLNLSQNQQSSAAPTSQERSSNPAPRRQQAFVAPLSQAPYTFQHGSPLHSTGHPHLAPAPAHLPSQAHLYTYAAPTSAAALGSTSSIAHLFSPQGSSRHAAAYTTHPSTLVHQVPVSVGPSLLTSASVAPAQYQHQFATQSYIGSSRGSTIYTGYPLSPTKISQYSYL

SEQ ID NO: 6222 - protein, 1165 aa, Homo sapiens; identical to SEQ ID NO: 6221

SEQ ID NO: 6223 - protein, 1210 aa, Homo sapiens
MASQLQVFSPPSVSSSAFCSAKKLKIEPSGWDVSGQSSNDKYYTHSKTLPATQGQANSSHQVANFNIPAYDQGLLLPAPAVEHIVVTAADSSGSAATSTFQSSQTLTHRSNVSLLEPYQKCGLKRKSEEVDSNGSVQIIEEHPPLMLQNRTVVGAAATTTTVTTKSSSSSGEGDYQLVQHEILCSMTNSYEVLEFLGRGTFGQVAKCWKRSTKEIVAIKILKNHPSYARQGQIEVSILSRLSSENADEYNFVRSYECFQHKNHTCLVFEMLEQNLYDFLKQNKFSPLPLKYIRPILQQVATALMKLKSLGLIHADLKPENIMLVDPVRQPYRVKVIDFGSASHVSKAVCSTYLQSRYYRAPEIILGLPFCEAIDMWSLGCVIAELFLGWPLYPGASEYDQIRYISQTQGLPAEYLLSAGTKTTRFFNRDPNLGYPLWRLKTPEEHELETGIKSKEARKYIFNCLDDMAQVNMSTDLEGTDMLAEKADRREYIDLLKKMLTIDADKRITPLKTLNHQFVTMTHLLDFPHSNHVKSCFQNMEICKRRVHMYDTVSQIKSPFTTHVAPNTSTNLTMSFSNQLNTVHNQASVLASSSTAAAATLSLANSDVSLLNYQSALYPSSAAPVPGVAQQGVSLQPGTTQICTQTDPFQQTFIVCPPAFQTGLQATTKHSGFPVRMDNAVPIVPQAPAAQPLQIQSGVLTQGSCTPLMVATLHPQVATITPQYAVPFTLSCAAGRPALVEQTAAVLQAWPGGTQQILLPSTWQQLPGVALHNSVQPTAMIPEAMGSGQQLADWRNAHSHGNQYSTIMQQPSLLTNHVTLATAQPLNVGVAHVVRQQQSSSLPSKKNKQSAPVSSKSSLDVLPSQVYSLVGSSPLRTTSSYNSLVPVQDQHQPIIIPDTPSPPVSVITIRSDTDEEEDNKYKPSSSGLKPRSNVISYVTVNDSPDSDSSLSSPYSTDTLSALRGNSGSVLEGPGRVVADGTGTRTIIVPPLKTQLGDCTVATQASGLLSNKTKPVASVSGQSSGCCITPTGYRAQRGGTSAAQPLNLSQNQQSSAAPTSQERSSNPAPRRQQAFVAPLSQAPYTFQHGSPLHSTGHPHLAPAPAHLPSQAHLYTYAAPTSAAALGSTSSIAHLFSPQGSSRHAAAYTTHPSTLVHQVPVSVGPSLLTSASVAPAQYQHQFATQSYIGSSRGSTIYTGYPLSPTKISQYSYL

SEQ ID NO: 6224 - protein, 1075 aa, Homo sapiens
MASQLQVFSPPSVSSSAFCSAKKLKIEPSGWDVSGQSSNDKYYTHSKTLPATQGQANSSHQVANFNIPAYDQGLLLPAPAVEHIVVTAADSSGSAATSTFQSSQTLTHRSNVSLLEPYQKCGLKRKSEEVDSNGSVQIIEEHPPLMLQNRTVVGAAATTTTVTTKSSSSSGEGDYQLVQHEILCSMTNSYEVLEFLGRGTFGQVAKCWKRSTKEIVAIKILKNHPSYARQGQIEVSILSRLSSENADEYNFVRSYECFQHKNHTCLVFEMLEQNLYDFLKQNKFSPLPLKYIRPILQQVATALMKLKSLGLIHADLKPENIMLVDPVRQPYRVKVIDFGSASHVSKAVCSTYLQSRYYRAPEIILGLPFCEAIDMWSLGCVIAELFLGWPLYPGASEYDQIRYISQTQGLPAEYLLSAGTKTTRFFNRDPNLGYPLWRLKTPEEHELETGIKSKEARKYIFNCLDDMAQVNMSTDLEGTDMLAEKADRREYIDLLKKMLTIDADKRITPLKTLNHQFVTMTHLLDFPHSNHVKSCFQNMEICKRRVHMYDTVSQIKSPFTTHVAPNTSTNLTMSFSNQLNTVHNQASVLASSSTAAAATLSLANSDVSLLNYQSALYPSSAAPVPGVAQQGVSLQPGTTQICTQTDPFQQTFIVCPPAFQTGLQATTKHSGFPVRMDNAVPIVPQAPAAQPLQIQSGVLTQGSCTPLMVATLHPQVATITPQYAVPFTLSCAAGRPALVEQTAAVLQAWPGGTQQILLPSTWQQLPGVALHNSVQPTAMIPEAMGSGQQLADWRNAHSHGNQYSTIMQQPSLLTNHVTLATAQPLNVGVAHVVRQQQSSSLPSKKNKQSAPVSSKSSLDVLPSQVYSLVGSSPLRTTSSYNSLVPVQDQHQPIIIPDTPSPPVSVITIRSDTDEEEDNKYKPSSSGLKPRSNVISYVTVNDSPDSDSSLSSPYSTDTLSALRGNSGSVLEGPGRVVADGTGTRTIIVPPLKTQLGDCTVATQASGLLSNKTKPVASVSGQSSGCCITPTGYRAQRGGTSAAQPLNLSQVSAMGYCLLFGPCTVVTFWRTLLLAGC

SEQ ID NO: 6225 - protein, 180 aa, Homo sapiens
MQAEGQGTGGSTGDADGPGGPGIPDGPGGNAGGPGEAGATGGRGPRGAGAARASGPRGGAPRGPHGGAASAQDGRCPCGARRPDSRLLQLHITMPFSSPMEAELVRRILSRDAAPLPRPGAVLKDFTVSGNLLFIRLTAADHRQLQLSISSCLQQLSLLMWITQCFLPVFLAQAPSGQRR

SEQ ID NO: 6226 - protein, 238 aa, Homo sapiens
MSEDLAKQLASYKAQLQQVEAALSGNGENEDLLKLKKDLQEVIELTKDLLSTQPSETLASSDSFASTQPTHSWKVGDKCMAVWSEDGQCYEAEIEEIDEENGTAAITFAGYGNAEVTPLLNLKPVEEGRKAKEDSGNKPMSKKEMIAQQREYKKKKALKKAQRIKELEQEREDQKVKWQQFNNRAYSKNKKGQVKRSIFASPESVTGKVGVGTCGIADKPMTQYQDTSKYNVRHLMPQ

SEQ ID NO: 6227 - protein, 238 aa, Homo sapiens; identical to SEQ ID NO: 6226

SEQ ID NO: 6228 - protein, 742 aa, Homo sapiens
DLSSGGGIEPQCSSEVYFRARERGCENVAWSLGLRSHCFLEAELHPLPWFLPTNVCSPLPGAAHKLVCYFTNWAHSRPGPASILPHDLDPFLCTHLIFAFASMNNNQIVAKDLQDEKILYPEFNKLKERMWQQLPTGVKNPAHQPSLSHHRNRELKTLLSIGGWNFGTSRFTTMLSTFANREKFIASVISLLRTHDFDGLDLFFLYPGLRGSPMHDRWTFLFLIEELLFAFRKEALLTMRPRLLLSAAVSGVPHIVQTSYDVRFLGRLLDFINVLSYDLHGSWERFTGHNSPLFSLPEDPKSSAYAMNYWRKLGAPSEKLIMGIPTYGRTFRLLKASKNGLQARAIGPASPGKYTKQEGFLAYFEICSFVWGAKKHWIDYQYVPYANKGKEWVGYDNAISFSYKAWFIRREHFGGAMVWTLDMDDVRGTFCGTGPFPLVYVLNDILVRAEFSSTSLPQFWLSSAVNSSSTDPERLAVTTAWTTDSKILPPGGEAGVTEIHGKCENMTITPRGTTVTPTKETVSLGKHTVALGEKTEITGAMTMTSVGHQSMTPGEKALTPVGHQSVTTGQKTLTSVGYQSVTPGEKTLTPVGHQSVTPVSHQSVSPGGTTMTPVHFQTETLRQNTVAPRRKAVAREKVTVPSRNISVTPEGQTMPLRGENLTSEVGTHPRMGNLGLQMEAENRMMLSSSPVIQLPEQTPLAFDNRFVPIYGNHSSVNSVTPQTSPLSLKKEIPENSAVDEEA

SEQ ID NO: 6229 - protein, 678 aa, Homo sapiens
MWKLLLWVGLVLVLKHHDGAAHKLVCYFTNWAHSRPGPASILPHDLDPFLCTHLIFAFASMNNNQIVAKDLQDEKILYPEFNKLKERNRELKTLLSIGGWNFGTSRFTTMLSTFANREKFIASVISLLRTHDFDGLDLFFLYPGLRGSPMHDRWTFLFLIEELLFAFRKEALLTMRPRLLLSAAVSGVPHIVQTSYDVRFLGRLLDFINVLSYDLHGSWERFTGHNSPLFSLPEDPKSSAYAMNYWRKLGAPSEKLIMGIPTYGRTFRLLKASKNGLQARAIGPASPGKYTKQEGFLAYFEICSFVWGAKKHWIDYQYVPYANKGKEWVGYDNAISFSYKAWFIRREHFGGAMVWTLDMDDVRGTFCGTGPFPLVYVLNDILVRAEFSSTSLPQFWLSSAVNSSSTDPERLAVTTAWTTDSKILPPGGEAGVTEIHGKCENMTITPRGTTVTPTKETVSLGKHTVALGEKTEITGAMTMTSVGHQSMTPGEKALTPVGHQSVTTGQKTLTSVGYQSVTPGEKTLTPVGHQSVTPVSHQSVSPGGTTMTPVHFQTETLRQNTVAPRRKAVAREKVTVPSRNISVTPEGQTMPLRGENLTSEVGTHPRMGNLGLQMEAENRMMLSSSPVIQLPEQTPLAFDNRFVPIYGNHSSVNSVTPQTSPLSLKKEIPENSAVDEEA

SEQ ID NO: 6230 - protein, 334 aa, Homo sapiens
MGGAVSAGEDNDELIDNLKEAQYIRTELVEQAFRAIDRADYYLEEFKENAYKDLAWKHGNIHLSAPCIYSEVMEALDLQPGLSFLNLGSGTGYLSSMVGLILGPFGVNHGVELHSDVIEYAKQKLDFFIRTSDSFDKFDFCEPSFVTGNCLEISPDCSQYDRVYCGAGVQKEHEEYMKNLLKVGGILVMPLEEKPCHSESGKSRLVQLPPVAVRSLQDLARIAIRGTIKKIIHQETVSKNGNGLKNTPRFKRRRVRRRRMETIVFLDKEVFASRISNPSDDNSCEDLEEERREEEEKTPPETKPDPPVNFLRQKVLSLPLPDPLKYYLLYYREK

SEQ ID NO: 6231 - protein, 594 aa, Homo sapiens
MSRPSSRAIYLHRKEYSQNLTSEPTLLQHRVEHLMTCKQGSQRVQGPEDALQKLFEMDAQGRVWSQDLILQVRDGWLQLLDIETKEELDSYRLDSIQAMNVALNTCSYNSILSITVQEPGLPGTSTLLFQCQEVGAERLKTSLQKALEEELEQSRPRLGGLQPGQDRWRGPAMERPLPMEQARYLEPGIPPEQPHQRTLEHSLPPSPRPLPRHTSAREPSAFTLPPPRRSSSPEDPERDEEVLNHVLRDIELFMGKLEKAQAKTSRKKKFGKKNKDQGGLTQAQYIDCFQKIKHSFNLLGRLATWLKETSAPELVHILFKSLNFILARCPEAGLAAQVISPLLTPKAINLLQSCLSPPESNLWMGLGPAWTTSRADWTGDEPLPYQPTFSDDWQLPEPSSQAPLGYQDPVSLRRGSHRLGSTSHFPQEKTHNHDPQPGDPNSRPSSPKPAQPALKMQVLYEFEARNPRELTVVQGEKLEVLDHSKRWWLVKNEAGRSGYIPSNILEPLQPGTPGTQGQSPSRVPMLRLSSRPEEVTDWLQAENFSTATVRTLGSLTGSQLLRIRPGELQMLCPQEAPRILSRLEAVRRMLGISP

SEQ ID NO: 6232 - protein, 499 aa, Homo sapiens
MSFGSEHYLCSSSSYRKVFGDGSRLSARLSGAGGAGGFRSQSLSRSNVASSAACSSASSLGLGLAYRRPPASDGLDLSQAAARTNEYKIIRTNEKEQLQGLNDRFAVFIEKVHQLETQNRALEAELAALRQRHAEPSRVGELFQRELRDLRAQLEEASSARSQALLERDGLAEEVQRLRARCEEESRGREGAERALKAQQRDVDGATLARLDLEKKVESLLDELAFVRQVHDEEVAELLATLQASSQAAAEVDVTVAKPDLTSALREIRAQYESLAAKNLQSAEEWYKSKFANLNEQAARSTEAIRASREEIHEYRRQLQARTIEIEGLRGANESLERQILELEERHSAEVAGYQDSIGQLENDLRNTKSEMARHLREYQDLLNVKMALDIEIAAYRKLLEGEETRFSTSGLSISGLNPLPNPSYLLPPRILSATTSKVSSTGLSLKKEEEEEEASKVASKKTSQIGESFEEILEETVISTKKTEKSNIEETTISSQKI

SEQ ID NO: 6233 - protein, 376 aa, Homo sapiens
MESYDVIANQPVVIDNGSGVIKAGFAGDQIPKYCFPNYVGRPKHVRVMAGALEGDIFIGPKAEEHRGLLSIRYPMEHGIVKDWNDMERIWQYVYSKDQLQTFSEEHPVLLTEAPLNPRKNRERAAEVFFETFNVPALFISMQAVLSLYATGRTTGVVLDSGDGVTHAVPIYEGFAMPHSIMRIDIAGRDVSRFLRLYLRKEGYDFHSSSEFEIVKAIKERACYLSINPQKDETLETEKAQYYLPDGSTIEIGPSRFRAPELLFRPDLIGEESEGIHEVLVFAIQKSDMDLRRTLFSNIVLSGGSTLFKGFGDRLLSEVKKLAPKDVKIRISAPQERLYSTWIGGSILASLDTFKKMWVSKKEYEEDGARSIHRKTF

SEQ ID NO: 6234 - protein, 260 aa, Homo sapiens
MSLQKTPPTRVFVELVPWADRSRENNLASGRETLPGLRHPLSSTQAQTATREVQVSGTSEVSAGPDRAQVVVRVSSTKEAAAEAKKSVCRRLDYITQSLQQQGVQAENITVTKDFRRVENAYHMEAEVCITFTEFGKMQNICNFLVEKLDSSVVISPPQFYHTPGSVENLRRQACLVAVENAWRKAQEVCNLVGQTLGKPLLIKEEETKEWEGQIDDHQSSRLSSSLTVQQKIKSATIHAASKVFITFEVKGKEKRKKHL

SEQ ID NO: 6235 - protein, 296 aa, Homo sapiens
MEPSGGEQEPGAVRFLDLPWEDVLLPHVLNRVPLRQLLRLQRVSRAFRSLVQLHLAGLRRFDAAQVGPQIPRAALARLLRDAEGLQELALAPCHEWLSDEDLVPVLARNPQLRSVALGGCGQLSRRALGALAEGCPRLQRLSLAHCDWVDGLALRGLADRCPALEELDLTACRQLKDEAIVYLAQRRGAGLRSLSLAVNANVGDAAVQELARNCPELHHLDLTGCLRVGSDGVRTLAEYCPVLRSLRVRHCHHVAESSLSRLRKRGVDIDVEPPLHQALVLLQDMAGFAPFVNLQV

SEQ ID NO: 6236 - protein, 699 aa, Homo sapiens
MADAGIRRVVPSDLYPLVLGFLRDNQLSEVANKFAKATGATQQDANASSLLDIYSFWLKSAKVPERKLQANGPVAKKAKKKASSSDSEDSSEEEEEVQGPPAKKAAVPAKRVGLPPGKAAAKASESSSSEESSDDDDEEDQKKQPVQKGVKPQAKAAKAPPKKAKSSDSDSDSSSEDEPPKNQKPKITPVTVKAQTKAPPKPARAAPKIANGKAASSSSSSSSSSSSDDSEEEKAAATPKKTVPKKQVVAKAPVKAATTPTRKSSSSEDSSSDEEEEQKKPMKNKPGPYSSVPPPSAPPPKKSLGTQPPKKAVEKQQPVESSEDSSDESDSSSEEEKKPPTKAVVSKATTKPPPAKKAAESSSDSSDSDSSEDDEAPSKPAGTTKNSSNKPAVTTKSPAVKPAAAPKQPVGGGQKLLTRKADSSSSEEESSSSEEEKTKKMVATTKPKATAKAALSLPAKQAPQGSRDSSSDSDSSSSEEEEEKTSKSAVKKKPQKVAGGAAPSKPASAKKGKAESSNSSSSDDSSEEEEEKLKGKGSPRPQAPKANGTSALTAQNGKAAKNSEEEEEEKKKAAVVVSKSGSLKKRKQNEAAKEAETPQAKKIKLQTPNTFPKRKKGEKRASSPFRRVREEEIEVDSRVADNSFDAKRGAAGDWGERANQVLKFTKGKSFRHEKTKKKRGSYRGGSISVQVNSIKFDSE

SEQ ID NO: 6237 - protein, 424 aa, Homo sapiens
MEENNLQCSSVVDGNFEEVPRETAIQFKPPLYRQRYQFVKNLVDQHEPKKVADLGCGDTSLLRLLKVNPCIELLVGVDINEDKLRWRGDSLAPFLGDFLKPRDLNLTITLYHGSVVERDSRLLGFDLITCIELIEHLDSGDLARFPEVVFGYLSPSMIVISTPNSEFNPLFPSVTLRDSDHKFEWTRMEFQTWALYVANRYDYSVEFTGVGEPPAGAENVGYCTQIGIFRKNGGKATESCLSEQHDQHVYKARQGLTMLPRLVLNFHPQAILLPHLPKMLRLQVFTTSYPSLQQERFFKLVLVNEVSQQVESLRVSHLPRRKEQAGERGDKPKDIGGSKAPVPCFGPVFTEVEKAKIENSPTPFCVGDKFFVPLQRLLAYPKLNRLCANEEMMRSVIADSIPLSSDGSAVVADLRNYFDEQFEF

SEQ ID NO: 6238 - protein, 393 aa, Homo sapiens
MEENNLQCSSVVDGNFEEVPRETAIQFKPPLYRQRYQFVKNLVDQHEPKKVADLGCGDTSLLRLLKVNPCIELLVGVDINEDKLRWRGDSLAPFLGDFLKPRDLNLTITLYHGSVVERDSRLLGFDLITCIELIEHLDSGDLARFPEVVFGYLSPSMIVISTPNSEFNPLFPSVTLRDSDHKFEWTRMEFQTWALYVANRYDYSVEFTGVGEPPAGAENVGYCTQIGIFRKNGGKATESCLSEQHDQHVYKAVFTTSYPSLQQERFFKLVLVNEVSQQVESLRVSHLPRRKEQAGERGDKPKDIGGSKAPVPCFGPVFTEVEKAKIENSPTPFCVGDKFFVPLQRLLAYPKLNRLCANEEMMRSVIADSIPLSSDGSAVVADLRNYFDEQFEF

SEQ ID NO: 6239 - protein, 566 aa, Homo sapiens
MSASTGGGGDSGGSGGSSSSSQASCGPESSGSELALATPVPQMLQGLLGSDDEEQEDPKDYCKGGYHPVKIGDVFNGRYHVVRKLGWGHFSTVWLCWDIQRKRFVALKVVKSAGHYTETAVDEIKLLKCVRDSDPSDPKRETIVQLIDDFRISGVNGVHVCMVLEVLGHQLLKWIIKSNYQGLPVPCVKSIVRQVLHGLDYLHTKCKIIHTDIKPENILLCVGDAYIRRLAAEATEWQQAGAPPPSRSIVSTAPQEVLTGKLSKNKRKKMRRKRKQQKRLLEERLRDLQRLEAMEAATQAEDSGLRLDGGSGSTSSSGCHPGGARAGPSPASSSPAPGGGRSLSAGSQTSGFSGSLFSPASCSILSGSSNQRETGGLLSPSTPFGASNLLVNPLEPQNADKIKIKIADLGNACWVHKHFTEDIQTRQYRAVEVLIGAEYGPPADIWSTACMAFELATGDYLFEPHSGEDYSRDEDHIAHIVELLGDIPPAFALSGRYSREFFNRRGELRHIHNLKHWGLYEVLMEKYEWPLEQATQFSAFLLPMMEYIPEKRASAADCLQHPWLNP

SEQ ID NO: 6240 - protein, 49 aa, Homo sapiens
MAGPRVEVDGSIMEGGGQILRVSTALSCLLGLPLRVQKIRAGRSTPGLR

SEQ ID NO: 6241 - protein, 366 aa, Homo sapiens
MAGPRVEVDGSIMEGGGQILRVSTALSCLLGLPLRVQKIRAGRSTPGLRPQHLSGLEMIRDLCDGQLEGAEIGSTEITFTPEKIKGGIHTADTKTAGSVCLLMQVSMPCVLFAASPSELHLKGGTNAEMAPQIDYTVMVFKPIVEKFGFIFNCDIKTRGYYPKGGGEVIVRMSPVKQLNPINLTERGCVTKIYGRAFVAGVLPFKVAKDMAAAAVRCIRKEIRDLYVNIQPVQEPKDQAFGNGNGIIIIAETSTGCLFAGSSLGKRGVNADKVGIEAAEMLLANLRHGGTVDEYLQDQLIVFMALANGVSRIKTGPVTLHTQTAIHFAEQIAKAKFIVKKSEDEEDAAKDTYIIECQGIGMTNPNL

SEQ ID NO: 6242 - protein, 384 aa, Homo sapiens; identical to SEQ ID NO: 5748

SEQ ID NO: 6243 - protein, 267 aa, Homo sapiens
MAEPVQEELSVLAAIFCRPHEWEVLSRSETDGTVFRIHTKAEGFMDVDIPLELVFHLPVNYPSCLPGISINSEQLTRAQCVTVKENLLEQAESLLSEPMVHELVLWIQQNLRHILSQPETGSGSEKCTFSTSTTMDDGLWITLLHLDHMRAKTKYVKIVEKWASDLRLTGRLMFMGKIILILLQGDRNNLKEYLILQKTSKVDVDSSGKKCKEKMISVLFETKVQTEHKRFLAFEVKEYSALDELQKEFETAGLKKLFSEFVLALVK

SEQ ID NO: 6244 - protein, 669 aa, Homo sapiens
MAIVQTLPVPLEPAPEAATAPQAPVMGSVSSLISGRPCPGGPAPPRHHGPPGPTFFRQQDGLLRGGYEAQEPLCPAVPPRKAVPVTSFTYINEDFRTESPPSPSSDVEDAREQRAHNAHLRGPPPKLIPVSGKLEKNMEKILIRPTAFKPVLPKPRGAPSLPSFMGPRATGLSGSQGSLTQLFGGPASSSSSSSSSSAADKPLAFSGWASGCPSGTLSDSGRNSLSSLPTYSTGGAEPTTSSPGGHLPSHGSGRGALPGPARGVPTGPSHSDSGRSSSSKSTGSLGGRVAGGLLGSGTRASPDSSSCGERSPPPPPPPPSDEALLHCVLEGKLRDREAELQQLRDSLDENEATMCQAYEERQRHWQREREALREDCAAQAQRAQRAQQLLQLQVFQLQQEKRQLQDDFAQLLQEREQLERRCATLEREQRELGPRLEETKWEVCQKSGEISLLKQQLKESQAELVQKGSELVALRVALREARATLRVSEGRARGLQEAARARELELEACSQELQRHRQEAEQLREKAGQLDAEAAGLREPPVPPATADPFLLAESDEAKVQRAAAGVGGSLRAQVERLRVELQRERRRGEEQRDSFEGERLAWQAEKEQVIRYQKQLQHNYIQMYRRNRQLEQELQQLSLELEARELADLGLAEQAPCICLEEITATEI

SEQ ID NO: 6245 - protein, 669 aa, Homo sapiens; identical to SEQ ID NO: 6244

SEQ ID NO: 6246 - protein, 352 aa, Homo sapiens [sequence omitted]

SEQ ID NO: 6247 - protein, 1180 aa, Homo sapiens
MKLKELERPAVQAWSPASQYPLYLATGTSAQQLDSSFSTNGTLEIFEVDFRDPSLDLKHRGVLSALSRFHKLVWGSFGSGLLESSGVIVGGGDNGMLILYNVTHILSSGKEPVIAQKQKHTGAVRALDLNPFQGNLLASGASDSEIFIWDLNNLNVPMTLGSKSQQPPEDIKALSWNRQAQHILSSAHPSGKAVVWDLRKNEPIIKVSDHSNRMHCSGLAWHPDIATQLVLCSEDDRLPVIQLWDLRFASSPLKVLESHSRGILSVSWSQADAELLLTSAKDSQILCRNLGSSEVVYKLPTQSSWCFDVQWCPRDPSVFSAASFNGWISLYSVMGRSWEVQHMRQADKISSSFSKGQPLPPLQVPEQVAQAPLIPPLKKPPKWIRRPTGVSFAFGGKLVTFGLPSTPAHLVPQPCPRLVFISQVTTESEFLMRSAELQEALGSGNLLNYCQNKSQQALLQSEKMLWQFLKVTLEQDSRMKFLKLLGYSKDELQKKVATWLKSDVGLGESPQPKGNDLNSDRQQAFCSQASKHTTKEASASSAFFDELVPQNMTPWEIPITKDIDGLLSQALLLGELGPAVELCLKEERFADAIILAQAGGTDLLKQTQERYLAKKKTKISSLLACVVQKNWKDVVCTCSLKNWREALALLLTYSGTEKFPELCDMLGTRMEQEGSRALTSEARLCYVCSGSVERLVECWAKCHQALSPMALQDLMEKVMVLNRSLEQLRGPHGVSPGPATTYRVTQYANLLAAQGSLATAMSFLPRDCAQPPVQQLRDRLFHAQGSAVLGQQSPPFPFPRIVVGATLHSKETSSYRLGSQPSHQVPTPSPRPRVFTPQSSPAMPLAPSHPSPYQGAAQNISDYRAPGPQAIQPLPLSPGVRPASSQPQLLGGQRVQVPNPVGFPGTWPLPGSPLPMACPGIMRPGSTSLPETPRLFPLLPLRPLGPGRMVSHTPAPPASFPVPYLPGDPGAPCSSVLPTTGILTPHPGPQDSWKEAPAPRGNLQRNKLPETFMPPAPITAPVMSLTPELQGILPSQPPVSSVSHAPPGVPGELSLQLQHLPPEKMERKELPPEHQSLKSSFEALLQRCSLSATDLKTKARGSLEEAAQRLEYLYEKLCEGTLSPHVVAGLHEVARCVDAGSFEQGLAVHAQVAGCSSFSEVSSFMPILKAVLIIAHKLLV

SEQ ID NO: 6248 - protein, 544 aa, Homo sapiens; identical to SEQ ID NO: 4983

SEQ ID NO: 6249 - protein, 562 aa, Homo sapiens; identical to SEQ ID NO: 5858

SEQ ID NO: 6250 - protein, 562 aa, Homo sapiens; identical to SEQ ID NO: 5858

SEQ ID NO: 6251 - protein, 423 aa, Homo sapiens
MEDKRSLSMARCEERNSRGQDHGLERVPFPPQLQSETYLHPADPSPAWDDPGSTGSPNLRLLTEEIAFQPLAEEASFRRPHPDGDVPPQGEDNLLSLPFPQKLWRLVSSNQFSSIWWDDSGACRVINQKLFEKEILKRDVAHKVFATTSIKSFFRQLNLYGFRKRRQCTFRTFTRIFSAKRLVSILNKLEFYCHPYFQRDSPHLLVRMKRRVGVKSAPRHQEEDKPEAAGSCLAPADTEQQDHTSPNENDQVTPQHREPAGPNTQIRSGSAPPATPVMVPDSAVASDNSPVTQPAGEWSEGSQAHVTPVAAVPGPAALPFLYVPGSPTQMNSYGPVVALPTASRSTLAMDTTGLPAPGMLPFCHLWVPVTLVAAGAAQPAASMVMFPHLPALHHHCPHSHRTSQYMPASDGPQAYPDYADQST

SEQ ID NO: 6252 - protein, 224 aa, Homo sapiens
MPTLFKGVWGVVEHSRALGRFCPACLPSGPHLHTQPALGTAEMTLLSSQSSSLVAPSGSVSAENPEQRMLEKRAKVIEELLQTERDYIRDLEMCIERIMVPMQQAQVPNIDFEGLFGNMQMVIKVSKQLLAALEISDAVGPVFLGHRDELEGTYKIYCQNHDEAIALLEIYEKDEKIQKHLQDSLADLNSLVLKKGCTNYINLGSFLIKPVQRVMRYPLLLMEL

SEQ ID NO: 6253 - protein, 625 aa, Homo sapiens
MRLPERHGGPQGSLCLMDPCCPLSLALQDLVERDCNGDTPNLSFYRNEIRFLPNGCFIEDILQNWTDNYDLLEDNHSYIQWLFPLREPGVNWHAKPLTLREVEVFKSSQEIQERLVRAYELMLGFYGIRLEDRGTGTVGRAQNYQKRFQNLNWRSHNNLRITRILKSLGELGLEHFQAPLVRFFLEETLVRRELPGVRQSALDYFMFAVRCRHQRRQLVHFAWEHFRPRCKFVWGPQDKLRRFKPSSLPHPLEGSRKVEEEGSPGDPDHEASTQGRTCGPEHSKGGGRVDEGPQPRSVEPQDAGPLERSQGDEAGGHGEDRPEPLSPKESKKRKLELSRREQPPTEPGPQSASEVEKIALNLEGCALSQGSLRTGTQEVGGQDPGEAVQPCRQPLGARVADKVRKRRKVDEGAGDSAAVASGGAQTLALAGSPAPSGHPKAGHSENGVEEDTEGRTGPKEGTPGSPSETPGPSPAGPAGDEPAESPSETPGPRPAGPAGDEPAESPSETPGPRPAGPAGDEPAESPSETPGPSPAGPTRDEPAESPSETPGPRPAGPAGDEPAESPSETPGPRPAGPAGDEPAESPSETPGPSPAGPTRDEPAKAGEAAELQDAEVESSAKSGKP

SEQ ID NO: 6254 - protein, 461 aa, Homo sapiens
MDDPDCDSTWEEDEEDAEDAEDEDCEDGEAAGARDADAGDEDEESEEPRAARPSSFQSRMTGSRNWRATRDMCRYRHNYPDLVERDCNGDTPNLSFYRNEIRFLPNGCFIEDILQNWTDNYDLLEDNHSYIQWLFPLREPGVNWHAKPLTLREVEVFKSSQEIQERLVRAYELMLGFYGIRLEDRGTGTVGRAQNYQKRFQNLNWRSHNNLRITRILKSLGELGLEHFQAPLVRFFLEETLVRRELPGVRQSALDYFMFAVRCRHQRRQLVHFAWEHFRPRCKFVWGPQDKLRRFKPSSLPHPLEGSRKVEEEGSPGDPDHEASTQGRTCGPEHSKGGGRVDEGPQPRSVEPQDAGPLERSQGDEAGGHGEDRPEPLSPKESKKRKLELSRREQPPTEPGPQSASEVEKIALNLEGCALSQGSLRTGTQEVGGQDPGESSCPCCRGWGLRSCCGLPSGSAS

SEQ ID NO: 6255 - protein, 512 aa, Homo sapiens
MPSPSRSGRSRCLKAPRRSRSGLSGPTSSCWASTIRLEDRGTGTVGRAQNYQKRFQNLNWRSHNNLRITRILKSLGELGLEHFQAPLVRFFLEETLVRRELPGVRQSALDYFMFAVRCRHQRRQLVHFAWEHFRPRCKFVWGPQDKLRRFKPSSLPHPLEGSRKVEEEGSPGDPDHEASTQGRTCGPEHSKGGGRVDEGPQPRSVEPQDAGPLERSQGDEAGGHGEDRPEPLSPKESKKRKLELSRREQPPTEPGPQSASEVEKIALNLEGCALSQGSLRTGTQEVGGQDPGEAVQPCRQPLGARVADKVRKRRKVDEGAGDSAAVASGGAQTLALAGSPAPSGHPKAGHSENGVEEDTEGRTGPKEGTPGSPSETPGPSPAGPAGDEPAESPSETPGPRPAGPAGDEPAESPSETPGPSPAGPTRDEPAESPSETPGPRPAGPAGDEPAESPSETPGPRPAGPAGDEPAESPSETPGPSPAGPTRDEPAKAGEAAELQDAEVESSAKSGKP

SEQ ID NO: 6256 - protein, 103 aa, Homo sapiens
MGQQSSVRRLKRSVPCESNEANEANEANKTMPETPTGDSDPQPAPKKMKTSESSTILVVRYRRNVKRTSPEELVNDHARENRINPDQMEEEEFIEITTERPKK

SEQ ID NO: 6257 - protein, 591 aa, Homo sapiens
MEKAVNDGSHSEELFCHLKTISEKEDLPRCTSESHLSCLKQDILNEKTELEATLKEAELVTHSVELLLPLFKDTIEKINFENANLSALNLKISEQKEILIKELDTFKSVKLALEHLLRKRDYKQTGDNLSSMLLENLTDNESENTNLKKKVFEKEAHIQELSCLFQSEKANTLKANRFSQSVKVVHERLQIQIHKREAENDKLKEYVKSLETKIAKWNLQSRMNKNEAIVMKEASRQKTVALKKASKVYKQRLDHFTGAIEKLTSQIRDQEAKLSETISASNAWKSHYEKIVIEKTELEVQIETMKKQIINLLEDLKKMEDHGKNSCEEILRKVHSIEYENETLNLENTKLKTTLAALKDEVVSVENELSELQEVEKKQKTLIEMYKTQVQKLQEAAEIVKSRCENLLHKNNQITKTKNKNVEKVDGNHNLLTKLSLEEENCLIQLKCENLQQKLEQMDAENKELEKKLANQEECLKHSNLKFKEKSAEYTALARQLEAALEEGRQKVAEEIEKMSSRESALQIKILDLETELRKKNEEQNQLVCKMNSKAQHQEVCLKEVQNSLEKSENQNESIKNYLQFLKTSYVTMFE

SEQ ID NO: 6258 - protein, 644 aa, Homo sapiens
MEKAVNDGSHSEELFCHLKTISEKEDLPRCTSESHLSCLKQDILNEKTELEATLKEAELVTHSVELLLPLFKDTIEKINFENANLSALNLKISEQKEILIKELDTFKSVKLALEHLLRKRDYKQTGDNLSSMLLENLTDNESENTNLKKKVFEKEAHIQELSCLFQSEKANTLKANRFSQSVKVVHERLQIQIHKREAENDKLKEYVKSLETKIAKWNLQSRMNKNEAIVMKEASRQKTVALKKASKVYKQRLDHFTGAIEKLTSQIRDQEAKLSETISASNAWKSHYEKIVIEKTELEVQIETMKKQIINLLEDLKKMEDHGKNSCEEILRKVHSIEYENETLNLENTKLKTTLAALKDEVVSVENELSELQEVEKKQKTLIEMYKTQVQKLQEAAEIVKSRCENLLHKNNQITKTKNKNVEKMRGQMESHLKELERVCDSLTAAERRLHECQESLQCCKGKCADQEHTIRELQGQVDGNHNLLTKLSLEEENCLIQLKCENLQQKLEQMDAENKELEKKLANQEECLKHSNLKFKEKSAEYTALARQLEAALEEGRQKVAEEIEKMSSRESALQIKILDLETELRKKNEEQNQLVCKMNSKAQHQEVCLKEVQNSLEKSENQNESIKNYLQFLKTSYVTMFE

SEQ ID NO: 6259 - protein, 841 aa, Homo sapiens
MMADGAAAGAGGSPSLRELRARMVAAANEIAKERRKQDVVNRVATHSSNIRSTFKPVIDGSMLKNDIKQRLARERREEKRRQQDANKETQLLEKERKTKLQYEKQMEERQRKLKERKEKEEQRRIAAEEKRHQKDEAQKEKFTAILYRTLERRRLADDYQQKRWSWGGSAMANSESKTGKTDKERSSSLNRRDSNLHSSTDKEQAERKPRVTGVTNYVMQYVTVPLRKCTSDELRAVMFPMSTMKIPPQTKVEESPLEKVETPPKASVDAPPQVNVEVFCNTSMEASPKAGVGMAPEVSTDSFPVVSVDVSPVVSTYDSEMSMDASPELSIEALPKVDLETVPKVSIVASPEASLEAPPEVSLEALPEVSVEAAPEGSLEAPPKGSAEVAPKESVKGSPKESMEASPEAMVKASPKTSLEASMEASPKAKARDAPKKSEMDKQALIPIAKKRLSSYTECYKWSSSPENACGLPSPISTNRQIQKNCPPSPLPLISKQSPQTSFPYKIMPIQHTLSVQSASSTVKKKKETVSKTTNRCEALSQRHMIYEESGNKSTAGIMNAEAATKILTELRRLAREQREKEEEERQREEMQQRVIKKSKDMAKEAVGGQAEDHLKLKDGQQQNETKKKKGWLDQEDQEAPLQKGDAKIKAQEEADKRKKEHERIMLQNLQERLERKKRIEEIMKRTRKTDVNASKVTETSSHDIYEEAEADNEESDKDSLNEMFPSAILNGTGSPTKFKMPFNNAKKMTHKLVFLEDGTSQVRKEPKTYFNGDLKNFRQKSMKDTSIQEVVSRPSSKRMTSHTTKTRKADETNTTSRSSAQTKSEGFHDILPKSSDTFRQ

SEQ ID NO: 6260 - protein, 858 aa, Homo sapiens
MTSPRVAAANEIAKERRKQDVVNRVATHSSNIRSTFKPVIDGSMLKNDIKQRLARERREEKRRQQDANKETQLLEKERKTKLQYEKQMEERQRKLKERKEKEEQRRIAAEEKRHQKDEAQKEKFTAILYRTLERRRLADDYQQKRWSWGGSAMANSESKTANKRSASTEKLEQGTSALIRQMPLSSAGLQNSVAKRKTDKERSSSLNRRDSNLHSSTDKEQAERKPRVTGVTNYVMQYVTVPLRKCTSDELRAVMFPMSTMKIPPQTKVEESPLEKVETPPKASVDAPPQVNVEVFCNTSMEASPKAGVGMAPEVSTDSFPVVSVDVSPVVSTYDSEMSMDASPELSIEALPKVDLETVPKVSIVASPEASLEAPPEVSLEALPEVSVEAAPEGSLEAPPKGSAEVAPKESVKGSPKESMEASPEAMVKASPKTSLEASMEASPKAKARDAPKKSEMDKQALIPIAKKRLSSYTECYKWSSSPENACGLPSPISTNRQIQKNCPPSPLPLISKQSPQTSFPYKIMPIQHTLSVQSASSTVKKKKETVSKTTNRCEALSQRHMIYEESGNKSTAGIMNAEAATKILTELRRLAREQREKEEEERQREEMQQRVIKKSKDMAKEAVGGQAEDHLKLKDGQQQNETKKKKGWLDQEDQEAPLQKGDAKIKAQEEADKRKKEHERIMLQNLQERLERKKRIEEIMKRTRKTDVNASKVTETSSHDIYEEAEADNEESDKDSLNEMFPSAILNGTGSPTKFKMPFNNAKKMTHKLVFLEDGTSQVRKEPKTYFNGDLKNFRQKSMKDTSIQEVVSRPSSKRMTSHTTKTRKADETNTTSRSSAQTKSEGFHDILPKSSDTFRQ

SEQ ID NO: 6261 - protein, 315 aa, Homo sapiens
MPLKLRGKKKAKSKETAGLVEGEPTGAGGGSLSASRAPARRLVFHAQLAHGSATGRVEGFSSIQELYAQIAGAFEISPSEILYCTLNTPKIDMERLLGGQLGLEDFIFAHVKGIEKEVNVYKSEDSLGLTITDNGVGYAFIKRIKDGGVIDSVKTICVGDHIESINGENIVGWRHYDVAKKLKELKKEELFTMKLIEPKKAFEIELRSKAGKSSGEKIGCGRATLRLRSKGPATVEEMPSETKAKAIEKIDDVLELYMGIRDIDLATTMFEAGKDKVNPDEFAVALDETLGDFAFPDEFVFDVWGVIGDAKRRGL

SEQ ID NO: 6262 - protein, 828 aa, Homo sapiens
MTGSNSHITILTLKVLPHFESLGKQEKIPNKMSAFRNHCPHLDSVGEITKEDLIQKSLGTCQDCKVQGPNLWACLENRCSYVGCGESQVDHSTIHSQETKHYLTVNLTTLRVWCYACSKEVFLDRKLGTQPSLPHVRQPHQIQENSVQDFKIPSNTTLKTPLVAVFDDLDIEADEEDELRARGLTGLKNIGNTCYMNAALQALSNCPPLTQFFLDCGGLARTDKKPAICKSYLKLMTELWHKSRPGSVVPTTLFQGIKTVNPTFRGYSQQDAQEFLRCLMDLLHEELKEQVMEVEEDPQTITTEETMEEDKSQSDVDFQSCESCSNSDRAENENGSRCFSEDNNETTMLIQDDENNSEMSKDWQKEKMCNKINKVNSEGEFDKDRDSISETVDLNNQETVKVQIHSRASEYITDVHSNDLSTPQILPSNEGVNPRLSASPPKSGNLWPGLAPPHKKAQSASPKRKKQHKKYRSVISDIFDGTIISSVQCLTCDRVSVTLETFQDLSLPIPGKEDLAKLHSSSHPTSIVKAGSCGEAYAPQGWIAFFMEYVKSWFWGPVVTLQDCLAAFFARDELKGDNMYSCEKCKKLRNGVKFCKVQNFPEILCIHLKRFRHELMFSTKISTHVSFPLEGLDLQPFLAKDSPAQIVTYDLLSVICHHGTASSGHYIAYCRNNLNNLWYEFDDQSVTEVSESTVQNAEAYVLFYRKSSEEAQKERRRISNLLNIMEPSLLQFYISRQWLNKFKTFAEPGPISNNDFLCIHGGVPPRKAGYIEDLVLMLPQNIWDNLYSRYGGGPAVNHLYICHTCQIEAEKIEKRRKTELEIFIRVKK

SEQ ID NO: 6263 - protein, 942 aa, Homo sapiens; identical to SEQ ID NO: 5931

SEQ ID NO: 6264 - protein, 911 aa, Homo sapiens
MSAFRNHCPHLDSVGEITKEDLIQKSLGTCQDCKVQGPNLWACLENRCSYVGCGESQVDHSTIHSQETKHYLTVNLTTLRVWCYACSKEVFLDRKLGTQPSLPHVRQPHQIQENSVQDFKIPSNTTLKTPLVAVFDDLDIEADEEDELRARGLTGLKNIGNTCYMNAALQALSNCPPLTQFFLDCGGLARTDKKPAICKSYLKLMTELWHKSRPGSVVPTTLFQGIKTVNPTFRGYSQQDAQEFLRCLMDLLHEELKEQVMEVEEDPQTITTEETMEEDKSQSDVDFQSCESCSNSDRAENENGSRCFSEDNNETTMLIQDDENNSEMSKDWQKEKMCNKINKVNSEGEFDKDRDSISETVDLNNQETVKVQIHSRASEYITDVHSNDLSTPQILPSNEGVNPRLSASPPKSGNLWPGLAPPHKKAQSASPKRKKQHKKYRSVISDIFDGTIISSVQCLTCDRVSVTLETFQDLSLPIPGKEDLAKLHSSSHPTSIVKAGSCGEAYAPQGWIAFFMEYVKRFVVSCVPSWFWGPVVTLQDCLAAFFARDELKGDNMYSCEKCKKLRNGVKFCKVQNFPEILCIHLKRFRHELMFSTKISTHVSFPLEGLDLQPFLAKDSPAQIVTYDLLSVICHHGTASSGHYIAYCRNNLNNLWYEFDDQSVTEVSESTVQNAEAYVLFYRKSSEEAQKERRRISNLLNIMEPSLLQFYISRQWLNKFKTFAEPGPISNNDFLCIHGGVPPRKAGYIEDLVLMLPQNIWDNLYSRYGGGPAVNHLYICHTCQIEAEKIEKRRKTELEIFIRLNRAFQKEDSPATFYCISMQWFREWESFVKGKDGDPPGPIDNTKIAVTKCGNVMLRQGADSGQISEETWNFLQSIYGGGPEVILRPPVVHVDPDILQAEEKIEVETRSL

SEQ ID NO: 6265 - protein, 154 aa, Homo sapiens
MAPPVRYCIPGERLCNLEEGSPGSGTYTRHGYIFSSLAGCLMKSSENGALPVVSVVRETESQLLPDVGAIVTCKVEIYKSFRPGDIVLAKVISLGDAQSNYLLTTAENELGVVVAHSESGIQMVPISWCEMQCPKTHTKEFRKVARVQPEFLQT

SEQ ID NO: 6266 - protein, 170 aa, Homo sapiens
MAPPVRYCIPGERLCNLEEGSPGSGTYTRHGYIFSSLAGCLMKSSENGAVSSINSRFAKVHILYVGSMPLKNSFRGTIRKEDVRATEKDKVEIYKSFRPGDIVLAKVISLGDAQSNYLLTTAENELGVVVAHSESGIQMVPISWCEMQCPKTHTKEFRKVARVQPEFLQT

SEQ ID NO: 6267 - protein, 178 aa, Homo sapiens
MAPPVRYCIPGERLCNLEEGSPGSGTYTRHGYIFSSLAGCLMKSSENGALPVVSVVRETESQLLPDVGAIVTCKVSSINSRFAKVHILYVGSMPLKNSFRGTIRKEDVRATEKDKISLGDAQSNYLLTTAENELGVVVAHSESGIQMVPISWCEMQCPKTHTKEFRKVARVQPEFLQT

SEQ ID NO: 6268 - protein, 936 aa, Homo sapiens
MAAARDPPEVSLREATQRKLRRFSELRGKLVARGEFWDIVAITAADEKQELAYNQQLSEKLKRKELPLGVQYHVFVDPAGAKIGNGGSTLCALQCLEKLYGDKWNSFTILLIHSDEWKKKVSESYVITIERLEDDLQIKEKELTELRNIFGSDEAFSKVNLNYRTENGLSLLHLCCICGGKKSHIRTLMLKGLRPSRLTRNGFTALHLAVYKDNAELITSLLHSGADIQQVGYGGLTALHIATIAGHLEAADVLLQHGANVNIQDAVFFTPLHIAAYYGHEQVTRLLLKFGADVNVSGEVGDRPLHLASAKGFLNIAKLLMEEGSKADVNAQDNEDHVPLHFCSRFGHHDIVKYLLQSDLEVQPHVVNIYGDTPLHLACYNGKFEVAKEIIQISGTESLTKENIFSETAFHSACTYGKSIDLVKFLLDQNVININHQGRDGHTGLHSACYHGHIRLVQFLLDNGADMNLVACDPSRSSGEKDEQTCLMWAYEKGHDAIVTLLKHYKRPQDELPCNEYSQPGGDGSYVSVPSPLGKIKSMTKEKADILLLRAGLPSHFHLQLSEIEFHEIIGSGSFGKVYKGRCRNKIVAIKRYRANTYCSKSDVDMFCREVSILCQLNHPCVIQFVGACLNDPSQFAIVTQYISGGSLFSLLHEQKRILDLQSKLIIAVDVAKGMEYLHNLTQPIIHRDLNSHNILLYEDGHAVVADFGESRFLQSLDEDNMTKQPGNLRWMAPEVFTQCTRYTIKADVFSYALCLWEILTGEIPFAHLKPAAAAADMAYHHIRPPIGYSIPKPISSLLIRGWNACPEGRPEFSEVVMKLEECLCNIELMSPASSNSSGSLSPSSSSDCLVNRGGPGRSHVAALRSRFELEYALNARSYAALSQSAGQYSSQGLSLEEMKRSLQYTPIDKYGYVSDPMSSMHFHSCRNSSSFEDSS

SEQ ID NO: 6269 - protein, 169 aa, Homo sapiens
MAAARDPPEVSLREATQRKLRRFSELRGKLVARGEFWDIVAITAADEKQELAYNQQLSEKLKRKELPLGVQYHVFVDPAGAKIGNGGSTLCALQCLEKLYGDKWNSFTILLIHSVSFQIYQNALAKHPVSFKAYWIQDVLWHLAQLWSIPDWGLMFQLGKTALLVVLTS

SEQ ID NO: 6270 - protein, 594 aa, Homo sapiens
MAAARDPPEVSLREATQRKLRRFSELRGKLVARGEFWDIVAITAADEKQELAYNQQLSEKLKRKELPLGVQYHVFVDPAGAKIGNGGSTLCALQCLEKLYGDKWNSFTILLIHSGGYSQRLPNASALGKIFTALPLGNPIYQMLELKLAMYIDFPLNMNPGILVTCADDIELYSIGEFEFIRFDKPGFTALAHPSSLTIGTTHGVFVLDPFDDLKHRDLEYRSCHRFLHKPSIEKMYQFNAVCRPGNFCQQDFAGGDIADLKLDSDYVYTDSLFYMDHKSAKMLLAFYEKIGTLSCEIDAYGDFLQALGPGATVEYTRNTSNVIKEESELVEMRQRIFHLLKGTSLNVVVLNNSKFYHIGTTEEYLFYFTSDNSLKSELGLQSITFSIFPDIPECSGKTSCIIQSILDSRCSVAPGSVVEYSRLGPDVSVGENCIISGSYILTKAALPAHSFVCSLSLKMNRCLKYATMAFGVQDNLKKSVKTLSDIKLLQFFGVCFLSCLDVWNLKVTEELFSGNKTCLSLWTARIFPVCSSLSDSVITSLKMLNAVKNKSAFSLNSYKLLSIEEMLIYKDVEDMITYREQIFLEISLKSSLM

SEQ ID NO: 6271 - protein, 195 aa, Homo sapiens
MAPPVRYCIPGERLCNLEEGSPGSGTYTRHGYIFSSLAGCLMKSSENGALPVVSVVRETESQLLPDVGAIVTCKVSSINSRFAKVHILYVGSMPLKNSFRGTIRKEDVRATEKDKVEIYKSFRPGDIVLAKVISLGDAQSNYLLTTAENELGVVVAHSESGIQMVPISWCEMQCPKTHTKEFRKVARVQPEFLQT

SEQ ID NO: 6272 - protein, 541 aa, Homo sapiens
MTGEKIRSLRRDHKPSKEEGDLLEPGDEEAAAALGGTFTRSRIGKGGKACHKIFSNHHHRLQLKAAPASSNPPGAPALPLHNSSVTANSQSPALLAGTNPVAVVADGGSCPAHYPVHECVFKGDVRRLSSLIRTHNIGQKDNHGNTPLHLAVMLGNKECAHLLLAHNAPVKVKNAQGWSPLAEAISYGDRQMITALLRKLKQQSRESVEEKRPRLLKALKELGDFYLELHWDFQSWVPLLSRILPSDACKIYKQGINIRLDTTLIDFTDMKCQRGDLSFIFNGDAAPSESFVVLDNEQKVYQRIHHEESEMETEEEVDILMSSDIYSATLSTKSISFTRAQTGWLFREDKTERVGNFLADFYLVNGLVLESRKRREHLSEEDILRNKAIMESLSKGGNIMEQNFEPIRRQSLTPPPQNTITWEEYISAENGKAPHLGRELVCKESKKTFKATIAMSQEFPLGIELLLNVLEVVAPFKHFNKLREFVQMKLPPGFPVKLDIPVFPTITATVTFQEFRYDEFDGSIFTIPDDYKEDPSRFPDL

SEQ ID NO: 6273 - protein, 279 aa, Homo sapiens
MPCRREEEEEAGEEAEGEEEEEDSFLLLQQSVALGSSGEVDRLVAQIGETLQLDAAQHSPASPCGPPGAPLRAPGPLAAAVPADKARSPAVPLLLPPALAETVGPAPPGVLRCALGDRGRVRGRAAPYCVAELATGPSALSPLPPQADLDGPPGAGKQGIPQPLSGPCRRGWLRGAAASRRLQQRRGSQPETRTGDDDPHRLLQQLVLSGNLIKEAVRRLHSRRLQLRAKLPQRPLLGPLSAPVHEPPSPRSPRAACSDPGASGRAQLRTGDGVLVPGS

SEQ ID NO: 6274 - protein, 401 aa, Homo sapiens
MPLHSSLGNKSETLSQKKNNNNKEKTKRNSRNPAAALKEGKMEELSQALASSFSVSQDLNSTAAPHPRLSQYKSKYSSLEQSERRRRLLELQKSKRLDYVNHARRLAEDDWTGMESEEENKKDDEEMDIDTVKKLPKHYANQLMLSEWLIDVPSDLGQEWIVVVCPVGKRALIVASRGSTSAYTKSGYCVNRFSSLLPGGNRRNSTAKDYTILDCIYNEVNQTYYVLDVMCWRGHPFYDCQTDFRFYWMHSKLPEEEGLGEKTKLNPFKFVGLKNFPCTPESLCDVLSMDFPFEVDGLLFYHKQTHYSPGSTPLVGWLRPYMVSDVLGVAVPAGPLTTKPDYAGHQLQQIMEHKKSQKEGMKEKLTHKASENGHYELEHLSTPKLKGSSHSPDHPGCLMEN

SEQ ID NO: 6275 - protein, 368 aa, Homo sapiens
MSLFGTTSGFGTSGTSMFGSATTDNHNPMKDIEVTSSPDDSIGCLSFSPPTLPGNFLIAGSWANDVRCWEVQDSGQTIPKAQQMHTGPVLDVCWSDDGSKVFTASCDKTAKMWDLSSNQAIQIAQHDAPVKTIHWIKAPNYSCVMTGSWDKTLKFWDTRSSNPMMVLQLPERCYCADVIYPMAVVATAERGLIVYQLENQPSEFRRIESPLKHQHRCVAIFKDKQNKPTGFALGSIEGRVAIHYINPPNPAKDNFTFKCHRSNGTNTSAPQDIYAVNGIAFHPVHGTLATVGSDGRFSFWDKDARTKLKTSEQLDQPISACCFNHNGNIFAYASSYDWSKGHEFYNPQKKNYIFLRNAAEELKPRNKK

SEQ ID NO: 6276 - protein, 183 aa, Homo sapiens
MRKSSCVESFDDQRRMSLHLHGADCDPKTQNEMNICEEEFVEYKNRDAISALMPLFSEEESSDGSKHNNGLPDHISAQLQNTYTLKAFTVGSKCVVWSSLRNTWSKCEILETAEEGTRVLNLSNGMEEIVNPENVWNGIPKLDKSPPEAVSQRVGKDLYFMSVGDTTIKEKGFGGDGDLTVDL

SEQ ID NO: 6277 - protein, 606 aa, Homo sapiens
MPSPQLLVLFGSQTGTAQDVSERLGREARRRRLGCRVQALDSYPVVNLINEPLVIFVCATTGQGDPPDNMKNFWRFIFRKNLPSTALCQMDFAVLGLGDSSYAKFNFVAKKLHRRLLQLGGSALLPVCLGDDQHELGPDAAVDPWLRDLWDRVLGLYPPPPGLTEIPPGVPLPSKFTLLFLQEAPSTGSEGQRVAHPGSQEPPSESKPFLAPMISNQRVTGPSHFQDVRLIEFDILGSGISFAAGDVVLIQPSNSAAHVQRFCQVLGLDPDQLFMLQPREPDVSSPTRLPQPCSMRHLVSHYLDIASVPRRSFFELLACLSLHELEREKLLEFSSAQGQEELFEYCNRPRRTILEVLCDFPHTAAAIPPDYLLDLIPVIRPRAFSIASSLLTHPSRLQILVAVVQFQTRLKEPRRGLCSSWLASLDPGQGPVRVPLWVRPGSLAFPETPDTPVIMVGPGTGVAPFRAAIQERVAQGQTGNFLFFGCRWRDQDFYWEAEWQELEKRDCLTLIPAFSREQPPALFSALQEQKVYVQHRLRELGSLVWELLDRQGAYFYLAGNAKSMPADVSEALMSIFQEEGGLCSPDAAAYLARLQQTRRFQTETWA

SEQ ID NO: 6278 - protein, 139 aa, Homo sapiens
MAESDWDTVTVLRKKGPTAAQAKSKQAILAAQRRGEDVETSKKWAAGQNKQHSITKNTAKLDRETEELHHDRVTLEVGKVIQQGRQSKGLTQKDLATKINEKPQVIADYESGRAIPNNQVLGKIERAIGECPSTLRRVR

SEQ ID NO: 6279 - protein, 141 aa, Homo sapiens
MAESDWDTVTVLRKKGPTAAQAKSKQAILAAQRRGEDVETSKKWAAGQNKQHSITKNTAKLDRETEELHHDRVTLEVGKVIQQGRQSKGLTQKDLATKINEKPQVIADYESGRAIPNNQVLGKIERAIDVGTRSARVLRAQ

SEQ ID NO: 6280 - protein, 49 aa, Homo sapiens
MATQRKHLVKDFNPYITCYICKGYLIKPTTVTECLHTSAESYWMSTWMS

SEQ ID NO: 6281 - protein, 319 aa, Homo sapiens
MMVLKVEELVTGKKNGNGEAGEFLPEDFRDGEYEAAVTLEKQEDLKTLLAHPVTLGEQQWKSEKQREAELKKKKLEQRSKLENLEDLEIIIQLKKRKKYRKTKVPVVKEPEPEIITEPVDVPTFLKAALENKLPVVEKFLSDKNNPDVCDEYKRTALHRACLEGHLAIVEKLMEAGAQIEFRDMLESTAIHWASRGGNLDVLKLLLNKGAKISARDKLLSTALHVAVRTGHYECAEHLIACEADLNAKDREGDTPLHDAVRLNRYKMIRLLIMYGADLNIKNCAGKTPMDLVLHWQNGTKAIFDSLRENSYKTSRIATF

SEQ ID NO: 6282 - protein, 362 aa, Homo sapiens
MSGYQRRPGATPLSRARSLAIPDDDRFEDLEEANPFSFREFLKTKNLGLSKEDPASRIYAKEASRHSLGLDHNSPPSQTGGYGLEYQQPFFEDPTGAGDLLDEEEDEDTGWSGAYLPSAIEQTHPERVPAGTSPCSTYLSFFSTPSELAGPESLPSWALSDTDSRVSPASPAGSPSADFAVHGESLGDRHLRTLQISYDALKDENSKLRRKLNEVQSFSEAQTEMVRTLERKLEAKMIKEESDYHDLESVVQQVEQNLELMTKRAVKAENHVVKLKQEISLLQAQVSNFQRENEALRCGQGASLTVVKQNADVALQNLRVVMNSAQASIKQLVSGAETLNLVAEILKSIDRISEVKDEEEDS

SEQ ID NO: 6283 - protein, 1820 aa, Homo sapiens
MESNFNQEGVPRPSYVFSADPIARPSEINFDGIKLDLSHEFSLVAPNTEANSFESKDYLQVCLRIRPFTQSEKELESEGCVHILDSQTVVLKEPQCILGRLSEKSSGQMAQKFSFSKVFGPATTQKEFFQGCIMQPVKDLLKGQSRLIFTYGLTNSGKTYTFQGTEENIGILAALNVLFDSLQERLYTKMNLKPHRSREYLRLSSEQEKEEIASKSALLRQIKEVTVHNDSDDTLYGSLTNSLNISEFEESIKDYEQANLNMANSIKFSVWVSFFEIYNEYIYDLFVPVSSKFQKRKMLRLSQDVKGYSFIKDLQWIQVSDSKEAYRLLKLGIKHQSVAFTKLNNASSRSHSIFTVKILQIEDSEMSRVIRVSELSLCDLAGSERTMKTQNEGERLRETGNINTSLLTLGKCINVLKNSEKSKFQQHVPFRESKLTHYFQSFFNGKGKICMIVNISQCYLAYDETLNVLKFSAIAQKVCVPDTLNSSQEKLFGPVKSSQDVSLDSNSNSKILNVKRATISWENSLEDLMEDEDLVEELENAEETQNVETKLLDEDLDKTLEENKAFISHEEKRKLLDLIEDLKKKLINEKKEKLTLEFKIREEVTQEFTQYWAQREADFKETLLQEREILEENAERRLAIFKDLVGKCDTREEAAKDICATKVETEETHNYVGFEDIIDSLQDNVADIKKQAEIAHLYIASLPDPQEATACLELKFNQIKAELAKTKGELIKTKEELKKRENESDSLIQELETSNKKIITQNQRIKELINIIDQKEDTINEFQNLKSHMENTFKCNDKADTSSLIINNKLICNETVEVPKDSKSKICSERKRVNENELQQDEPPAKKGSIHVSSAITEDQKKSEEVRPNIAEIEDIRVLQENNEGLRAFLLTIENELKNEKEEKAELNKQIVHFQQELSLSEKKNLTLSKEVQQIQSNYDIAIAELHVQKSKNQEQEEKIMKLSNEIETATRSITNNVSQIKLMHTKIDELRTLDSVSQISNIDLLNLRDLSNGSEEDNLPNTQLDLLGNDYLVSKQVKEYRIQEPNRENSFHSSIEAIWEECKEIVKASSKKSHQIEELEQQIEKLQAEVKGYKDENNRLKEKEHKNQDDLLKEKETLIQQLKEELQEKNVTLDVQIQHVVEGKRALSELTQGVTCYKAKIKELETILETQKVECSHSAKLEQDILEKESIILKLERNLKEFQEHLQDSVKNTKDLNVKELKLKEEITQLTNNLQDMKHLLQLKEEEEETNRQETEKLKEELSASSARTQNLKADLQARGSEEDYADLKEKLTDAKKQIKQVQKEVSVMRDEDKLLRIKINELEKKKNQCSQELDMKQRTIQQLKEQLNNQKVEEAIQQYERACKDLNVKEKIIEDMRMTLEEQEQTQVEQDQVLEAKLEEVERLATELEKWKEKCNDLETKNNQRSNKEHENNTDVLGKLTNLQDELQESEQKYNADRKKWLEEKMMLITQAKEAENIRNKEMKKYAEDRERFFKQQNEMEILTAQLTEKDSDLQKWREERDQLVAALEIQLKALISSNVQKDNEIEQLKRIISETSKIETQIMDIKPKRISSADPDKLQTEPLSTSFEISRNKIEDGSVVLDSCEVSTENDQSTRFPKPELEIQFTPLQPNKMAVKHPGCTTPVTVKIPKARKRKSNEMEEDLVKCENKKNATAANLKFPISDDRNSSVKKEQKVAIRPSSKKTYSLRSQASIIGVNLATKKKEGTLQKFGDFLQHSPSILQSKAKKIIETMSSSKLSNVEASKENVSQPKRAKRKLYTSEISSPIDISGQVILMDQKMKESDHQIIKRRLRTKTAK

SEQ ID NO: 6284 - protein, 493 aa, Homo sapiens
MKLGKKPMYKPVDPYSRMQSTYNYNMRGGAYPPRYFYPFPVPPLLYQVELSVGGQQFNGKGKTRQAAKHDAAAKALRILQNEPLPERLEVNGRESEEENLNKSEISQVFEIALKRNLPVNFEVARESGPPHMKNFVTKVSVGEFVGEGEGKSKKISKKNAAIAVLEELKKLPPLPAVERVKPRIKKKTKPIVKTSPEYGQGINPISRLAQIQQAKKEKEPEYTLLTERGLPRRREFVMQVKVGNHTAEGTGTNKKVAKRNAAENMLEILGFKVPQAQPTKPALKSEEKTPIKKPGDGRKVTFFEPGSGDENGTSNKEDEFRMPYLSHQQLPAGILPMVPEVAQAVGVSQGHHTKDFTRAAPNPAKATVTAMIARELLYGGTSPTAETILKNNISSGHVPHGPLTRPSEQLDYLSRVQGFQVEYKDFPKNNKNEFVSLINCSSQPPLISHGIGKDVESCHDMAALNILKLLSELDQQSTEMAAGNGPMSVCGRC

SEQ ID NO: 6285 - protein, 501 aa, Homo sapiens
MKLGKKPMYKPVDPYSRMQSTYNYNMRGGAYPPRYFYPFPVPPLLYQVELSVGGQQFNGKGKTRQAAKHDAAAKALRILQNEPLPERLEVNGRESEEENLNKSEISQVFEIALKRNLPVNFESFPLKQVARESGPPHMKNFVTKVSVGEFVGEGEGKSKKISKKNAAIAVLEELKKLPPLPAVERVKPRIKKKTKPIVKPQTSPEYGQGINPISRLAQIQQAKKEKEPEYTLLTERGLPRRREFVMQVKVGNHTAEGTGTNKKVAKRNAAENMLEILGFKVPQAQPTKPALKSEEKTPIKKPGDGRKVTFFEPGSGDENGTSNKEDEFRMPYLSHQQLPAGILPMVPEVAQAVGVSQGHHTKDFTRAAPNPAKATVTAMIARELLYGGTSPTAETILKNNISSGHVPHGPLTRPSEQLDYLSRVQGFQVEYKDFPKNNKNEFVSLINCSSQPPLISHGIGKDVESCHDMAALNILKLLSELDQQSTEMAAGNGPMSVCGRC

SEQ ID NO: 6286 - protein, 495 aa, Homo sapiens; identical to SEQ ID NO: 5715

SEQ ID NO: 6287 - protein, 490 aa, Homo sapiens
MSEVTKNSLEKILPQLKCHFTWNLFKEDSVSRDLEDRVCNQIEFLNTEFKATMYNLLAYIKHLDGNNEAALECLRQAEELIQQEHADQAEIRSLVTWGNYAWVYYHLGRLSDAQIYVDKVKQTCKKFSNPYSIEYSELDCEEGWTQLKCGRNERAKVCFEKALEEKPNNPEFSSGLAIAMYHLDNHPEKQFSTDVLKQAIELSPDNQYVKVLLGLKLQKMNKEAEGEQFVEEALEKSPCQTDVLRSAAKFYRRKGDLDKAIELFQRVLESTPNNGYLYHQIGCCYKAKVRQMQNTGESEASGNKEMIEALKQYAMDYSNKALEKGLNPLNAYSDLAEFLETECYQTPFNKEVPDAEKQQSHQRYCNLQKYNGKSEDTAVQHGLEGLSISKKSTDKEEIKDQPQNVSENLLPQNAPNYWYLQGLIHKQNGDLLQAAKCYEKELGRLLRDAPSGIGSIFLSASELEDGSEEMGQGAVSSSPRELLSNSEQLN

SEQ ID NO: 6288 - protein, 490 aa, Homo sapiens; identical to SEQ ID NO: 6287

SEQ ID NO: 6289 - protein, 501 aa, Homo sapiens; identical to SEQ ID NO: 6285

SEQ ID NO: 6290 - protein, 217 aa, Homo sapiens
MAEGSQSAPEAGNDMGNDDAIGGNVSKYIVLPTGYCGQPKKGHLIFDACFESGNLGRVDQVSEFEYDLFIRPDTCNPRFRVWFNFTVENVKESQRVIFNIVNFSKTKSLYRDGMAPMVKSTSRPKWQRLPPKNVYYYRCPDHRKNYVMSFAFCFDREEDIYQFAYCYPYTYTRFQHYLDSLQKRNMDYFFREQLGQSVQQRKLDLLTITSPAGRWSW

SEQ ID NO: 6291 - protein, 320 aa, Homo sapiens
MAEGSQSAPEAGNDMGNDDAIGGNVSKYIVLPTGYCGQPKKGHLIFDACFESGNLGRVDQVSEFEYDLFIRPDTCNPRFRVWFNFTVENVKESQRVIFNIVNFSKTKSLYRDGMAPMVKSTSRPKWQRLPPKNVYYYRCPDHRKNYVMSFAFCFDREEDIYQFAYCYPYTYTRFQHYLDSLQKRNMDYFFREQLGQSVQQRKLDLLTITSPDNLREGAEQKVVFITGRVHPGETPSSFVCQGIIDFLVSQHPIACVLREYLVFKIAPMLNPDGVYLGNYRCSLMGFDLNRHWLDPSPWVHPTLHGVKQLIVQMYNDPVSN

SEQ ID NO: 6292 - protein, 503 aa, Homo sapiens
MAEGSQSAPEAGNDMGNDDAIGGNVSKYIVLPTGYCGQPKKGHLIFDACFESGNLGRVDQVSEFEYDLFIRPDTCNPRFRVWFNFTVENVKESQRVIFNIVNFSKTKSLYRDGMAPMVKSTSRPKWQRLPPKNVYYYRCPDHRKNYVMSFAFCFDREEDIYQFAYCYPYTYTRFQHYLDSLQKRNMDYFFREQLGQSVQQRKLDLLTITSPDNLREGAEQKVVFITGRVHPGETPSSFVCQGIIDFLVSQHPIACVLREYLVFKIAPMLNPDGVYLGNYRCSLMGFDLNRHWLDPSPWVHPTLHGVKQLIVQMYNDPKTSLEFYIDIHAHSTMMNGFMYGNIFEDEERFQRQAIFPKLLCQNAEDFSYSSTSFNRDAVKAGTGRRFLGGLLDHTSYCYTLEVSFYSYIISGTTAAVPYTEEAYMKLGRNVARTFLDYYRLNPVVEKVAIPMPRLRNKEIEVQRRKEKSPPYKHPLLRGPASNYPNSKGDKKSSVNHKDPSTPF

SEQ ID NO: 6293 - protein, 576 aa, Homo sapiens
MSQVQVQVQNPSAALSGSQILNKNQSLLSQPLMSIPSTTSSLPSENAGRPIQNSALPSASITSTSAAAESITPTVELNALCMKLGKKPMYKPVDPYSRMQSTYNYNMRGGAYPPRYFYPFPVPPLLYQVELSVGGQQFNGKGKTRQAAKHDAAAKALRILQNEPLPERLEVNGRESEEENLNKSEISQVFEIALKRNLPVNFEVARESGPPHMKNFVTKVSVGEFVGEGEGKSKKISKKNAAIAVLEELKKLPPLPAVERVKPRIKKKTKPIVKPQTSPEYGQGINPISRLAQIQQAKKEKEPEYTLLTERGLPRRREFVMQVKVGNHTAEGTGTNKKVAKRNAAENMLEILGFKVPQAQPTKPALKSEEKTPIKKPGDGRKVTFFEPGSGDENGTSNKEDEFRMPYLSHQQLPAGILPMVPEVAQAVGVSQGHHTKDFTRAAPNPAKATVTAMIARELLYGGTSPTAETILKNNISSGHVPHGPLTRPSEQLDYLSRVQGFQVEYKDFPKNNKNEFVSLINCSSQPPLISHGIGKDVESCHDMAALNILKLLSELDQQSTEMAAGNGPMSVCGRC

SEQ ID NO: 6294 - protein, 283 aa, Homo sapiens
MSGAVLLERERLTSGTTWHTAGLLWQLRPSDVEVELLAHTRRVVSRELEEETGLHTGWIQNGGLFIASNRQRLDEYKRLMSLGKAYGVESHVLSPAETKTLYPLMNVDDLYGTLYVPHDGTMDPAGTCTTLARAASARGAQVIENCPVTGIRVWTDDFGVRRVAGVETQHGSIQTPCVVNCAGVWASAVGRMAGVKVPLVAMHHAYVVTERIEGIQNMPNVRDHDASVYLRLQGDALSVGGYEANPIFWEEAVKYRPRAAGGLCLKTSTEKVCAVWSDDLRRA

SEQ ID NO: 6295 - protein, 368 aa, Homo sapiens
MSYFGKFYLVGLDARKAADWLFSADVSRPPGSTVYTCMLNHRGGTESDLTVSRLAPSHQASPLAPAFEGDGYYLAMGGAVAQHNWSHITTVLQDQKSQCQLIDSSEDLGMISIQGPASRAILQEVLDADLSNEAFPFSTHKLLRAAGHLVRAMRLSFVGELGWELHIPKASCVPVYRAVMAAGAKHGLINAGYRAIDSLSIEKGYRHWHADLRPDDSPLEAGLAFTCKLKSPVPFLGREALEQQRAAGLRRRLVCFTMEEPLWTRPHPAVSGAPAFSTASSSKVPMFGLEAIWRNGQVVGHVRRADFGFAIDKTIAYGYIHDPSGGPVSLDFVKSGDYALERMGVTYGAQAHLKSPFDPNNKRVKGIY

SEQ ID NO: 6296 - protein, 918 aa, Homo sapiens
MASLSRALRVAAAHPRQSPTRGMGPCNLSSAAGPTAEKSVPYQRTLKEGQGTSVVAQGPSRPLPSTANVVVIGGGSLGCQTLYHLAKLGMSGAVLLERERLTSGTTWHTAGLLWQLRPSDVEVELLAHTRRVVSRELEEETGLHTGWIQNGGLFIASNRQRLDEYKRLMSLGKAYGVESHVLSPAETKTLYPLMNVDDLYGTLYVPHDGTMDPAGTCTTLARAASARGAQVIENCPVTGIRVWTDDFGVRRVAGVETQHGSIQTPCVVNCAGVWASAVGRMAGVKVPLVAMHHAYVVTERIEGIQNMPNVRDHDASVYLRLQGDALSVGGYEANPIFWEEVSDKFAFGLFDLDWEVFTQHIEGAINRVPVLEKTGIKSTVCGPESFTPDHKPLMGEAPELRGFFLGCGFNSAGMMLGGGCGQELAHWIIHGRPEKDMHGYDIRRFHHSLTDHPRWIRERSHESYAKNYSVVFPHDEPLAGRNMRRDPLHEELLGQGCVFQERHGWERPGWFHPRGPAPVLEYDYYGAYGSRAHEDYAYRRLLADEYTFAFPPHHDTIKKECLACRGAAAVFDMSYFGKFYLVGLDARKAADWLFSADVSRPPGSTVYTCMLNHRGGTESDLTVSRLAPSHQASPLAPAFEGDGYYLAMGGAVAQHNWSHITTVLQDQKSQCQLIDSSEDLGMISIQGPASRAILQEVLDADLSNEAFPFSTHKLLRAAGHLVRAMRLSFVGELGWELHIPKASCVPVYRAVMAAGAKHGLINAGYRAIDSLSIEKGYRHWHADLRPDDSPLEAGLAFTCKLKSPVPFLGREALEQQRAAGLRRRLVCFTMEDKVPMFGLEAIWRNGQVVGHVRRADFGFAIDKTIAYGYIHDPSGGPVSLDFVKSGDYALERMGVTYGAQAHLKSPFDPNNKRVKGIY

SEQ ID NO: 6297 - protein, 239 aa, Homo sapiens
MEGTVESQTPDLRDVEGKVGRKTPEGLLRGLRGECELGTSGALLLPGASSTGHDLGDKIMALKMELAYLRAIDVKILQQLVTLNEGIEAVRWLLEERGTLTSHCSSLTSSQYSLTGGSPGRSRRGSWDSLPDTSTTDRLDSVSIGSFLDTVAPSELDEQGPPGAPRSEMDWAKVIAGGERARTEVDVAATRLGSLRAVWKPPGERLQGGPPESPEDESAKLGFEAHWFWEQCQDDVTFL

SEQ ID NO: 6298 - protein, 97 aa, Homo sapiens
MSSGNAKIGHPAPNFKATADEGISFRGLFIIDDKGILRQITVNDLPVGRSVDETLRLVQAFQFTDKHGEVCPAGWKPGSDTIKPDVQKSKEYFSKQK

SEQ ID NO: 6299 - protein, 553 aa, Homo sapiens
MDRSKRNSIAGFPPRVERLEEFEGGGGGEGNVSQVGRVWPSSYRALISAFSRLTRLDDFTCEKIGSGFFSEVFKVRHRASGQVMALKMNTLSSNRANMLKEVQLMNRLSHPNILRYINSGNLEQLLDSNLHLPWTVRVKLAYDIAVGLSYLHFKGIFHRDLTSKNCLIKRDENGYSAVVADFGLAEKIPDVSMGSEKLAVVGSPFWMAPEVLRDEPYNEKADVFSYGIILCEIIARIQADPDYLAAENFGLDYDAFQHMVGDCPPDFLQLTFNCCNMDPKLRPSFVEIGKTLEEILSRLQEEEQERDRKLQPTARGLLEKAPGVKRLSSLDDKIPHKSPCPRRTIWLSRSQSDIFSRKPAAVSVLDPYYRPRDGAARTPKVNPFSARQDLMGGKIKFFDLPSKSVISLVFDLDAPGPGTMPLADWQEPLAPPIRRWRSLPGSPEFLHQEACPFVGREESLSDGPPPRLSSLKYRVKEIPPFRASALPAAQAHEAMDCSILQEENGFGSRPQGTSPCPAGASEEMEVEERPAGSTPATFSTSGIGLQTQGKQDG

SEQ ID NO: 6300 - protein, 540 aa, Homo sapiens; identical to SEQ ID NO: 5726

SEQ ID NO: 6301 - protein, 569 aa, Homo sapiens
MDRSKRNSIAGFPPRVERLEEFEGGGGGEGNVSQVGRVWPSSYRALISAFSRLTRLDDFTCEKIGSGFFSEVFKVRHRASGQVMALKMNTLSSNRANMLKEVQLMNRLSHPNILRFMGVCVHQGQLHALTEYINSGNLEQLLDSNLHLPWTVRVKLAYDIAVGLSYLHFKGIFHRDLTSKNCLIKRDENGYSAVVADFGLAEKIPDVSMGSEKLAVVGSPFWMAPEVLRDEPYNEKADVFSYGIILCEIIARIQADPDYLAAENFGLDYDAFQHMVGDCPPDFLQLTFNCCNMDPKLRPSFVEIGKTLEEILSRLQEEEQERDRKLQPTARGLLEKAPGVKRLSSLDDKIPHKSPCPRRTIWLSRSQSDIFSRKPAAVSVLDPYYRPRDGAARTPKVNPFSARQDLMGGKIKFFDLPSKSVISLVFDLDAPGPGTMPLADWQEPLAPPIRRWRSLPGSPEFLHQEACPFVGREESLSDGPPPRLSSLKYRVKEIPPFRASALPAAQAHEAMDCSILQEENGFGSRPQGTSPCPAGASEEMEVEERPAGSTPATFSTSGIGLQTQGKQDG

SEQ ID NO: 6302 - protein, 471 aa, Homo sapiens
MLGSWGCYRYAKLFSCSLSTHARFIKILDSVLHHLVPAWDHTLGTFSEIKQVKQFLLLSRQRPGLVAQCLRDSESSKPSFMPRLYINRRLAMEHRACPSRDPACKNAVFTQVYEGLKPSDKYEKPLDYRWPMRYDQWWECKFIAEGIIDQGGGFRDSLADMSEELCPSSADTPVPLPFFVRTANQGNGTGEARDMYVPNPSCRDFAKYEWIGQLMGAALRGKEFLVLALPGFVWKQLSGEEVSWSKDFPAVDSVLVKLLEVMEGMDKETFEFKFGKELTFTTVLSDQQVVELIPGGAGIVVGYGDRSRFIQLVQKARLEESKEQVAAMQAGLLKVVPQAVLDLLTWQELEKKVCGDPEVTVDALRKLTRFEDFEPSDSRVQYFWEALNNFTNEDRSRFLRFVTGRSRLPARIYIYPDKLGYETTDALPESSTCSSTLFLPHYASAKVCEEKLRYAAYNCVAIDTDMSPWEE

SEQ ID NO: 6303 - protein, 274 aa, Homo sapiens
MAAPEAEVLSSAAVPDLEWYEKSEETHASQIELLETSSTQEPLNASEAFCPRDCMVPVVFPGPVSQEGCCQFTCELLKHIMYQRQQLPLPYEQLKHFYRKPSPQAEEMLKKKPRATTEVSSRKCQQALAELESVLSHLEDFFARTLVPRVLILLGGNALSPKEFYELDLSLLAPYSVDQSLSTAACLRRLFRAIFMADAFSELQAPPLMGTVVMAQGHRNCGEDWFRPKLNYRVPSRGHKLTVTLSCGRPSIRTTAWEDYIWFQAPVTFKGFRE

SEQ ID NO: 6304 - protein, 861 aa, Homo sapiens
MAGPGPGAVLESPRQLLGRVRFLAEAARSLRAGRPLPAALAFVPREVLYKLYKDPAGPSRVLLPVWEAEGLGLRVGAAGPAPGTGSGPLRAARDSIELRRGACVRTTGEELCNGHGLWVKLTKEQLAEHLGDCGLQEGWLLVCRPAEGGARLVPIDTPNHLQRQQQLFGVDYRPVLRWEQVVDLTYSHRLGSRPQPAEAYAEAVQRLLYVPPTWTYECDEDLIHFLYDHLGKEDENLGSVKQYVESIDVSSYTEEFNVSCLTDSNADTYWESDGSQCQHWVRLTMKKGTIVKKLLLTVDTTDDNFMPKRVVVYGGEGDNLKKLSDVSIDETLIGDVCVLEDMTVHLPIIEIRIVECRDDGIDVRLRGVKIKSSRQRELGLNADLFQPTSLVRYPRLEGTDPEVLYRRAVLLQRFIKILDSVLHHLVPAWDHTLGTFSEIKQVKQFLLLSRQRPGLVAQCLRDSESSKPSFMPRLYINRRLAMEHRACPSRDPACKNAVFTQVYEGLKPSDKYEKPLDYRWPMRYDQWWECKFIAEGIIDQGGGFRDSLADMSEELCPSSADTPVPLPFFVRTANQGNGTGEARDMYVPNPSCRDFAKYEWIGQLMGAALRGKEFLVLALPGFVWKQLSGEEVSWSKDFPAVDSVLVKLLEVMEGMDKETFEFKFGKELTFTTVLSDQQVVELIPGGAGIVVGYGDRSRFIQLVQKARLEESKEQVAAMQAGLLKVVPQAVLDLLTWQELEKKVCGDPEVTVDALRKLTRFEDFEPSDSRVQYFWEALNNFTNEDRSRFLRFVTGRSRLPARIYIYPDKLGYETTDALPESSTCSSTLFLPHYASAKVCEEKLRYAAYNCVAIDTDMSPWEE

SEQ ID NO: 6305 - protein, 398 aa, Homo sapiens
MESVLSKYEDQITIFTDYLEEYPDTDELVWILGKQHLLKTEKSKLLSDISARLWFTYRRKFSPIGGTGPSSDAGWGCMLRCGQMMLAQALICRHLGRDWSWEKQKEQPKEYQRILQCFLDRKDCCYSIHQMAQMGVGEGKSIGEWFGPNTVAQVLKKLALFDEWNSLAVYVSMDNTVVIEDIKKMCRVLPLSADTAGDRPPDSLTASNQSKGTSAYCSAWKPLLLIVPLRLGINQINPVYVDAFKECFKMPQSLGALGGKPNNAYYFIGFLGDELIFLDPHTTQTFVDTEENGTVNDQTFHCLQSPQRMNILNLDPSVALGFFCKEEKDFDNWCSLVQKEILKENLRMFELVQKHPSHWPPFVPPAKPEVTTTGAEFIDSTEQLEEFDLEEDFEILSV

SEQ ID NO: 6306 - protein, 566 aa, Homo sapiens; identical to SEQ ID NO: 5875

SEQ ID NO: 6307 - protein, 309 aa, Homo sapiens
MPRARSGRRSRGAGGREETFLRVRANRQTRLNARIGKMKRRKQDEGQVCPLCNRPLAGSEQEMSRHVEHCLSKREGSCMAEDDAVDIEHENNNRFEEYEWCGQKRIRATTLLEGGFRGSGFIMCSGKENPDSDADLDVDGDDTLEYGKPQYTEADVIPCTGEEPGEAKEREALRGAVLNGGPPSTRITPEFSKWASDAEMPSTSNGESSKQEAMQKTCKNSDIEKITEDSAVTTFEALKARVRELERQLSRGDRYKCLICMDSYSMPLTSIQCWHVHCEECWLRTLGAKKLCPQCNTITAPGDLRRIYL

SEQ ID NO: 6308 - protein, 374 aa, Homo sapiens
MESVLSKYEDQITIFTDYLEEYPDTDELVWILGKQHLLKTGGTGPSSDAGWGCMLRCGQMMLAQALICRHLGRDWSWEKQKEQPKEYQRILQCFLDRKDCCYSIHQMAQMGVGEGKSIGEWFGPNTVAQVLKKLALFDEWNSLAVYVSMDNTVVIEDIKKMCRVLPLSADTAGDRPPDSLTASNQSKGTSAYCSAWKPLLLIVPLRLGINQINPVYVDAFKECFKMPQSLGALGGKPNNAYYFIGFLGDELIFLDPHTTQTFVDTEENGTVNDQTFHCLQSPQRMNILNLDPSVALGFFCKEEKDFDNWCSLVQKEILKENLRMFELVQKHPSHWPPFVPPAKPEVTTTGAEFIDSTEQLEEFDLEEDFEILSV

SEQ ID NO: 6309 - protein, 185 aa, Homo sapiens
MEGCVSNLMVCNLAYSGKLEELKESILADKSLATRTDQDSRTALHWACSAGHTEIVEFLLQLGVPVNDKDDAASKNRHEIAVMLLEGGANPDAKDHYEATAMHRAAAKGNLKMIHILLYYKASTNIQDTEGNTPLHLACDEERVEEAKLLVSQGASIYIENKEEKTPLQVAKGGLGLILKRMVEG

SEQ ID NO: 6310 - protein, 110 aa, Homo sapiens
MEGCVSNLMVCNLAYSGKLEELKESILADKSLATRTDQDSRTALHWACSAGHTEIVEFLLQLGVPVNDKDDAASKNRHEIAVMLLEGGANPDAKDHYEATAMHRAAAKDT

SEQ ID NO: 6311 - protein, 181 aa, Homo sapiens
MVLGAGWGWAYQLHLLQALKRKPDLFLCERLDVKAVFQCAVLALKFPEAPTVKASCGFFTELLPRCGEVESVGKVVQEDGRMLLIAVLEAIGGQASRSLMDCFADILFALNKHCFSLLSMWIKEALQPPGFPSARLSPEQKDTFSQQILRERVNKRRVKEMVKEFTLLCRGLHGTDYTADY

SEQ ID NO: 6312 - protein, 963 aa, Homo sapiens
MERREEQPGAAGAGAAPALDFTVENVEKALHQLYYDPNIENKNLAQKWLMQAQVSPQAWHFSWQLLQPDKVPEIQYFGASALHIKISRYWSDIPTDQYESLKAQLFTQITRFASGSKIVLTRLCVALASLALSMMPDAWPCAVADMVRLFQAEDSPVDGQGRCLALLELLTVLPEEFQTSRLPQYRKGLVRTSLAVECGAVFPLLEQLLQQPSSPSCVRQKVLKCFSSWVQLEVPLQDCEALIQAAFAALQDSELFDSSVEAIVNAISQPDAQRYVNTLLKLIPLVLGLQEQLRQAVQNGDMETSHGICRIAVALGENHSRALLDQVEHWQSFLALVNMIMFCTGIPGHYPVNETTSSLTLTFWYTLQDDILSFEAEKQAVYQQVYRPVYFQLVDVLLHKAQFPSDEEYGFWSSDEKEQFRIYRVDISDTLMYVYEMLGAELLSNLYDKLGRLLTSSEEPYSWQHTEALLYGFQSIAETIDVNYSDVVPGLIGLIPRISISNVQLADTVMFTIGALSEWLADHPVMINSVLPLVLHALGNPELSVSSVSTLKKICRECKYDLPPYAANIVAVSQDVLMKQIHKTSQCMWLMQALGFLLSALQVEEILKNLHSLISPYIQQLEKLAEEIPNPSNKLAIVHILGLLSNLFTTLDISHHEDDHEGPELRKLPVPQGPNPVVVVLQQVFQLIQKVLSKWLNDAQVVEAVCAIFEKSVKTLLDDFAPMVPQLCEMLGRMYSTIPQASALDLTRQLVHIFAHEPAHFPPIEALFLLVTSVTLTLFQQGPRDHPDIVDSFMQLLAQALKRKPDLFLCERLDVKAVFQCAVLALKFPEAPTVKASCGFFTELLPRCGEVESVGKVVQEDGRMLLIAVLEAIGGQASRSLMDCFADILFALNKHCFSLLSMWIKEALQPPGFPSARLSPEQKDTFSQQILRERVNKRRVKEMVKEFTLLCRGLHGTDYTADY

SEQ ID NO: 6313 - protein, 968 aa, Homo sapiens
MRLLRHTESEQWFHRFPLCPSLTFWAPVAMWPQTHCVGGRSSGLTKWTYSFSASLQDGSFPYDSVPWQQNTNQPPGSLSVVTTVWGVTNTSQSQADVLIPHATCRPGPLLITAWEPYGQCQQPHESRRQPHGVGHDHQQPRPQLPTVCGAAAAVLSQGWPRSALHPAEHVWPAQLPRQRGLWGQPAAAAAAAAVAAAAATATATATATVAALQETQNKDINQYGPAPVLLPDLLKDGLGDEERGAPIGMQNSMNPASMAAGMTPSGMSGPPMGMNQPRPPGISPFGTHGQRMPQQTYPGPRPQSLPIQNIKRPYPGEPNYGNQQYGPNSQFPTQPGQYPAPNPPRPLTSPNYPGQRMPSQPSSGQYPPPTVNMGQYYKPEQFNGQNNTFSGSSYSNYSQGNVNRPPRPVPVANYPHSPVPGNPTPPMTPGSSIPPYLSPSQDVKPPFPPDIKPNMSALPPPPDHNDELRLTFPVRDGVVLEPFRLEHNLAVSNHVFHLRPTVHQTLMWSDLELQFKCYHHEDRQMNTNWPASVQVSVNATPLTIERGDNKTSHKPLHLKHVCQPGRNTIQITVTACCCSHLFVLQLVHRPSVRSVLQGLLKKRLLPAEHCITKKRNFSSVAASSGNTTLNGEDGVEQTAIKVSLKCPITFRRIQLPARGHDCKHVQCFDLESYLQLNCERGTWRCPVCKTALLEGLEVDQYMWGILNAIHSEFEEVTIDPTCSWRPVPIKSDLHIKDDPDGIPSKRFKTMSPSQMIMPNVMEMIAALGPGPSPYPLPPPPGGTNSNDYSSQNNYQGHGNFDFPHGNPGGTSMNDFMHGPPQLSHPPDMPNNMAALEKPLSHPMQETMPHAGSSDQPHPSIQQGLHVPHPSSQSGPPLHHSGAPPPPPSQPPRQPPQAAPSSHPHSDLTFNPSSALEGQAGAQGASDMPEPSLDLLPELTNPDELLSYLDPPDLPSNSNDDLLSLFENN

SEQ ID NO: 6314 - protein, 200 aa, Homo sapiens
MAMEMRLPVARKPLSERLGRDTKKHLVVPGDTITTDTGFMRGHGTYMGEEKLIASVAGSVERVNKLICVKALKTRYIGEVGDIVVGRITEVQQKRWKVETNSRLDSVLLLSSMNLPGGELRRRSAEDELAMRGFLQEGDLISAEVQAVFSDGAVSLHTRSLKYGKTHFHDLPCGASVILGNNGFIWIYPTPEHKEEEAGG

SEQ ID NO: 6315 - protein, 263 aa, Homo sapiens
MAMEMRLPVARKPLSERLGRDTKKHLVVPGDTITTDTGFMRGHGTYMGEEKLIASVAGSVERVNKLICVKALKTRYIGEVGDIVVGRITERRRSAEDELAMRGFLQEGDLISAEVQAVFSDGAVSLHTRSLKYGKLGQGVLVQVSPSLVKRQKTHFHDLPCGASVILGNNGFIWIYPTPEHKEEEAGGFIANLEPVSLADREVISRLRNCIISLVTQRMMLYDTSILYCYEASLPHQIKDILKPEIMEEIVMETRQRLLEQEG

SEQ ID NO: 6316 - protein, 285 aa, Homo sapiens
MAMEMRLPVARKPLSERLGRDTKKHLVVPGDTITTDTGFMRGHGTYMGEEKLIASVAGSVERVNKLICVKALKTRYIGEVGDIVVGRITEVQQKRWKVETNSRLDSVLLLSSMNLPGGELRRRSAEDELAMRGFLQEGDLISAEVQAVFSDGAVSLHTRSLKYGKVSPSLVKRQKTHFHDLPCGASVILGNNGFIWIYPTPEHKEEEAGGFIANLEPVSLADREVISRLRNCIISLVTQRMMLYDTSILYCYEASLPHQIKDILKPEIMEEIVMETRQRLLEQEG

SEQ ID NO: 6317 - protein, 293 aa, Homo sapiens
MAMEMRLPVARKPLSERLGRDTKKHLVVPGDTITTDTGFMRGHGTYMGEEKLIASVAGSVERVNKLICVKALKTRYIGEVGDIVVGRITEVQQKRWKVETNSRLDSVLLLSSMNLPGGELRRRSAEDELAMRGFLQEGDLISAEVQAVFSDGAVSLHTRSLKYGKLGQGVLVQVSPSLVKRQKTHFHDLPCGASVILGNNGFIWIYPTPEHKEEEAGGFIANLEPVSLADREVISRLRNCIISLVTQRMMLYDTSILYCYEASLPHQIKDILKPEIMEEIVMETRQRLLEQEG

SEQ ID NO: 6318 - protein, 1064 aa, Homo sapiens
MASESETLNPSARIMTFYPTMEEFRNFSRYIAYIESQGAHRAGLAKVVPPKEWKPRASYDDIDDLVIPAPIQQLVTGQSGLFTQYNIQKKAMTVREFRKIANSDKYCTPRYSEFEELERKYWKNLTFNPPIYGADVNGTLYEKHVDEWNIGRLRTILDLVEKESGITIEGVNTPYLYFGMWKTSFAWHTEDMDLYSINYLHFGEPKSWYSVPPEHGKRLERLAKGFFPGSAQSCEAFLRHKMTLISPLMLKKYGIPFDKVTQEAGEFMITFPYGYHAGFNHGFNCAESTNFATRRWIEYGKQAVLCSCRKDMVKISMDVFVRKFQPERYKLWKAGKDNTVIDHTLPTPEAAEFLKESELPPRAGNEEECPEEDMEGVEDGEEGDLKTSLAKHRIGTKRHRVCLEIPQEVSQSELFPKEDLSSEQYEMTECPAALAPVRPTHSSVRQVEDGLTFPDYSDSTEVKFEELKNVKLEEEDEEEEQAAAALDLSVNPASVGGRLVFSGSKKKSSSSLGSGSSRDSISSDSETSEPLSCRAQGQTGVLTVHSYAKGDGRVTVGEPCTRKKGSAARSFSERELAEVADEYMFSLEENKKSKGRRQPLSKLPRHHPLVLQECVSDDETSEQLTPEEEAEETEAWAKPLSQLWQNRPPNFEAEKEFNETMAQQAPHCAVCMIFQTYHQVEFGGFNQNCGNASDLAPQKQRTKPLIPEMCFTSTGCSTDINLSTPYLEEDGTSILVSCKKCSVRVHASCYGVPPAKASEDWMCSRCSANALEEDCCLCSLRGGALQRANDDRWVHVSCAVAILEARFVNIAERSPVDVSKIPLPRFKLKCIFCKKRRKRTAGCCVQCSHGRCPTAFHVSCAQAAGVMMQPDDWPFVVFITCFRHKIPNLERAKGALQSITAGQKVISKHKNGRFYQCEVVRLTTETFYEVNFDDGSFSDNLYPEDIVSQDCLQFGPPAEGEVVQVRWTDGQVYGAKFVASHPIQMYQVEFEDGSQLVVKRDDVYTLDEELPKRVKSRLSVASDMRFNEIFTEKEVKQEKKRQRVINSRYREDYIEPALYRAIME

SEQ ID NO: 6319 - protein, 914 aa, Homo sapiens; identical to SEQ ID NO: 5366

SEQ ID NO: 6320 - protein, 404 aa, Homo sapiens
MDFNMKKLASDAGIFFTRAVQFTEEKFGQAEKTELDAHFENLLARADSTKNWTEKILRQTEVLLQPNPSARVEEFLYEKLDRKVPSRVTNGELLAQYMADAASELGPTTPYGKTLIKVAEAEKQLGAAERDFIHTASISFLTPLRNFLEGDWKTISKERRLLQNRRLDLDACKARLKKAKAAEAKATCEGDTVPDFQETRPRNYILSASASALWNDEVDKAEQELRVAQTEFDRQAEVTRLLLEGISSTHVNHLRCLHEFVKSQTTYYAQCYRHMLDLQKQLGSSQGAIFPGTFVGTTEPASPPLSSTSPTTAAATMPVVPSVASLAPPGEASLCLEEVAPPASGTRKARVLYDYEAADSSELALLADELITVYSLPGMDPDWLIGERGNKKGKVPVTYLELLS

SEQ ID NO: 6321 - protein, 395 aa, Homo sapiens
MDFNMKKLASDAGIFFTRAVQFTEEKFGQAEKTELDAHFENLLARADSTKNWTEKILRQTEVLLQPNPSARVEEFLYEKLDRKVPSRVTNGELLAQYMADAASELGPTTPYGKTLIKVAEAEKQLGAAERDFIHTASISFLTPLRNFLEGDWKTISKERRLLQNRRLDLDACKARLKKAKAAEAKATTVPDFQETRPRNYILSASASALWNDEVDKAEQELRVAQTEFDRQAEVTRLLLEGISSTHVNHLRCLHEFVKSQTTYYAQCYRHMLDLQKQLGRFPGTFVGTTEPASPPLSSTSPTTAAATMPVVPSVASLAPPGEASLCLEEVAPPASGTRKARVLYDYEAADSSELALLADELITVYSLPGMDPDWLIGERGNKKGKVPVTYLELLS

SEQ ID NO: 6322 - protein, 395 aa, Homo sapiens; identical to SEQ ID NO: 6321

SEQ ID NO: 6323 - protein, 203 aa, Homo sapiens
MSWTCPRCQQPVFFAEKVSSLGKNWHRFCLKCERCHSILSPGGHAEHNGRPYCHKPCYGALFGPRGVNIGGVGSYLYNPPTPSPGCTTPLSPSSFSPPRAAGLPQGKKSPPHMKTFTGETSLCPGCGEPVYFAEKVMSLGRNWHRPCLRCQRCHKTLTAGSHAEHDGVPYCHVPCYGYLFGPKGVNIGDVGCYIYDPVKIKFK

SEQ ID NO: 6324 - protein, 406 aa, Homo sapiens
MESLRGYTHSDIGYRSLAVGEDIEEVNDEKLTVTSLMARGGEDEENTRSKPEYGTEAENNVGTEGSVPSDDQDREGGGGHEPEQQQEEPPLTKPEQQQEEPPLLELKQEQEEPPQTTVEGPQPAEGPQTAEGPQPPERKRRRRTAFTQFQLQELENFFDESQYPDVVARERLAARLNLTEDRVQVWFQNRRAKWKRNQRVLMLRNTATADLAHPLDMFLGGAYYAAPALDPALCVHLVPQLPRPPVLPVPPMPPRPPMVPMPPRPPIAPMPPMAPVPPGSRMAPVPPGPRMAPVPPWPPMAPVPPWPPMAPVPTGPPMAPVPPGPPMARVPPGPPMARVPPGPPMAPLPPGPPMAPLPPGPPMAPLPPGPPMAPLPPRSHVPHTGLAPVHITWAPVINSYYACPFF

SEQ ID NO: 6325 - protein, 289 aa, Homo sapiens
MSPSAKKRPKNSRVSKMQDEKLRDETEQPVSKVIERNRLRTVLKNLSLLKLLKSSNRRIQELHKLAKRCWHSLLSVPKILRISSGENSACNKTKQNNEEFQEIGCSEKELKSKKLESTGDPKKKEYKEWKSQVQSGMRNKEKTSLAAMPRKEKHIEPEVAASRDDSLNPGVQGRQPLTEGPRVIFIKPYRNRTPMGHMKQLDVADQWIWFEGLPTRIHLPAPRVMCRSSTLRWVKRRCTRFCSASLEMPMWHPYKVDVTWTRARGASRGWRSRHQLKGRNGWRNSRVYK

SEQ ID NO: 6326 - protein, 547 aa, Homo sapiens; identical to SEQ ID NO: 6039

SEQ ID NO: 6327 - protein, 626 aa, Homo sapiens
MCSTLKKCGTYRTEVAECHDHGSTFQGRKKGGSSFRDNFDKRSCHYEHGGYERPPSHCQENDGSVEMRDVHKDQQLRHTPYSIRCERRMKWHSEDEIRITTWRNRKPPERKMSQNTQDGYTRNWFKVTIPYGIKYDKAWLMNSIQSHCSDRFTPVDFHYVRNRACFFVQDASAASALKDVSYKIYDDENQKICIFVNHSTAPYSVKNKLKPGQMEMLKLTMNKRYNVSQQALDLQNLRFDPDLMGRDIDIILNRRNCMAATLKIIERNFPELLSLNLCNNKLYQLDGLSDITEKAPKVKTLNLSKNKLESAWELGKVKGLKLEELWLEGNPLCSTFSDQSAYVSAIRDCFPKLLRLDGRELSAPVIVDIDSSETMKPCKENFTGSETLKHLVLQFLQQYYSIYDSGDRQGLLGAYHDEACFSLAIPFDPKDSAPSSLCKYFEDSRNMKTLKDPYLKGELLRRTKRDIVDSLSALPKTQHDLSSILVDVWCQTERMLCFSVNGVFKEVEGQSQGSVLAFTRTFIATPGSSSSLCIVNDELFVRDASPQETQSAFSIPVSTLSSSSEPSLSQEQQEMVQAFSAQSGMKLEWSQKCLQDNEWNYTRAGQAFTMLQTEGKIPAEAFKQIS

SEQ ID NO: 6328 - protein, 626 aa, Homo sapiens; identical to SEQ ID NO: 6327

SEQ ID NO: 6329 - protein, 409 aa, Homo sapiens
MKWHSEDEIRITTWRNRKPPERKMSQNTQDGYTRNWFKVTIPYGIKYDKAWLMNSIQSHCSDRFTPVDFHYVRNRACFFVQDASAASALKDVSYKIYDDENQKICIFVNHSTAPYSVKNKLKPGQMEMLKLTMNKRYNVSQQALDLQNLRFDPDLMGRDIDIILNRRNCMAATLKIIERNFPELLSLNLCNNKLYQLDGLSDITEKAPKVKTLNLSKNKLESAWELGKVKGLKLEELWLEGNPLCSTFSDQSAYVSAIRDCFPKLLRLDGRELSAPVIVDIDSSETMKPCKENFTGSETLKHLVLQFLQQYYSIYDSGDRQGLLGAYHDEACFSLAIPFDPKDSAPSSLCKYFEDSRNMKTLKDPYLKGELLRRTKRDIVDSLSALPKTQHDLSSILVDVWCQTVPSGQ

SEQ ID NO: 6330 - protein, 441 aa, Homo sapiens; identical to SEQ ID NO: 4680

SEQ ID NO: 6331 - protein, 385 aa, Homo sapiens
MASVAAARAVPVGSGLRGLQRTLPLVVILGATGTGKSTLALQLGQRLGGEIVSADSMQPQEMGTEKVIDRKVELEKEDGLVLHKRLSQVDPEMAAKLHPHDKRKVARSLQVFEETGISHSEFLHRQHTEEGGGPLGGPLKFSNPCILWLHADQADERLDKRVDDMLAAGLLEELRDFHRRYNQKNVSENSQDYQHGIFQSIGFKEFHEYLITEGKCTLETSNQLLKKGIEALKQVTKRYARKQNRWVKNRFLSRPGPIVPPVYGLEVSDVSKWEESVLEPALEIVQSFIQGHKPTATPIKMPYNEAENKRSYHLCDLCDRIIIGDREWAAHIKSKSHLNQLKKRRRLDSDAVNTIESQSVSPDHNKEPKEKGSPGQNDQELKCSV

SEQ ID NO: 6332 - protein, 328 aa, Homo sapiens
MKRPKEPSGSDGESDGPIDVGQEGQLSQMARPLSTPSSSQMQARKKHRGIIEKRRRDRINSSLSELRRLVPTAFEKQGSSKLEKAEVLQMTVDHLKMLHATGGTGFFDARALAVDFRSIGFRECLTEVIRYLGVLEGPSSRADPVRIRLLSHLNSYAAEMEPSPTPTGPLAFPAWPWSFFHSCPGLPALSNQLAILGRVPSPVLPGVSSPAYPIPALRTAPLRRATGIILPARRNVLPSRGASSTRRARPLERPATPVPVAPSSRAARSSHIAPLLQSSSPTPPGPTGSAAYVAVPTPNSSSPGPAGRPAGAMLYHSWVSEITEIGAF

SEQ ID NO: 6333 - protein, 753 aa, Homo sapiens
METFEPISQEPLSQASYDKAPDPVPELQDSFYAELQRAESLQEKSIKEAKTKCRTIASLLTAAPNPHSKGVLMFKKRRQRAKKYTLVSFGAAAGTGAEEEDGVPPTSESELDEEAFSDARSLTNQSDWDSPYLDMELARAGSRASEGQGSGLGGQLSEVSGRGVQLFEQQRQRADSSTQELARVEPAAMLNGEGLQSPPRAQSAPPEAAVLPPSPLPAPVASPRPFQPGGGAPTPAPSIFNRSARPFTPGLQGQRPTTTSVIFRPLAPKRANDSLGGLSPAPPPFLSSQGPTPLPSFTSGVPSHAPVSGSPSTPRSSGPVTATSSLYIPAPSRPVTPGGAPEPPAPPSAAAMTSTASIFLSAPLRPSARPEAPAPGPGAPEPPSAREQRISVPAARTGILQEARRRGTRKQMFRPGKEETKNSPNPELLSLVQNLDEKPRAGGAESGPEEDALSLGAEACNFMQPVGARSYKTLPHVTPKTPPPMAPKTPPPMTPKTPPPVAPKPPSRGLLDGLVNGAASSAGIPEPPRLQGRGGELFAKRQSRADRYVVEGTPGPGLGPRPRSPSPTPSLPPSWKYSPNIRAPPPIAYNPLLSPFFPQAARTLPKAQSQGPRATPKQGIKALDFMRHQPYQLKTAMFCFDEVPPTPGPIASGSPKTARVQEIRRFSTPAPQPTAEPLAPTVLAPRAATTLDEPIWRTELASAPVPSPAPPPEAPRGLGASPSSCGFQVARPRFSATRTGLQAHVWRPGAGHQ

SEQ ID NO: 6334 - protein, 346 aa, Homo sapiens; identical to SEQ ID NO: 4787

SEQ ID NO: 6335 - protein, 522 aa, Homo sapiens
MSPQKRVKNVQAQNRTSQGSSSFQTTLSAWKVKQDPSNSKNISKHGQNNPVGDYEHADDQAEEDALQMAVGYFEKGPIKASQNKDKTLEKHLKTVENVAWKNGLASEEIDILLNIALSGKFGNAVNTRILKCMIPATVISEDSVVKAVSWLCVGKCSGSTKVLFYRWLVAMFDFIDRKEQINLLYGFFFASLQDDALCPYVCHLLYLLTKKENVKPFRVRKLLDLQAKMGMQPHLQALLSLYKFFAPALISVSLPVRKKIYFKNSENLWKTALLAVKQRNRGPSPEPLKLMLGPANVRPLKRKWNSLSVIPVLNSSSYTKECGKKEMSLSDCLNRSGSFPLEQLQSFPQLLQNIHCLELPSQMGSVLNNSLLLHYINCVRDEPVLLRFYYWLSQTLQEECIWYKVNNYEHGKEFTNFLDTIIRAECFLQEGFYSCEAFLYKSLPLWDGLCCRSQFLQLVSWIPFSSFSEVKPLLFDHLAQLFFTSTIYFKCSVLQSLKELLQNWLLWLSMDIHMKPVTNSPL

SEQ ID NO: 6336 - protein, 756 aa, Homo sapiens
MSPQKRVKNVQAQNRTSQGSSSFQTTLSAWKVKQDPSNSKNISKHGQNNPVGDYEHADDQAEEDALQMAVGYFEKGPIKASQNKDKTLEKHLKTVENVAWKNGLASEEIDILLNIALSGKFGNAVNTRILKCMIPATVISEDSVVKAVSWLCVGKCSGSTKVLFYRWLVAMFDFIDRKEQINLLYGFFFASLQDDALCPYVCHLLYLLTKKENVKPFRVRKLLDLQAKMGMQPHLQALLSLYKFFAPALISVSLPVRKKIYFKNSENLWKTALLAVKQRNRGPSPEPLKLMLGPANVRPLKRKWNSLSVIPVLNSSSYTKECGKKEMSLSDCLNRSGSFPLEQLQSFPQLLQNIHCLELPSQMGSVLNNSLLLHYINCVRDEPVLLRFYYWLSQTLQEECIWYKVNNYEHGKEFTNFLDTIIRAECFLQEGFYSCEAFLYKSLPLWDGLCCRSQFLQLVSWIPFSSFSEVKPLLFDHLAQLFFTSTIYFKCSVLQSLKELLQNWLLWLSMDIHMKPVTNSPLETTLGGSMNSVSKLIHYVGWLSTTAMRLESNNTFLLHFILDFYEKVCDIYINYNLPLVVLFPPGIFYSALLSLDTSILNQLCFIMHRYRKNLTAAKKNELVQKTKSEFNFSSKTYQEFNHYLTSMVGCLWTSKPFGKGIYIDPEILEKTGVAEYKNSLNVVHHPSFLSYAVSFLLQESPEERTVNVSSIRGKKWSWYLDYLFSQGLQGLKLFIRSSVHHSSIPRAEGINCNNQY

SEQ ID NO: 6337 - protein, 310 aa, Homo sapiens
MADAAATAGAGGSGTRSGSKQSTNPADNYHLARRRTLQVVVSSLLTEAGFESAEKASVETLTEMLQSYISEIGRSAKSYCEHTARTQPTLSDIVVTLVEMGFNVDTLPAYAKRSQRMVITAPPVTNQPVTPKALTAGQNRPHPPHIPSHFPEFPDPHTYIKTPTYREPVSDYQVLREKAASQRRDVERALTRFMAKTGETQSLFKDDVSTFPLIAARPFTIPYLTALLPSELEMQQMEETDSSEQDEQTDTENLALHISMEDSGAEKENTSVLQQNPSLSGSRNGEENIIDNPYLRPVKKPKIRRKKSLS

SEQ ID NO: 6338 - protein, 644 aa, Homo sapiens
MEETMKLATMEDTVEYCLFLIPDESRDSDKHKEILQKYIERIITRFAPMLVPYIWQNQPFNLKYKPGKGGVPAHMFGVTKFGDNIEDEWFIVYVIKQITKEFPELVARIEDNDGEFLLIEAADFLPKWLDPENSTNRVFFCHGELCIIPAPRKSGAESWLPTTPPTIPQALNIITAHSEKILASESIRAAVNRRIRGYPEKIQASLHRAHCFLPAGIVAVLKQRPRLVAAAVQAFYLRDPIDLRACRVFKTFLPETRIMTSVTFTKCLYAQLVQQRFVPDRRSGYRLPPPSDPQYRAHELGMKLAHGFEILCSKCSPHFSDCKKSLVTASPLWASFLESLKKNDYFKGLIEGSAQYRERLEMAENYFQLSVDWPESSLAMSPGEEILTLLQTIPFDIEDLKKEAANLPPEDDDQWLDLSPDQLDQLLQEAVGKKESESVSKEEKEQNYDLTEVSESMKAFISKVSTHKGAELPREPSEAPITFDADSFLNYFDKILGPRPNESDSDDLDDEDFECLDSDDDLDFETHEPGEEASLKGTLDNLKSYMAQMDQELAHTCISKSFTTRNQVEPVSQTTDNNSDEEDSGTGESVMAPVDVDLNLVSNILESYSSQAGLAGPASNLLQSMGVQLPDNTDHRPTSKPTKN

SEQ ID NO: 6339 - protein, 719 aa, Homo sapiens
MSVSGKKEFDVKQILRLRWRWFSHPFQGSTNTGSCLQQEGYEHRGTPVQGRLKSHSRDRNGLKKSNSPVHHNILAPVPGPAPAHQRAVQNLQQHNLIVHFQANEDTPKSVPEKNLFKEACEKRAQDLEMMADDNIEDSTARLDTQHSEDMNATRSEEQFHVINHAEQTLRKMENYLKEKQLCDVLLIAGHLRIPAHRLVLSAVSDYFAAMFTNDVLEAKQEEVRMEGVDPNALNSLVQYAYTGVLQLKEDTIESLLAAACLLQLTQVIDVCSNFLIKQLHPSNCLGIRSFGDAQGCTELLNVAHKYTMEHFIEVIKNQEFLLLPANEISKLLCSDDINVPDEETIFHALMQWVGHDVQNRQGELGMLLSYIRLPLLPPQLLADLETSSMFTGDLECQKLLMEAMKYHLLPERRSMMQSAAKPRKSTVGALYAVGGMDAMKGTTTIEKYDLRTNSWLHIGTMNGRRLQFGVAVIDNKLYVVGGRDGLKTLNTVECFNPVGKIWTVMPPMSTHRHGLGVATLEGPMYAVGGHDGWSYLNTVERWDPEGRQWNYVASMSTPRSTVGVVALNNKLYAIGGRDGSSCLKSMEYFDPHTNKWSLCAPMSKRRGGVGVATYNGFLYVVGGHDAPASNHCSRLSDCVERYDPKGDSWSTVAPLSVPRDAVAVCPLGDKLYVVGGYDGHTYLNTVESYDAQRNEWKESMQELLQNFYTTQKLKETLGH

SEQ ID NO: 6340 - protein, 717 aa, Homo sapiens
MSVSGKKEFDVKQILRLRWRWFSHPFQGSTNTGSCLQQEGYEHRGTPVQGRLKSHSRDRNGLKKSNSPVHHNILAPVPGPAPAHQRAVQNLQQHNLIVHFQANEDTPKSVPEKNLFKEACEKRAQDLEMMADDNIEDSTARLDTQHSEDMNATRSEEQFHVINHAEQTLRKMENYLKEKQLCDVLLIAGHLRIPAHRLVLSAVSDYFAAMFTNDVLEAKQEEVRMEGVDPNALNSLVQYAYTGVLQLKEDTIESLLAAACLLQLTQVIDVCSNFLIKQLHPSNCLGIRSFGDAQGCTELLNVAHKYTMEHFIEVIKNQEFLLLPANEISKLLCSDDINVPDEETIFHALMQWVGHDVQNRQGELGMLLSYIRLPLLPPQLLADLETSSMFTGDLECQKLLMEAMKYHLLPERRSMMQSAAKPRKSTVGALYAVGGMDAMKGTTTIEKYDLRTNSWLHIGTMNGRRLQFGVAVIDNKLYVVGGRDGLKTLNTVECFNPVGKIWTVMPPMSTHRHGLGVATLEGPMYAVGGHDGWSYLNTVERWDPEGRQWNYVASMSTPRSTVGVVALNNKLYAIGGRDGSSCLKSMEYFDPHTNKWSLCAPMSKRRGGVGVATYNGFLYVVGGHDAPASNHCSRLSDCVERYDPKGDSWSTVAPLSVPRDAVAVCPLGDKLYVVGGYDGHTYLNTVESYDAQRNEWKEEVPVNIGRAGACVVVVKLP

SEQ ID NO: 6341 - protein, 377 aa, Homo sapiens
MNGPVSPKSKARPSSPSTSWHRPASPCPSPGPGHTLPPKPPSPRGTTASPKGRVRRKEEAKESPSAAGPEDKSQSKRRASNEKESAAPASPAPSPAPSPTPAPPQKEQPPAETPTAPAPPVTPSKPMAGTTDREEATRLLAEKRRQAREQREREEQERRLQAERDKRMREEQLAREAEARAEREAEARRREEQEAREKAQAEQEEQERLQKQKEEAEARSREEAERQRLEREKHFQQQEQERQERRKRLEEIMKRTRKSEVSETKKQDSKEANANGSSPEPVKAVEARSPGLQKEAVQKEEPIPQEPQWSLPSKELPASLVNGLQPLPAHQENGFSTNGPSGDKSLSRTPETLLPFAEAEAFLKKAVVQSPQVTEVL

SEQ ID NO: 6342 - protein, 808 aa, Homo sapiens
MESGPRAELGAGAPPAVVARTPPEPRPSPEGDPSPPPPPMSALVPDTPPDTPPAMKNATSSKQLPLEPESPSGQVGPRPAPPQEESPSSEAKSRGPTPPAMGPRDARPPRRSSQPSPTAVPASDSPPTKQEVKKAGERHKLAKERREERAKYLAAKKAVWLEKEEKAKALREKQLQERRRRLEEQRLKAEQRRAALEERQRQKLEKNKERYEAAIQRSVKKTWAEIRQQRWSWAGALHHSSPGHKTSGSRCSVSAVNLPKHVDSIINKRLSKSSATLWNSPSRNRSLQLSAWESSIVDRLMTPTLSFLARSRSAVTLPRNGRDQAVPVCPRSASASPLTPCSVTRSVHRCAPAGERGERRKPNAGGSPAPVRRRPEASPVQKKEKKDKERENEKEKSALARERSLKKRQSLPASPRARLSASTASELSPKSKARPSSPSTSWHRPASPCPSPGPGHTLPPKPPSPRGTTASPKGRVRRKEEAKESPSAAGPEDKSQSKRRASNEKESAAPASPAPSPAPSPTPAPPQKEQPPAETPTDAAVLTSPPAPAPPVTPSKPMAGTTDREEATRLLAEKRRQAREQREREEQERRLQAERDKRMREEQLAREAEARAEREAEARRREEQEAREKAQAEQEEQERLQKQKEEAEARSREEAERQRLEREKHFQQQEQERQERRKRLEEIMKRTRKSEVSETKKQDSKEANANGSSPEPVKAVEARSPGLQKEAVQKEEPIPQEPQWSLPSKELPASLVNGLQPLPAHQENGFSTNGPSGDKSLSRTPETLLPFAEAEAFLKKAVVQSPQVTEVL

SEQ ID NO: 6343 - protein, 841 aa, Homo sapiens
MESGPRAELGAGAPPAVVARTPPEPRPSPEGDPSPPPPPMSALVPDTPPDTPPAMKNATSSKQLPLEPESPSGQVGPRPAPPQEESPSSEAKSRGPTPPAMGPRDARPPRRSSQPSPTAVPASDSPPTKQEVKKAGERHKLAKERREERAKYLAAKKAVWLEKEEKAKALREKQLQERRRRLEEQRLKAEQRRAALEERQRQKLEKNKERYEAAIQRSVKKTWAEIRQQRWSWAGALHHSSPGHKTSGSRCSVSAVNLPKHVDSIINKRLSKSSATLWNSPSRNRSLQLSAWESSIVDRLMTPTLSFLARSRSAVTLPRNGRDQGRGCDPGRGPTWGRAGASLARGPQPDRTHPSAAVPVCPRSASASPLTPCSVTRSVHRCAPAGERGERRKPNAGGSPAPVRRRPEASPVQKKEKKDKERENEKEKSALARERSLKKRQSLPASPRARLSASTASELSPKSKARPSSPSTSWHRPASPCPSPGPGHTLPPKPPSPRGTTASPKGRVRRKEEAKESPSAAGPEDKSQSKRRASNEKESAAPASPAPSPAPSPTPAPPQKEQPPAETPTDAAVLTSPPAPAPPVTPSKPMAGTTDREEATRLLAEKRRQAREQREREEQERRLQAERDKRMREEQLAREAEARAEREAEARRREEQEAREKAQAEQEEQERLQKQKEEAEARSREEAERQRLEREKHFQQQEQERQERRKRLEEIMKRTRKSEVSETKQKQDSKEANANGSSPEPVKAVEARSPGLQKEAVQKEEPIPQEPQWSLPSKELPASLVNGLQPLPAHQENGFSTNGPSGDKSLSRTPETLLPFAEAEAFLKKAVVQSPQVTEVL

SEQ ID NO: 6344 - protein, 164 aa, Homo sapiens
NLPKHVDSIINKRQRLEREKHFQQQEQERQERRKRLEEIMKRTRKSEVSETKKQDSKEANANGSSPEPVKAVEARSPGLQKEAVQKEEPIPQEPQWSLPSKELPASLVNGLQPLPAHQENGFSTNGPSGDKSLSRTPETLLPFAEAEAFLKKAVVQSPQVTEVL

SEQ ID NO: 6345 - protein, 114 aa, Homo sapiens
MVIRVYIASSSGSTAIKKKQQDVLGFLEANKIGFEEKDIAANEENRKWMRENVPENSRPATGYPLPPQIFNESQYRGDYDAFFEARENNAVYAFLGLTAPPGSKEAEVQAKQQA

SEQ ID NO: 6346 - protein, 178 aa, Homo sapiens
MSGFSTEERAAPFSLEYRVFLKNEKGQYISPFHDIPIYADKDVFHMVVEVPRWSNAKMEIATKDPLNPIKQDVKKGKLRYVANLFPYKGYIWNYGAIPQTWEDPGHNDKHTGCCGDNDPIDVCEIGSKVCARGEIIGVKVLGILAMIDEGETDWKVIAINVDDPDAANYNVCNSVVIL

SEQ ID NO: 6347 - protein, 289 aa, Homo sapiens
MSGFSTEERAAPFSLEYRVFLKNEKGQYISPFHDIPIYADKDVFHMVVEVPRWSNAKMEIATKDPLNPIKQDVKKGKLRYVANLFPYKGYIWNYGAIPQTWEDPGHNDKHTGCCGDNDPIDVCEIGSKVCARGEIIGVKVLGILAMIDEGETDWKVIAINVDDPDAANYNDINDVKRLKPGYLEATVDWFRRYKVPDGKPENEFAFNAEFKDKDFAIDIIKSTHDHWKALVTKKTNGKGISCMNTTLSESPFKCDPDAARAIVDALPPPCESACTVPTDVDKWFHHQKN

SEQ ID NO: 6348 - protein, 700 aa, Homo sapiens
MTERCSLWSALSAAACCFYRGSFVQFSKEKYILDSSPEKLHKELEEELKLSSTDLRSHAWYHGRIPREVSETLVQRNGDFLIRDSLTSLGDYVLTCRWRNQALHFKINKVVVKAGESYTHIQYLFEQESFDHVPALVRYHVGSRKAVSEQSGAIIYCPVNRTFPLRYLEASYGLGQGSSKPASPVSPSGPKGSHMKRRSVTMTDGLTADKVTRSDGCPTSTSLPRPRDSIRSCALSMDQIPDLHSPMSPISESPSSPAYSTVTRVHAAPAAPSATALPASPVARRSSEPQLCPGSAPKTHGESDKGPHTSPSHTLGKASPSPSLSSYSDPDSGHYCQLQPPVRGSREWAATETSSQQARSYGERLKELSENGAPEGDWGKTFTVPIVEVTSSFNPATFQSLLIPRDNRPLEVGLLRKVKELLAEVDARTLARHVTKVDCLVARILGVTKEMQTLMGVRWGMELLTLPHGRQLRLDLLERFHTMSIMLAVDILGCTGSAEERAALLHKTIQLAAELRGTMGNMFSFAAVMGALDMAQISRLEQTWVTLRQRHTEGAILYEKKLKPFLKSLNEGKEGPPLSNTTFPHVLPLITLLECDSAPPEGPEPWGSTEHGVEVVLAHLEAARTVAHHGGLYHTNAEVKLQGFQARPELLEVFSTEFQMRLLWGSQGASSSQARRYEKFDKVLTALSHKLEPAVRSSEL

SEQ ID NO: 6349 - protein, 792 aa, Homo sapiens
MAPALPSPHKAVARPELLLDTAAHSGKLRAPDGGEGAECAGHNGGPSWGVGQGQSQEPSRQGIPQAPWLVSWQRRGFPPSSFCPGPLRTEKLRAGRCPLLLCGGAAGEPEAGSDYVKFSKEKYILDSSPEKLHKELEEELKLSSTDLRSHAWYHGRIPREVSETLVQRNGDFLIRDSLTSLGDYVLTCRWRNQALHFKINKVVVKAGESYTHIQYLFEQESFDHVPALVRYHVGSRKAVSEQSGAIIYCPVNRTFPLRYLEASYGLGQGSSKPASPVSPSGPKGSHMKRRSVTMTDGLTADKVTRSDGCPTSTSLPRPRDSIRSCALSMDQIPDLHSPMSPISESPSSPAYSTVTRVHAAPAAPSATALPASPVARRSSEPQLCPGSAPKTHGESDKGPHTSPSHTLGKASPSPSLSSYSDPDSGHYCQLQPPVRGSREWAATETSSQQARSYGERLKELSENGAPEGDWGKTFTVPIVEVTSSFNPATFQSLLIPRDNRPLEVGLLRKVKELLAEVDARTLARHVTKVDCLVARILGVTKEMQTLMGVRWGMELLTLPHGRQLRLDLLERFHTMSIMLAVDILGCTGSAEERAALLHKTIQLAAELRGTMGNMFSFAAVMGALDMAQISRLEQTWVTLRQRHTEGAILYEKKLKPFLKSLNEGKEGPPLSNTTFPHVLPLITLLECDSAPPEGPEPWGSTEHGVEVVLAHLEAARTVAHHGGLYHTNAEVKLQGFQARPELLEVFSTEFQMRLLWGSQGASSSQARRYEKFDKVLTALSHKLEPAVRSSEL

SEQ ID NO: 6350 - protein, 703 aa, Homo sapiens
MTAVGRRCPALGSRGAAGEPEAGSDYVKFSKEKYILDSSPEKLHKELEEELKLSSTDLRSHAWYHGRIPREVSETLVQRNGDFLIRDSLTSLGDYVLTCRWRNQALHFKINKVVVKAGESYTHIQYLFEQESFDHVPALVRYHVGSRKAVSEQSGAIIYCPVNRTFPLRYLEASYGLGQGSSKPASPVSPSGPKGSHMKRRSVTMTDGLTADKVTRSDGCPTSTSLPRPRDSIRSCALSMDQIPDLHSPMSPISESPSSPAYSTVTRVHAAPAAPSATALPASPVARRSSEPQLCPGSAPKTHGESDKGPHTSPSHTLGKASPSPSLSSYSDPDSGHYCQLQPPVRGSREWAATETSSQQARSYGERLKELSENGAPEGDWGKTFTVPIVEVTSSFNPATFQSLLIPRDNRPLEVGLLRKVKELLAEVDARTLARHVTKVDCLVARILGVTKEMQTLMGVRWGMELLTLPHGRQLRLDLLERFHTMSIMLAVDILGCTGSAEERAALLHKTIQLAAELRGTMGNMFSFAAVMGALDMAQISRLEQTWVTLRQRHTEGAILYEKKLKPFLKSLNEGKEGPPLSNTTFPHVLPLITLLECDSAPPEGPEPWGSTEHGVEVVLAHLEAARTVAHHGGLYHTNAEVKLQGFQARPELLEVFSTEFQMRLLWGSQGASSSQARRYEKFDKVLTALSHKLEPAVRSSEL

SEQ ID NO: 6351 - protein, 622 aa, Homo sapiens
MDQLPQKNLLRLHPAGSAGCSTGVESSSMDGFWMEVEQIQQRDELREEDSGGNEGQLPEEGEAESQWLQDTGLSGLLGGLGLDGDHQELLSTLTQTQVAAVCRRLDIYARSVRRQHKTPVRDVRDVFGVFNSGKMSSENGDSGMKGAQLSSGASKFPPAAEPGGLQEQAGREEAFNMDSAYSEQAAVLLQRSRPSRGGTSAWGKCSLPKFTVPKGRLGVTRIGDLSLQDMRKVPSLALIELTALCDILGLDLKRSKAGKWKAAETRLFGVPLDSLLEADHKVLPSTQVPLVLQALLSCLEKRGLDMEGILRVPGSQARVKGLEQKLERDFYAGLFSWDEVHHNDASDLLKRFIRKLPTPLLTAEYLPAFAVVPNIPNLKQRLQVLHLLILILPEPNRNALKALLEFLRKVVAREQHNKMTLRNVSTVMAPNLFLHQGRPPKLPKGKEKQLAEGAAEVVQIMVHYQDLLWTVASFLVAQVRKLNDSSSRRPQLCDAGLKTWLRRMHADRDKAGDGLEATPKVAKIQVVWPIKDPLKVPLTPSTKVAHVLRQFTEHLSPGSKGQEDSEDMDSLLLHHRSMESANILLYEVGGNINEHRLDPDAYLLDLYRANPHGEWVLKQNPT

SEQ ID NO: 6352 - protein, 281 aa, Homo sapiens
MATELQCPDSMPCHNQQVNSASTPSPEQLRPGDLILDHAGGNRASRAKVILLTGYAHSSLPAELDSGACGGSSLNSEGNSGSGDSSSYDAPAGNSFLEDCELSRQIGAQLKLLPMNDQIRELQTIIRDKTASRGDFMFSADRLIRLVVEEGLNQLPYKECMVTTPTGYKYEGVKFEKGNCGVSIMRSGEAMEQGLRDCCRSIRIGKILIQSDEETQRAKVYYAKFPPDIYRRKVLLMYPILSTGNTVIEAVKVLIEHGVQPSVIILLSLFSTPHGEFSMRQ

SEQ ID NO: 6353 - protein, 309 aa, Homo sapiens
MATELQCPDSMPCHNQQVNSASTPSPEQLRPGDLILDHAGGNRASRAKVILLTGYAHSSLPAELDSGACGGSSLNSEGNSGSGDSSSYDAPAGNSFLEDCELSRQIGAQLKLLPMNDQIRELQTIIRDKTASRGDFMFSADRLIRLVVEEGLNQLPYKECMVTTPTGYKYEGVKFEKGNCGVSIMRSGEAMEQGLRDCCRSIRIGKILIQSDEETQRAKVYYAKFPPDIYRRKVLLMYPILSTGNTVIEAVKVLIEHGVQPSVIILLSLFSTPHGAKSIIQEFPEITILTTEVHPVAPTHFGQKYFGTD

SEQ ID NO: 6354 - protein, 210 aa, Homo sapiens
MVSGSEQKFLIGLGKSQIYTWDGRQSDRWIKLDLKTELPRDTLLSVEIVHELKGEGKAQRKISAIHILDVLVLNGTDVREQHFNQRIQLAEKFVKAVSKPSRPDMNPIRVKEVYRLEEMEKIFVRLEMKIIKGSSGTPKLSYTGRDDRHFVPMGLYIVRTVNEPWTMGFSKSFKKKFFYNKKTKDSTFDLPADSIAPFHLPSLACLSKMD

SEQ ID NO: 6355 - protein, 372 aa, Homo sapiens
MKRRTDPECTAPIKKQKKRVAELALSLSSTSDDEPPSSVSHGAKASTTSLSGSDSETEGKQHSSDSFDDAFKADSLVEGTSSRYSMYNSVSQKLMAKMGFREGEGLGKYSQGRKDIVEASSQKGRRGLGLTLRGFDQELNVDWRDEPEPSACEQVSWFPECTTEIPDTQEMSDWMVVGKRKMIIEDETEFCGEELLHSVLQCKKPLVKDREAELLYFADVCAGPGGFSEYVLWRKKWHAKGFGMTLKGPNDFKLEDFYSASSELFEPYYGEGGIDGDGDITRPENISAFRNFVLDNTDRKGVHFLMADGGFSVEGQENLQEILSKQLLLCQFLMALSIVRTGGHFICKTFDLFTPFSVGLVYLLYCCFERVC

SEQ ID NO: 6356 - protein, 204 aa, Homo sapiens; identical to SEQ ID NO: 5961

SEQ ID NO: 6357 - protein, 480 aa, Homo sapiens
MAGYLSESDFVMVEEGFSTRDLLKELTLGASQATTDEVAAFFVADLGAIVRKHFCFLKCLPRVRPFYAVKCNSSPGVLKVLAQLGLGFSCANKAEMELVQHIGIPASKIICANPCKQIAQIKYAAKHGIQLLSFDNEMELAKVVKSHPSAKMVLCIATDDSHSLSCLSLKFGVSLKSCRHLLENAKKHHVEVVGVSFHIGSGCPDPQAYAQSIADARLVFEMGTELGHKMHVLDLGGGFPGTEGAKVRFEEIASVINSALDLYFPEGCGVDIFAELGRYYVTSAFTVAVSIIAKKEVLLDQPGREAPLPPPHIATCAASEPSPPAEENGSTSKTIVYHLDEGVYGIFNSVLFDNICPTPILQKKPSTEQPLYSSSLWGPAVDGCDCVAEGLWLPQLHVGDWLVFDNMGAYTVGMGSPFWGTQACHITYAMSRVAWEALRRQLMAAEQEDDVEGVCKPLSCGWEITDTLCVGPVFTPASIM

SEQ ID NO: 6358 - protein, 460 aa, Homo sapiens; identical to SEQ ID NO: 5139

SEQ ID NO: 6359 - protein, 835 aa, Homo sapiens
MKRRTDPECTAPIKKQKKRVAELALSLSSTSDDEPPSSVSHGAKASTTSLSGSDSETEGKQHSSDSFDDAFKADSLVEGTSSRYSMYNSVSQKLMAKMGFREGEGLGKYSQGRKDIVEASSQKGRRGLGLTLRGFDQELNVDWRDEPEPSACEQVSWFPECTTEIPDTQEMSDWMVVGKRKMIIEDETEFCGEELLHSVLQCKSVFDVLDGEEMRRARTRANPYEMIRGVFFLNRAAMKMANMDFVFDRMFTNPRDSYGKPLVKDREAELLYFADVCAGPGGFSEYVLWRKKWHAKGFGMTLKGPNDFKLEDFYSASSELFEPYYGEGGIDGDGDITRPENISAFRNFVLDNTDRKGVHFLMADGGFSVEGQENLQEILSKQLLLCQFLMALSIVRTGGHFICKTFDLFTPFSVGLVYLLYCCFERVCLFKPITSRPANSERYVVCKGLKVGIDDVRDYLFAVNIKLNQLRNTDSDVNLVVPLEVIKGDHEFTDYMIRSNESHCSLQIKALAKIHAFVQDTTLSEPRQAEIRKECLRLWGIPDQARVAPSSSDPKSKFFELIQGTEIDIFSYKPTLLTSKTLEKIRPVFDYRCMVSGSEQKFLIGLGKSQIYTWDGRQSDRWIKLDLKTELPRDTLLSVEIVHELKGEGKAQRKISAIHILDVLVLNGTDVREQHFNQRIQLAEKFVKAVSKPSRPDMNPIRVKEVYRLEEMEKIFVRLEMKIIKGSSGTPKLSYTGRDDRHFVPMGLYIVRTVNEPWTMGFSKSFKKKFFYNKKTKDSTFDLPADSIAPFHICYYGRLFWEWGDGIRVHDSQKPQDQDKLSKEDVLSFIQMHRA

SEQ ID NO: 6360 - protein, 83 aa, Homo sapiens
  VARIANT 1: note = X can be any amino acid
XQELLKEKTLAEQNLEDTRQQLLAARSSQAKAINTLETRVRELEQTLQASEEQLQQSKGIVAAQETQIQELVSAYWSCCIPGP

SEQ ID NO: 6361 - protein, 767 aa, Homo sapiens
MFAKLKKKIAEETAVAQRPGGATRIPRSVSKESVASMGADSGDDFASDGSSSREDLSSQLLRRNEQIRKLEARLSDYAEQVRNLQKIKEKLEIALEKHQDSSMRKFQEQNETFQANRAKMAEGLALALARKDQEWSEKMDQLEKEKNILTAQLQEMKNQSMNLFQRRDEMDELEGFQQQELSKIKHMLLKKEESLGKMEQELEARTRELSRTQEELMNSNQMSSDLSQKLEELQRHYSTLEEQRDHVIASKTGAESKITALEQKEQELQALIQQLSIDLQKVTAETQEKEDVITHLQEKVASLEKRLEQNLSGEEHLQELLKEKTLAEQNLEDTRQQLLAARSSQAKAINTLETRVRELEQTLQASEEQLQQSKGIVAAQETQIQELAAANQESSHVQQQALALEQQFLERTQALEAQIVALERTRAADQTTAEQGMRQLEQENAALKECRNEYERSLQNHQFELKKLKEEWSQREIVSVAMAQALEEVRKQREEFQQQAANLTAIIDEKEQNLREKTEVLLQKEQEILQLERGHNSALLQIHQLQAELEALRTLKAEEAAVVAEQEDLLRLRGPLQAEALSVNESHVTSRAMQDPVFQLPTAGRTPNGEVGAMDLTQLQKEKQDLEQQLLEKNKTIKQMQQRMLELRKTLQKELKIRPDNELFEVREKPGPEMANMAPSVTNNTDLTDAREINFEYLKHVVLKFMSCRESEAFHLIKAVSVLLNFSQEEENMLKETLEYKMSWFGSKPAPKGSIRPSISNPRIPWS

SEQ ID NO: 6362 - protein, 96 aa, Homo sapiens
  VARIANT 1: note = X can be any amino acid
XAKIKARDLRGKKKEELLKQLDDLKVELSQLRVAKVTGGAASKLSKIRVVRKSIARVLTVINQTQKENLRKFYKAAAGGPCIQMDRVLPQPPACSC

SEQ ID NO: 6363 - protein, 344 aa, Homo sapiens
MRRRREEEGIQLRKQKREQQLFKRRNVELINEEAAMFDSLLMDSYVSSTTGESVITREMVEMLFSDDSDLQLATTQKFRKLLSKEPSPPIDEVINTPRVVDRFVEFLKRNENCTLQAVWALGNIAGDSSVCRDYVLNCSILNPLLTLLTKSTRLTMTRNAVWALSNLCRGKNPPPEFAKVSPCLPVLSRLLFSSDSDLLADACWALSYLSDGPNEKIQAVIDSGVCRRLVELLMHNDYKVASPALRAVGNIVTGDDIQTQVILNCSALPCLLHLLSSPKESIRKEACWTISNITAGNRAQIQAVIDANIFPVLIEILQKAEFRTRKEAAWAITNATSGGTPEQI

SEQ ID NO: 6364 - protein, 193 aa, Homo sapiens; identical to SEQ ID NO: 4797

SEQ ID NO: 6365 - protein, 536 aa, Homo sapiens
METMASPGKDNYRMKSYKNNALNPEEMRRRREEEGIQLRKQKREQQLFKRRNVELINEEAAMFDSLLMDSYVSSTTGESVITREMVEMLFSDDSDLQLATTQKFRKLLSKEPSPPIDEVINTPRVVDRFVEFLKRNENCTLQFEAAWALTNIASGTSQQTKIVIEAGAVPIFIELLNSDFEDVQEQAVWALGNIAGDSSVCRDYVLNCSILNPLLTLLTKSTRLTMTRNAVWALSNLCRGKNPPPEFAKVSPCLPVLSRLLFSSDSDLLADACWALSYLSDGPNEKIQAVIDSGVCRRLVELLMHNDYKVASPALRAVGNIVTGDDIQTQVILNCSALPCLLHLLSSPKESIRKEACWTISNITAGNRAQIQAVIDANIFPVLIEILQKAEFRTRKEAAWAITNATSGGTPEQIRYLVSLGCIKPLCDLLTVMDSKIVQVALNGLENILRLGEQEGKRSGSGVNPYCGLIEEAYGLDKIEFLQSHENQEIYQKAFDLIEHYFGVEDDDSSLAPQVDETQQQFIFQQPEAPMEGFQL

SEQ ID NO: 6366 - protein, 922 aa, Homo sapiens
MITSAAGIISLLDEDEPQLKEFALHKLNAVVNDFWAEISESVDKIEVLYEDEGFRSRQFAALVASKVFYHLGAFEESLNYALGAGDLFNVNDNSEYVETIIAKCIDHYTKQCVENADLPEGEKKPIDQRLEGIVNKMFQRCLDDHKYKQAIGIALETRRLDVFEKTILESNDVPGMLAYSLKLCMSLMQNKQFRNKVLRVLVKIYMNLEKPDFINVCQCLIFLDDPQAVSDILEKLVKEDNLLMAYQICFDLYESASQQFLSSVIQNLRTVGTPIASVPGSTNTGTVPGSEKDSDSMETEEKTSSAFVGKTPEASPEPKDQTLKMIKILSGEMAIELHLQFLIRNNNTDLMILKNTKDAVRNSVCHTATVIANSFMHCGTTSDQFLRDNLEWLARATNWAKFTATASLGVIHKGHEKEALQLMATYLPKDTSPGSAYQEGGGLYALGLIHANHGGDIIDYLLNQLKNASNDIVRHGGSLGLGLAAMGTARQDVYDLLKTNLYQDDAVTGEAAGLALGLVMLGSKNAQAIEDMVGYAQETQHEKILRGLAVGIALVMYGRMEEADALIESLCRDKDPILRRSGMYTVAMAYCGSGNNKAIRRLLHVAVSDVNDDVRRAAVESLGFILFRTPEQCPSVVSLLSESYNPHVRYGAAMALGICCAGTGNKEAINLLEPMTNDPVNYVRQGALIASALIMIQQTEITCPKVNQFRQLYSKVINDKHDDVMAKFGAILAQGILDAGGHNVTISLQSRTGHTHMPSVVGVLVFTQFWFWFPLSHFLSLAYTPTCVIGLNKDLKVSTAVLSITAKAKKKEKEKEKKEEEKMEVDEAEKKEEKEKKKEPEPNFQLLDNPARVMPAQLKVLTMPETCRYQPFKPLSIGGIIILKDTSEDIEELVEPVAAHGPKIEEEEQEPEPPEPFEYIDD

SEQ ID NO: 6367 - protein, 408 aa, Homo sapiens
MPEEQAFSVLVKIMFDYGLRELFKQNFEDLHCKFYQLERLMQEYIPDLYNHFLDISLEAHMYASQWFLTLFTAKFPLYMVFHIIDLLLCEGISVIFNVALGLLKTSKDDLLLTDFEGALKFFRVQLPKRYRSEENAKKLMELACNMKISQKKLKKYEKEYHTMREQQAQQEDPIERFERENRRLQEANMRLEQENDDLAHELVTSKIALRKDLDNAEEKADALNKELLMTKQKLIDAEEEKRRLEEESAQLKEMCRRELDKAESEIKKNSSIIGDYKQICSQLSERLEKQQTANKVEIEKIRQKVDDCERCREFFNKEGRVKGISSTKEVLDEDTDEEKETLKNQLREMELELAQTKLQLVEAECKIQDLEHHLGLALNEVQAAKKTWFNRTLSSIKTATGVQGKETC

SEQ ID NO: 6368 - protein, 1069 aa, Homo sapiens
MDDKASVGKISVSSDSVSTLNSEDFVLVSRQGDETPSTNNGSDDEKTGLKIVGNGSEQQLQKELADVLMDPPMDDQPGEKELVKRSQLDGEGDGPLSNQLSASSTINPVPLVGLQKPEMSLPVKPGQGDSEASSPFTPVADEDSVVFSKLTYLGCASVNAPRSEVEALRMMSILRSQCQISLDVTLSVPNVSEGIVRLLDPQTNTEIANYPIYKILFCVRGHDGTPESDCFAFTESHYNAELFRIHVFRCEIQEAVSRILYSFATAFRRSAKQTPLSATAAPQTPDSDIFTFSVSLEIKEDDGKGYFSAVPKDKDRQCFKLRQGIDKKIVIYVQQTTNKELAIERCFGLLLSPGKDVRNSDMHLLDLESMGKSSDGKSYVITGSWNPKSPHFQVVNEETPKDKVLFMTTAVDLVITEVQEPVRFLLETKVRVCSPNERLFWPFSKRSTTENFFLKLKQIKQRERKNNTDTLYEVVCLESESERERRKTTASPSVRLPQSGSQSSVIPSPPEDDEEEDNDEPLLSGSGDVSKECAEKILETWGELLSKWHLNLNVRPKQLSSLVRNGVPEALRGEVWQLLAGCHNNDHLVEKYRILITKESPQDSAITRDINRTFPAHDYFKDTGGDGQDSLYKICKAYSVYDEEIGYCQGQSFLAAVLLLHMPEEQAFSVLVKIMFDYGLRELFKQNFEDLHCKFYQLERLMQEYIPDLYNHFLDISLEAHMYASQWFLTLFTAKFPLYMVFHIIDLLLCEGISVIFNVALGLLKTSKDDLLLTDFEGALKFFRVQLPKRYRSEENAKKLMELACNMKISQKKLKKYEKEYHTMREQQAQQEDPIERFERENRRLQEANMRLEQENDDLAHELVTSKIALRKDLDNAEEKADALNKELLMTKQKLIDAEEEKRRLEEESAQLKEMCRRELDKAESEIKKNSSIIGDYKQICSQLSERLEKQQTANKVEIEKIRQKVDDCERCREFFNKEGRVKGISSTKEVLDEDTDEEKETLKNQLREMELELAQTKLQLVEAECKIQDLEHHLGLALNEVQAAKKTWFNRTLSSIKTATGVQGKETC

SEQ ID NO: 6369 - protein, 933 aa, Homo sapiens
MQRKLVTLVNCQLVEEEGRVRAMRAARSLGERTVTELILQHQNPQQLSANLWAAVRARGCQFLGPAMQEEALKLVLLALEDGSALSRKVLVLFVVQRLEPRFPQASKTSIGHVVQLLYRASCFKVTKRDEDSSLMQLKEEFRSYEALRREHDAQIVHIAMEAGLRISPEQWSSLLYGDLAHKSHMQSIIDKLQSPESFAKSVQELTIVLQRTGDPANLNRLRPHLELLANIDPNPDAVSPTWEQLENAMVAVKTVVHGLVDFIQNYSRKGHETPQPQPNSKYKTSMCRDLRQQGGCPRGTNCTFAHSQEELEKYRLRNKKINATVRTFPLLNKVGVNNTVTTTAGNVISVIGSTETTGKIVPSTNGISNAENSVSQLISRSTDSTLRALETVKKVGKVGANGQNAAGPSADSVTENKIGSPPKTPVSNVAATSAGPSNVGTELNSVPQKSSPFLTRVPVYPPHSENIQYFQDAAQIPFEVPQYPQTGYYPPPPTVPAGVAPCVPRFVRSNNVPESSLPPASMPYADHYSTFSPRDRMNSSPYQPPPPQPYGPVPPVPSGMYAPVYDSRRIWRPPMYQRDDIIRSNSLPPMDVMHSSVYQTSLRERYNSLDGYYSVACQPPSEAATVPLPREPCGHLKTSCEEQIRRKPDQWAQYHTQKAPLVSSTLPVATQSPTPPSPLFSVDFRADFSESVSGTKFEEDHLSHYSPWSCGTIGSCINAIDSEPKDVIANSNAVLMDLDSGDVKRRVHLFETQRRTKEEDPIIPFSDGPIISKWGAISRSSRTGYHTTDPVQATASQGSATKPISVSDYVPYVNAVDSRWSSYGNEATSSAHYVERDRFIVTDLSGHRKHSSTGDLLSLELQQAKSNSLLLQREANALAMQQKWNSLDEGRHLTLNLLSKEIELRNGEVKKLNLSASCLMYLFSAAASWLYHY

SEQ ID NO: 6370 - protein, 478 aa, Homo sapiens
MPVQAAQWTEFLSCPICYNEFDENVHKPISLGCSHTVCKTCLNKLHRKACPFDQTAINTDIDVLPVNFALLQLVGAQVPDHQSIKLSNLGENKHYEVAKKCVEDLALYLKPLSGGKGVASLNQSALSRPMQRKLVTLVNCQLVEEEGRVRAMRAARSLGERTVTELILQHQNPQQLSANLWAAVRARGCQFLGPAMQEEALKLVLLALEDGSALSRKVLVLFVVQRLEPRFPQASKTSIGHVVQLLYRASCFKVTKRDEDSSLMQLKEEFRSYEALRREHDAQIVHIAMEAGLRISPEQWSSLLYGDLAHKSHMQSIIDKLQSPESFAKSVQELTIVLQRTGDPANLNRLRPHLELLANIDPNPDAVSPTWEQLENAMVAVKTVVHGLVDFIQNYSRKGHETPQPQPNSKYKTSMCRDLRQQGGCPRGTNCTFAHSQEELEKYRLRNKKINATEVLKQQGKLFQVQTEFQMQKTVFPS

SEQ ID NO: 6371 - protein, 1189 aa, Homo sapiens; identical to SEQ ID NO: 5924

SEQ ID NO: 6372 - protein, 522 aa, Homo sapiens
MAASAKRKQEEKHLKMLRDMTGLPHNRKCFDCDQRGPTYVNMTVGSFVCTSCSGSLRGLNPPHRVKSISMTTFTQQEIEFLQKHGNEVCKQIWLGLFDDRSSAIPDFRDPQKVKEFLQEKYEKKRWYVPPEQAKVVASVHASISGSSASSTSSTPEVKPLKSLLGDSAPTLHLNKGTPSQSPVVGRSQGQQQEKKQFDLLSDLGSDIFAAPAPQSTATANFANFAHFNSHAGGSAASVNANFAHFDNFPKSSSADFGTFNTSQSHQTASAVSKVSTNKAGLQTADKYAALANLDNIFSAGQGGDQGSGFGTTGKAPVGSVVSVPSQSSASSDKYAALAELDSVFSSAATSSNAYTSTSNASSNVFGTVPVVASAQTQPASSSVPAPFGATPSTNPFVAAAGPSVASSTNPFQTNARGATAATFGTASMSMPTGFGTPAPYSLPTSFSGSFQQPAFPAQAAFPQQTAFSQQPNGAGFAAFGQTKPVVTPFGQVAAAGVSSNPFMTGAPTGQFPTGSSSTNPFL

SEQ ID NO: 6373 - protein, 507 aa, Homo sapiens
MQDDSIEASTSISQLLRESYLAETRHRGNNERSRAEPSSNPCHFGSPSGAAEGGGGQDDLPDLSAFLSQEELDESVNLARLAINYDPLEKADETQARKRLSPDQMKHSPNLSFEPNFCQDNPRSPTSSKESPQEAKRPQYCSETQSKKVFLNKAADFIEELSSLFKSHSSKRIRPRACKNHKSKLESQNKVMQENSSSFSDLSERRERSSVPIPIPADTRDNEVNHALEQQEAKRREAEQAASEAAGGDTTPGSSPSSLYYEEPLGQPPRFTQKLRSREVPEGTRVQLDCIVVGIPPPQVRWYCEGKELENSPDIHIVQAGNLHSLTIAEAFEEDTGRYSCFASNIYGTDSTSAEIYIEGVSSSDSEGDPNKEEMNRIQKPNEVSSPPTTSAVIPPAVPQAQHLVAQPRVATIQQCQSPTNYLQGLDGKPIIAAPVFTKMLQNLSASEGQLVVFECRVKGAPSPKVEWYREGTLIEDSPDFRILQKKPRSMAEPGKDDFNFNLLVYE

SEQ ID NO: 6374 - protein, 1049 aa, Homo sapiens
MLCWGNASFGQLGLGGIDEEIVLEPRKSDFFINKRVRDVGCGLRHTVFVLDDGTVYTCGCNDLGQLGHEKSRKKPEQVVALDAQNIVAVSCGEAHTLALNDKGQVYAWGLDSDGQLGLVGSEECIRVPRNIKSLSDIQIVQVACGYYHSLALSKASEVFCWGQNKYGQLGLGTDCKKQTSPQLLKSLLGIPFMQVAAGGAHSFVLTLSGAIFGWGRNKFGQLGLNDENDRYVPNLLKSLRSQKIVYICCGEDHTAALTKEGGVFTFGAGGYGQLGHNSTSHEINPRKVFELMGSIVTEIACGRQHTSAFVPSSGRIYSFGLGGNGQLGTGSTSNRKSPFTVKGNWYPYNGQCLPDIDSEEYFCVKRIFSGGDQSFSHYSSPQNCGPPDDFRCPNPTKQIWTVNEALIQKWLSYPSGRFPVEIANEIDGTFSSSGCLNGSFLAVSNDDHYRTGTRFSGVDMNAARLLFHKLIQPDHPQISQQVAASLEKNLIPKLTSSLPDVEALRFYLTLPECPLMSDSNNFTTIAIPFGTALVNLEKAPLKVLENWWSVLEPPLFLKIVELFKEVVVHLLKLYKIGIPPSERRIFNSFLHTALKVLEILHRVNEKMGQIIQYDKFYIHEVQELIDIRNDYINWVQQQAYGMLADIPVTICTYPFVFDAQAKTTLLQTDAVLQMQMAIDQAHRQNVSSLFLPVIESVNPCLILVVRRENIVGDAMEVLRKTKNIDYKKPLKVIFVGEDAVDAGGVRKEFFLLIMRELLDPKYGMFRYYEDSRLIWFSDKTFEDSDLFHLIGVICGLAIYNCTIVDLHFPLALYKKLLKKKPSLDDLKELMPDVGRSMQQLLDYPEDDIEETFCLNFTITVENFGATEVKELVLNGADTAVNKQNRQEFVDAYVDYIFNKSVASLFDAFHAGFHKVCGGKVLLLFQPNELQAMVIGNTNYDWKELEKNTEYKGEYWAEHPTIKIFWEVFHELPLEKKKQFLLFLTGSDRIPILGMKSLKLVIQSTGGGEEYLPVSHTCFNLLDLPKYTEKETLRSKLIQAIDHNEGFSLI

SEQ ID NO: 6375 - protein, 241 aa, Homo sapiens; identical to SEQ ID NO: 5765

SEQ ID NO: 6376 - protein, 289 aa, Homo sapiens
MIINWNQVSVLWKCLLKQSASYQDRRQSWRRASMKETNRRKSLHPIHQGITELSRSISVDLAESKRLGCLLLSSFQFSIQKLEPFLRDTKGFSLESFRAKASSLSEELKHFADGLETDGTLQKCFEDSNGKASDFSLEASVAEMKEYITKFSLERQTWDQLLLHYQQEAKEILSRGSTEAKITEVKVEPMTYLGSSQNEVLNTKPDYQKILQNQSKVFDCMELVMDELQGSVKQLQAFMDESTQCFQKVSVQLGKRSMQQLDPSPARKLLKLQLQNPPAIHGSGSGSCQ

SEQ ID NO: 6377 - protein, 249 aa, Homo sapiens
MTSVTRSEIIDELSRSISVDLAESKRLGCLLLSSFQFSIQKLEPFLRDTKGFSLESFRAKASSLSEELKHFADGLETDGTLQKCFEDSNGKASDFSLEASVAEMKEYITKFSLERQTWDQLLLHYQQEAKEILSRGSTEAKITEVKVEPMTYLGSSQNEVLNTKPDYQKILQNQSKVFDCMELVMDELQGSVKQLQAFMDESTQCFQKVSVQLGKRSMQQLDPSPARKLLKLQLQNPPAIHGSGSGSCQ

SEQ ID NO: 6378 - protein, 284 aa, Homo sapiens
MTSVTRSEIIDEQSASYQDRRQSWRRASMKETNRRKSLHPIHQGITELSRSISVDLAESKRLGCLLLSSFQFSIQKLEPFLRDTKGFSLESFRAKASSLSEELKHFADGLETDGTLQKCFEDSNGKASDFSLEASVAEMKEYITKFSLERQTWDQLLLHYQQEAKEILSRGSTEAKITEVKVEPMTYLGSSQNEVLNTKPDYQKILQNQSKVFDCMELVMDELQGSVKQLQAFMDESTQCFQKVSVQLGKRSMQQLDPSPARKLLKLQLQNPPAIHGSGSGSCQ

SEQ ID NO: 6379 - protein, 356 aa, Homo sapiens
MTSVTRSEIIDEKGPVMSKTHDHQLESSLSPVEVFAKTSASLEMNQGVSEERIHLGSSPKKGGNCDLSHQERLQSKSLHLSPQEQSASYQDRRQSWRRASMKETNRRKSLHPIHQGITELSRSISVDLAESKRLGCLLLSSFQFSIQKLEPFLRDTKGFSLESFRAKASSLSEELKHFADGLETDGTLQKCFEDSNGKASDFSLEASVAEMKEYITKFSLERQTWDQLLLHYQQEAKEILSRGSTEAKITEVKVEPMTYLGSSQNEVLNTKPDYQKILQNQSKVFDCMELVMDELQGSVKQLQAFMDESTQCFQKVSVQLGKRSMQQLDPSPARKLLKLQLQNPPAIHGSGSGSCQ

SEQ ID NO: 6380 - protein, 356 aa, Homo sapiens; identical to SEQ ID NO: 6379

SEQ ID NO: 6381 - protein, 538 aa, Homo sapiens
MAAAASVTGRVTWAASPMRSLGLGRRLSLPGPRLDAVTAAVNPSLSDHGNGLGRGTRGSGCSGGSLVADWGGGAAAAAAVALALAPALSTMRRGSSESELAARWEAEAVAAAKAAAKAEAEATAETVAEQVRVDAGAAGEPECKAGEEQPKVLAPAPAQPSAAEEGNTQVLQRPPPTLPPSKPKPVQGLCPHGKPRDKGRSCKRSSGHGSGENGSQRPVTVDSSKARTSLDALKISIRQLKWKEFPFGRRLPCDIYWHGVSFHDNDIFSGQVNKFPGMTEMVRKITLSRAVRTMQNLFPEEYNFYPRSWILPDEFQLFVAQVQMVKDDDPSWKPTFIVKPDGGCQGDGIYLIKDPSDIRLAGTLQSRPAVVQEYICKPLLIDKLKFDIRLYVLLKSLDPLEIYIAKDGLSRFCTEPYQEPTPKNLHRIFMHLTNYSLNIHSGNFIHSDSASTGSKRTFSSILCRLSSKGVDIKKVWSDIISVVIKTVIALTPELKVFYQSDIPTGRPGPTCFQVTIASSQPAFPALTGLKRALWLRVG

SEQ ID NO: 6382 - protein, 450 aa, Homo sapiens
MTEMVRKITLSRAVRTMQNLFPEEYICKPLLIDKLKFDIRLYVLLKSLDPLEIYIAKDGLSRFCTEPYQEPTPKNLHRIFMHLTNYSLNIHSGNFIHSDSASTGSKRTFSSILCRLSSKGVDIKKVWSDIISVVIKTVIALTPELKVFYQSDIPTGRPGPTCFQILGFDILLMKNLKPILLEVNANPSMRIEHEHELSPGVFENVPSLVDEEVKVAVIRDTLRLMDPLKKKRENQSQQLEKPFAGKEDALDGELTSAPDCNANPEAHLPSICLKQVFPKYAKQFNYLRLVDRMANLFIRFLGIKGTMKLGPTGFRTFIRSCKLSSSSLSMAAVDILYIDITRRWNSMTLDQRDSGMCLQAFVEAFFFLAQRKFKMLPLHEQVASLIDLCEYHLSLLDEKRLVCGRGVPSGGRPPHRGPPQEPSPSAQPAGDNPPAASCANKLSHPRHTLS

SEQ ID NO: 6383 - protein, 547 aa, Homo sapiens
MKVVKSAEHYTETALDEIRLLKSVRNSDPNDPNREMVVQLLDDFKISGVNGTHICMVFEVLGHHLLKWIIKSNYQGLPLPCVKKIIQQVLQGLDYLHTKCRIIHTDIKPENILLSVNEQYIRRLAAEATEWQRSGAPPPSGSAVSTAPQPKPADKMSKNKKKKLKKKQKRQAELLEKRMQEIEEMEKESGPGQKRPNKQEESESPVERPLKENPPNKMTQEKLEESSTIGQDQTLMERDTEGGAAEINCNGVIEVINYTQNSNNETLRHKEDLHNANDCDVQNLNQESSFLSSQNGDSSTSQETDSCTPITSEVSDTMVCQSSSTVGQSFSEQHISQLQESIRAEIPCEDEQEQEHNGPLDNKGKSTAGNFLVNPLEPKNAEKLKVKIADLGNACWHKHFTEDIQTRQYRSLEVLIGSGYNTPADIWSTACMAFELATGDYLFEPHSGEEYTRDEDHIVHIIELIGRIPRRFSLSGKYSQDFFSHRGDLKHITKLKPWGLFEVLVEKYEWSQEEAAGFTDFLLPMLELIPEKRATAAECLRHPWLNS

SEQ ID NO: 6384 - protein, 655 aa, Homo sapiens
MERKVLALQARKKRTKAKKDKAQRKSETQHRGSAPHSESDLPEQEEEILGSDDDEQEDPNDYCKGGYHLVKIGDLFNGRYHVIRKLGWGHFSTVWLSWDIQGKKFVAMKVVKSAEHYTETALDEIRLLKSVRNSDPNDPNREMVVQLLDDFKISGVNGTHICMVFEVLGHHLLKWIIKSNYQGLPLPCVKKIIQQVLQGLDYLHTKCRIIHTDIKPENILLSVNEQYIRRLAAEATEWQRSGAPPPSGSAVSTAPQPKPADKMSKNKKKKLKKKQKRQAELLEKRMQEIEEMEKESGPGQKRPNKQEESESPVERPLKENPPNKMTQEKLEESSTIGQDQTLMERDTEGGAAEINCNGVIEVINYTQNSNNETLRHKEDLHNANDCDVQNLNQESSFLSSQNGDSSTSQETDSCTPITSEVSDTMVCQSSSTVGQSFSEQHISQLQESIRAEIPCEDEQEQEHNGPLDNKGKSTAGNFLVNPLEPKNAEKLKVKIADLGNACWVHKHFTEDIQTRQYRSLEVLIGSGYNTPADIWSTACMAFELATGDYLFEPHSGEEYTRDEDHIALIIELLGKVPRKLIVAGKYSKEFFTKKGDLKHITKLKPWGLFEVLVEKYEWSQEEAAGFTDFLLPMLELIPEKRATAAECLRHPWLNS

SEQ ID NO: 6385 - protein, 287 aa, Homo sapiens
MAASLWMGDLEPYMDENFISRAFATMGETVMSVKIIRNRLTGIPAGYCFVEFADLATAEKCLHKINGKPLPGATPAKRFKLNYATYGKQPDNSPEYSLFVGDLTPDVDDGMLYEFFVKVYPSCRGGKVVLDQTGVSKGYGFVKFTDELEQKRALTECQGAVGLGSKPVRLSVAIPKASRVKPVEYSQMYSYSYNQYYQQYQNYYAQWGYDQNTGSYSYSYPQYGYTQSTMQTYEEVGDDALEDPMPQLDVTEANKEFMEQSEELYDALMDCHWQPLDTVSSEIPAMM

SEQ ID NO: 6386 - protein, 145 aa, Homo sapiens
MAERNEDHHLQVLKESEVLLQAKRAELEKLKSQVTSQQQEMAVLDRQLGHKKEELHLLQGSMVQAKADLQEALRLGETEVTEKCNHIREVKSLLEELSFQKGELNVQISERKTQLTLIKQEIEKEEENLQVVLRQMSKHKTAFLQ

SEQ ID NO: 6387 - protein, 1007 aa, Homo sapiens
MQHLKSKKREERWMRASKRQSEKEMEELHHNIDDLLQEKKSLECEVEELHRTVQKRQQQKDFIDGNVESLMTELEIEKSLKHHEDIVDEIECIEKTLLKRRSELREADRLLAEAESELSCTKEKVCLLVVWGVSSVWTKNAVEKFTDAKRSLLQTESDAEELERRAQETAVNLVKADQQLRSLQADAKDLEQHKIKQEEILKEINKIVAAKDSDFQCLSKKKEKLTEELQKLQKDIEMAERNEDHHLQVLKESEVLLQAKRAELEKLKSQVTSQQQEMAVLDRQLGHKKEELHLLQGSMVQAKADLQEALRLGETEVTEKCNHIREVKSLLEELSFQKGELNVQISERKTQLTLIKQEIEKEEENLQVVLRQMSKHKTELKNILDMLQLENHELQGLKLQHDQRVSELEKTQVAVLEEKLELENLQQISQQQKGEIEWQKQLLERDKREIERMTAESRALQSCVECLSKEKEDLQEKCDIWEKKLAQTKRVLAAAEENSKMEQSNLEKLELNVRKLQQELDQLNRDKLSLHNDISAMQQQLQEKREAVNSLQEELANVQDHLNLAKQDLLHTTKHQDVLLSEQTRLQKDISEWANRFEDCQKEEETKQQQLQVLQNEIEENKLKLVQQEMMFQRLQKERESEESKLETSKVTLKEQQHQLEKELTDQKSKLDQVLSKVLAAEERVRTLQEEERWCESLEKTLSQTKRQLSEREQQLVEKSGELLALQKEADSMRADFSLLRNQFLTERKKAEKQVASLKEALKIQRSQLEKNLLEQKQENSCIQKEMATIELVAQDNHERARRLMKELNQMQYEYTELKKQMANQKDLERRQMEISDAMRTLKSEVKDEIRTSLKNLNQFLPELPADLEAILERNENLEGELESLKENLPFTMNEGPFEEKLNFSQVHIMDEHWRGEALREKLRHREDRLKAQLRHCMSKQAEVLIKGKRQTEGTLHSLRRQVDALGELVTSTSADSASSPSLSQLESSLTEDSQLGQNQEKNASAR

SEQ ID NO: 6388 - protein, 994 aa, Homo sapiens
MKAQKSGKEQQLDIMNKQYQQLESRLDEILSRIAKETEEIKDLEEQLTEGQIAANEALKKDLEGVISGLQEYLGTIKGQATQAQNECRKLRDEKETLLQRLTEVEQERDQLEIVAMDAENMRKELAELESALQEQHEVNASLQQTQGDLSAYEAELEARLNLRDAEANQLKEELEKVTRLTQLEQSALQAELEKERQALKNALGKAQFSEEKEQENSELHAKLKHLQDDNNLLKQQLKDFQNHLNHVVDGLVRPEEVAARVDELRRKLKLGTGEMNIHSPSDVLGKSLADLQKQFSEILARSKWERDEAQVRERKLQEEMALQQEKLATGQEEFRQACERALEARMNFDKRQHEARIQQMENEIHYLQENLKSMEEIQGLTDLQLQEADEEKERILAQLRELEKKKKLEDAKSQEQVFGLDKELKKLKKAVATSDKLATAELTIAKDQLKSLHGTVMKINQERAEELQEAERFSRKAAQAARDLTRAEAEIELLQNLLRQKGEQFRLEMEKTGVGTGANSQVLEIEKLNETMERQRTEIARLQNVLDLTGSDNKGGFENVLEEIAELRREVSYQNDYISSMADPFKRRGYWYFMPPPPSSKVSSHSSQATKDSGVGLKYSASTPVRKPRPGQQDGKEGSQPPPASGYWVYSPIRSGLHKLFPSRDADSGGDSQEESELDDQEEPPFVPPPGYMMYTVLPDGSPVPQGMALYAPPPPLPNNSRPLTPGTVVYGPPPAGAPMVYGPPPPNFSIPFIPMGVLHCNVPEHHNLENEVSRLEDIMQHLKSKKREERWMRASKRQSEKEMEELHHNIDDLLQEKKSLECEVEELHRTVQKRQQQKDFIDGNVESLMTELEIEKSLKHHEDIVDEIECIEKTLLKRRSELREADRLLAEAESELSCTKEKTKNAVEKFTDAKRSLLQTESDAEELERRAQETAVNLVKADQQLRSLQADAKDLEQHKIKQEEILKEINKIVAAKDSDFQCLSKKKEKLTEE

SEQ ID NO: 6389 - protein, 1775 aa, Homo sapiens
MKAQKSGKEQQLDIMNKQYQQLESRLDEILSRIAKETEEIKDLEEQLTEGQIAANEALKKDLEGVISGLQEYLGTIKGQATQAQNECRKLRDEKETLLQRLTEVEQERDQLEIVAMDAENMRKELAELESALQEQHEVNASLQQTQGDLSAYEAELEARLNLRDAEANQLKEELEKVTRLTQLEQSALQAELEKERQALKNALGKAQFSEEKEQENSELHAKLKHLQDDNNLLKQQLKDFQNHLNHVVDGLVRPEEVAARVDELRRKLKLGTGEMNIHSPSDVLGKSLADLQKQFSEILARSKWERDEAQVRERKLQEEMALQQEKLATGQEEFRQACERALEARMNFDKRQHEARIQQMENEIHYLQENLKSMEEIQGLTDLQLQEADEEKERILAQLRELEKKKKLEDAKSQEQVFGLDKELKKLKKAVATSDKLATAELTIAKDQLKSLHGTVMKINQERAEELQEAERFSRKAAQAARDLTRAEAEIELLQNLLRQKGEQFRLEMEKTGVGTGANSQVLEIEKLNETMERQRTEIARLQNVLDLTGSDNKGGFENVLEEIAELRREVSYQNDYISSMADPFKRRGYWYFMPPPPSSKVSSHSSQATKDSGVGLKYSASTPVRKPRPGQQDGKEGSQPPPASGYWVYSPIRSGLHKLFPSRDADSGGDSQEESELDDQEEPPFVPPPGYMMYTVLPDGSPVPQGMALYAPPPPLPNNSRPLTPGTVVYGPPPAGAPMVYGPPPPNFSIPFIPMGVLHCNVPEHHNLENEVSRLEDIMQHLKSKKREERWMRASKRQSEKEMEELHHNIDDLLQEKKSLECEVEELHRTVQKRQQQKDFIDGNVESLMTELEIEKSLKHHEDIVDEIECIEKTLLKRRSELREADRLLAEAESELSCTKEKTKNAVEKFTDAKRSLLQTESDAEELERRAQETAVNLVKADQQLRSLQADAKDLEQHKIKQEEILKEINKIVAAKDSDFQCLSKKKEKLTEELQKLQKDIEMAERNEDHHLQVLKESEVLLQAKRAELEKLKSQVTSQQQEMAVLDRQLGHKKEELHLLQGSMVQAKADLQEALRLGETEVTEKCNHIREVKSLLEELSFQKGELNVQISERKTQLTLIKQEIEKEEENLQVVLRQMSKHKTELKNILDMLQLENHELQGLKLQHDQRVSELEKTQVAVLEEKLELENLQQISQQQKGEIEWQKQLLERDKREIERMTAESRALQSCVECLSKEKEDLQEKCDIWEKKLAQTKRVLAAAEENSKMEQSNLEKLELNVARGSLQQELDQLNRDKLSLHNDISAMQQQLQEKREAVNSLQEELANVQDHLNLAKQDLLHTTKHQDVLLSEQTRLQKDISEWANRFEDCQKEEETKQQQLQVLQNEIEENKLKLVQQEMMFQRLQKERESEESKLETSKVTLKEQQHQLEKELTDQKSKLDQVLSKVLAAEERVRTLQEEERWCESLEKTLSQTKRQLSEREQQLVEKSGELLALQKEADSMRADFSLLRNQFLTERKKAEKQVASLKEALKIQRSQLEKNLLEQKQENSCIQKEMATIELVAQDNHERARRLMKELNQMQYEYTELKKQMANQKDLERRQMEISDAMRTLKSEVKDEIRTSLKNLNQFLPELPADLEAILERNENLEGELESLKENLPFTMNEGPFEEKLNFSQVHIMDEHWRGEALREKLRHREDRLKAQLRHCMSKQAEVLIKGKRQTEGTLHSLRRQVDALGELVTSTSADSASSPSLSQLESSLTEDSQLGQNQEKNASAR

SEQ ID NO: 6390 - protein, 828 aa, Homo sapiens
MEKQKQEIAGKQKEIKDLQIAIDSLDSKDPKHSHMKAQKSGKEQQLDIMNKQYQQLESRLDEILSRIAKETEEIKDLEEQLTEGQIAANEALKKDLEGVISGLQEYLGTIKGQATQAQNECRKLRDEKETLLQRLTEVEQERDQLEIVAMDAENMRKELAELESALQEQHEVNASLQQTQGDLSAYEAELEARLNLRDAEANQLKEELEKVTRLTQLEQSALQAELEKERQALKNALGKAQFSEEKEQENSELHAKLKHLQDDNNLLKQQLKDFQNHLNHVVDGLVRPEEVAARVDELRRKLKLGTGEMNIHSPSDVLGKSLADLQKQFSEILARSKWERDEAQVRERKLQEEMALQQEKLATGQEEFRQACERALEARMNFDKRQHEARIQQMENEIHYLQENLKSMEEIQGLTDLQLQEADEEKERILAQLRELEKKKKLEDAKSQEQVFGLDKELKKLKKAVATSDKLATAELTIAKDQLKSLHGTVMKINQERAEELQEAERFSRKAAQAARDLTRAEAEIELLQNLLRQKGEQFRLEMEKTGVGTGANSQVLEIEKLNETMERQRTEIARLQNVLDLTGSDNKGGFENVLEEIAELRREVSYQNDYISSMADPFKRRGYWYFMPPPPSSKVSSHSSQATKDSGVGLKYSASTPVRKPRPGQQDGKEGSQPPPASGYWVYSPIRSGLHKLFPSRDADSGGDSQEESELDDQEEPPFVPPPGYMMYTVLPDGSPVPQGMALYAPPPPLPNNSRPLTPGTVVYGPPPAGAPMVYGPPPPNFSIPFIPMGVLHCNVPEHHNLVSGKTYNSLSTLLPWVTDKVIYLMS

SEQ ID NO: 6391 - protein, 2325 aa, Homo sapiens; identical to SEQ ID NO: 4770

SEQ ID NO: 6392 - protein, 452 aa, Homo sapiens
MKKGSQQKIFSKAKIPSSSHSPIPSSMSNMRSRSLSPLIGSETLPFHSGGQWCEQVEIADENNMLLDYQDHKGADSHAGVRYITEALIKKLTKQDNLALIKSLNLSLSKDGGKKFKYIENLEKCVKLEVLNLSYNLIGKIEKLDKLLKLRELNLSYNKISKIEGIENMCNLQKLNLAGNEIEHIPVWLGKKLKSLRVLNLKGNKISSLQDISKLKPLQDLISLILVENPVVTLPHYLQFTIFHLRSLESLEGQPVTTQDRQEAFERFSLEEVERLERDLEKKMIETEELKSKQTRFLEEIKNQDKLNKSLKEEAMLQKQSCEELKSDLNTKNELLKQKTIELTRACQKQYELEQELAFYKIDAKFEPLNYYPSEYAEIDKAPDESPYIGKSRYKRNMFATESYIIDSAQAVQIKKMEPDEQLRNDHMNLRGHTPLDTQLEDHKLDYQNCMMK

SEQ ID NO: 6393 - protein, 349 aa, Homo sapiens
MCCDSDFVARNKSQDSGIAEMEELPVPHNIKISNITCDSFKISWEMDSKSKDRITHYFIDLNKKENKNSNKFKHKDVPTKLVAKAVPLPMTVRGHWFLSAAEYTVAVQTASKQVDGDYVVSEWSEIIEFCTADYSKVHLTQLLEKAEVIAGRMLKFSVFYRNQHKEYFDYVREHHGNAMQPSVKDNSGSHGSPISGKLEGIFFSCSTEFNTGKPPQDSPYGRYRFEIAAEKLFNPNTNLYFGDFYCMYTAYHYVILVIAPVGSPGDEFCKQRLPQLNSKDNKFLTCTEEDGVLVYHHAQDVILEVIYTDPVDLSVGTVAEITGHQLMSLSTANAKKDPSCKTCNISVGR

SEQ ID NO: 6394 - protein, 375 aa, Homo sapiens
MEVPRLDHALNSPTSPCEEVIKNLSLEAIQLCDRDGNKSQDSGIAEMEELPVPHNIKISNITCDSFKISWEMDSKSKDRITHYFIDLNKKENKNSNKFKHKDVPTKLVAKAVPLPMTVRGHWFLSAAEYTVAVQTASKQVDGDYVVSEWSEIIEFCTADYSKVHLTQLLEKAEVIAGRMLKFSVFYRNQHKEYFDYVREHHGNAMQPSVKDNSGSHGSPISGKLEGIFFSCSTEFNTGKPPQDSPYGRYRFEIAAEKLFNPNTNLYFGDFYCMYTAYHYVILVIAPVGSPGDEFCKQRLPQLNSKDNKFLTCTEEDGVLVYHHAQDVILEVIYTDPVDLSVGTVAEITGHQLMSLSTANAKKDPSCKTCNISVGR

SEQ ID NO: 6395 - protein, 420 aa, Homo sapiens; identical to SEQ ID NO: 5350

SEQ ID NO: 6396 - protein, 136 aa, Homo sapiens
DPLSWLSGPWGQVPAGICPPRHRGWYHFRDQILAGSPEAFFVLNADVCSDFPLSAMLEAHRRQRHPFLLLGTTANRTQSLNYGCIVENPQTHEVLHYVEKPSTFISDIINCGIYLFSPEALKPLRDVFQRNQQDGQ

SEQ ID NO: 6397 - protein, 454 aa, Homo sapiens
MERKDFETWLDNISVTFLSLTDLQKNETLDHLISLSGAVQLRHLSNNLETLLKRDFLKLLPLELSFYLLKWLDPQTLLTCCLVSKQWNKVISACTEVWQTACKNLGWQIDDSVQDALHWKKVYLKAILRMKQLEDHEAFETSSLIGHSARVYALYYKDGLLCTGSDDLSAKLWDVSTGQCVYGIQTHTCAAVKFDEQKLVTGSFDNTVACWEWSSGARTQHFRGHTGAVFSVDYNDELDILVSGSADFTVKVWALSAGTCLNTLTGHTEWVTKVVLQKCKVKSLLHSPGDYILLSADKYEIKIWPIGREINCKCLKTLSVSEDRSICLQPRLHFDGKYIVCSSALGLYQWDFASYDILRVIKTPEIANLALLGFGDIFALLFDNRYLYIMDLRTESLISRWPLPEYRKSKRGSSFLAGEASWLNGLDGHNDTGLVFATSMPDHSIHLVLWKEHG

SEQ ID NO: 6398 - protein, 123 aa, Homo sapiens
MEAAETEAEAAALEVLAEVAGILEPVGLQEEAELPAKILVEFVVDSQKKDKLLCSQLQVADFLQNILAQERPWCVLQGCWSTTCWRCKFAMTSWRTAAWRKILEKASDFPHLPTIITGKTVNS

SEQ ID NO: 6399 - protein, 277 aa, Homo sapiens
MEAAETEAEAAALEVLAEVAGILEPVGLQEEAELPAKILVEFVVDSQKKDKLLCSQLQVADFLQNILAQEDTAKGLDPLASEDTSRQKAIAAKEQWKELKATYREHVEAIKIGLTKALTQMEEAQRKRTQLREAFEQLQAKKQMAMEKRRAVQNQWQLQQEKHLQHLAEVSAEVRERKTGTQQELDRVFQKLGNLKQQAEQERDKLQRYQTFLQLLYTLQGKLLFPEAEAEAENLPDDKPQQPTRPQEQSTGDTMGRDPGVSFKAVGLQPAGDVNLP

SEQ ID NO: 6400 - protein, 570 aa, Homo sapiens
MSSIGEGIDFSQERQKISGLRTLEQSVGEWLESIGLQQYESKLLLNGFDDVHFLGSNVMEEQDLRDIGISDPQHRRKLLQAARSLPKVKALGYDGNSPPSVPSWLDSLGLQDYVHSFLSSGYSSIDTVKNLWELELVNVLKVQLLGHRKRIIASLADRPYEEPPQKPPRFSQLRCQDLLSQTSSPLSQNDSCTGRSADLLLPPGDTGRRRHDSLHDPAAPSRAERFRIQEEHREAKLTLRPPSLAAPYAPVQSWQHQPEKLIFESCGYEANYLGSMLIKDLRGTESTQDACAKMRKSTEHMKKIPTIILSITYKGVKFIDASNKNVIAEHEIRNISCAAQDPEDLCTFAYITKDLQTSHHYCHVFSTVDVNLTYEIILTLGQAFEVAYQLALQAQKSRATGASAAEMIETKSSKPVPKPRVGVRKSAVPLPPDSRCCYCHTCTTHRPSYLPLPSVSPGVKLEPPDMDQDAQSHASVSWVVDPKPDSKRSLSTNHTRLELVCCSQPENELVSTISGDKPKSFLEPLLFVMPTTAYNHNCPEWRSQKDGGCSTSECPHHLCLEKPGVLSLEM

SEQ ID NO: 6401 - protein, 594 aa, Homo sapiens; identical to SEQ ID NO: 5068

SEQ ID NO: 6402 - protein, 594 aa, Homo sapiens
MEAVCLGTCPEPEASMSTAIPGLKKGNNALQSIILQTLLEKENGQRKYGGPPPGWDAAPPERGCEIFIGKLPRDLFEDELIPLCEKIGKIYEMRMMMDFNGNNRGYAFVTFSNKVEAKNAIKQLNNYEIRNGRLLGVCASVDNCRLFVGGIPKTKKREEILSEMKKVTEGVVDVIVYPSAADKTKNRGFAFVEYESHRAAAMARRKLLPGRIQLWGHGIAVDWAEPEVEVDEDTMSSVKILYVRNLMLSTSEEMIEKEFNNIKPGAVERVKKIRDYAFVHFSNREDAVEAMKALNGKVLDGSPIEVTLAKPVDKDSYVRYTRGTGGRGTMLQGEYTYSLGQVYDPTTTYLGAPVFYAPQTYAAIPSLHFPATKGHLSNRAIIRAPSVRGAAGVRGLGGRGYLAYTGLGRGYQVKGDKREDKLYDILPGMELTPMNPVTLKPQGIKLAPQILEEICQKNNWGQPVYQLHSAIGQDQRQLFLYKITIPALASQNPAIHPFTPPKLSAFVDEAKTYAAEYTLQTLGIPTDGGDGTMATAAAAATAFPGYAVPNATAPVSAAQLKQAVTLGQDLAAYTTYEVYPTFAVTARGDGYGTF

SEQ ID NO: 6403 - protein, 586 aa, Homo sapiens
MESNHKSGDGLSGTQKEAALRALVQRTGYSLVQENGQRKYGGPPPGWDAAPPERGCEIFIGKLPRDLFEDELIPLCEKIGKIYEMRMMMDFNGNNRGYAFVTFSNKVEAKNAIKQLNNYEIRNGRLLGVCASVDNCRLFVGGIPKTKKREEILSEMKKVTEGVVDVIVYPSAADKTKNRGFAFVEYESHRAAAMARRKLLPGRIQLWGHGIAVDWAEPEVEVDEDTMSSVKILYVRNLMLSTSEEMIEKEFNNIKPGAVERVKKIRDYAFVHFSNREDAVEAMKALNGKVLDGSPIEVTLAKPVDKDSYVRYTRGTGGRGTMLQGEYTYSLGQVYDPTTTYLGAPVFYAPQTYAAIPSLHFPATKGHLSNRAIIRAPSVRGAAGVRGLGGRGYLAYTGLGRGYQVKGDKREDKLYDILPGMELTPMNPVTLKPQGIKLAPQILEEICQKNNWGQPVYQLHSAIGQDQRQLFLYKITIPALASQNPAIHPFTPPKLSAFVDEAKTYAAEYTLQTLGIPTDGGDGTMATAAAAATAFPGYAVPNATAPVSAAQLKQAVTLGQDLAAYTTYEVYPTFAVTARGDGYGTF

SEQ ID NO: 6404 - protein, 586 aa, Homo sapiens; identical to SEQ ID NO: 6403

SEQ ID NO: 6405 - protein, 513 aa, Homo sapiens
MQRTFAWLLDRVQHLGAPVTLRASYLEIYNEQVRDLLSLGSPRPLPVRWNKTRGFYVEQLRVVEFGSLEALMELLQTGLSRRRNSAHTLNQASSRSHALLTLYISRQTAQQMPSVDPGEPPVGGKLCFVDLAGSEKVAATGSRGELMLEANSINRSLLALGHCISLLLDPQRKQSHIPFRDSKLTKLLADSLGGRGVTLMVACVSPSAQCLPETLSTLRYASRAQRVTTRPQAPKSPVAKQPQRLETEMLQLQEENRRLQFQLDQMDCKASGLSGARVAWAQRNLYGMLQEFMLENERLRKEKSQLQNSRDLAQNEQRILAQQVHALERRLLSACYHHQQGPGLTPPCPCLMAPAPPCHALPPLYSCPCCHICPLCRVPLAHWACLPGEHHLPQVLDPEASGGRPPSARPPPWAPPCSPGSAKCPRERSHSDWTQTRVLAEMLTEEEVVPSAPPLPVRPPKTSPGLRGGAGVPNLAQRLEALRDQIGSSLRRGRSQPPCSEGARSPGQVLPPH

SEQ ID NO: 6406 - protein, 261 aa, Homo sapiens
MVKGEKGPKGKKITLKVARNCIKITFDGKKRLDLSKMGITTFPKCILRLSDMDELDLSRNLIRKIPDSISKFQNLRWLDLHSNYIDKLPESIGQMTSLLYLNVSNNRLTSNGLPVELKQLKNIRAVNLGLNHLDSVPTTLGALKELHEVGLHDNLLNNIPVSISKLPKLKKLNIKRNPFPKPGESEIFIDSIRRLENLYVVEEKDLCAACLRKCQNARDNLNRIKNMATTTPRKTIFPNLISPNSMAKDSWEDWRIRLTSS

SEQ ID NO: 6407 - protein, 589 aa, Homo sapiens
MASSQRDMEDWVQAIRRVIWAPLGGGTARRSHAHPLEPLPPGIFGQRLEETVHHERKYGPRLAPLLVEQCVDFIRERGLTEEGLFRMPGQANLVRDLQDSFDCGEKPLFDSTTDVHTVASLLKLYLRELPEPVVPFARYEDFLSCAQLLTKDEGEGTLELAKQVSNLPQANYNLLRYICKFLDEVQAYSNVNKMSVQNLATVFGPNILRPQVEDPVTIMEGTSLVQHLMTVLIRKHSQLFTAPVPEGPTSPRGGLQCAVGWGSEEVTRDSQGEPGGPGLPAHRTSSLDGAAVAVLSRTAPTGPGSRCSPGKKVQTLPSWKSSFRQPRSLSGSPKGGGSSLEVPIISSGGNWLMNGLSSLRGHRRASSGDRLKDSGSVQRLSTYDNVPAPGLVPGIPSVASMAWSGASSSESSVGGSLSSCTACRASDSSARSSLHTDWALEPSPLPSSSEDPKSLDLDHSMDEAGAGASNSEPSEPDSPTREHARRSEALQGLVTELRAELCRQRTEYERSVKRIEEGSADLRKRMSRLEEELDQEKKKYIMLEIKLRNSERAREDAERRNQLLQREMEEFFSTLGSLTVGAKGARAPK

SEQ ID NO: 6408 - protein, 402 aa, Homo sapiens
MSAEGAEPGPGSGSGPGPGPLCPEHGQALSWFCGSERRPVCAACAGLGGRCRGHRIRRAEERAEELRNKIVDQCERLQLQSAAITKYVADVLPGKNQRAVSMASAARELVIQRLSLVRSLCESEEQRLLEQVHGEEERAHQSILTQRVHWAEALQKLDTIRTGLVGMLTHLDDLQLIQKEQEIFERTEEAEGILDPQESEMLNFNEKCTRSPLLTQLWATAVLGSLSGTEDIRIDERTVSPFLQLSDDRKTLTFSTKKSKACADGPERFDHWPNALAATSFQNGLHAWMVNVQNSCAYKVGVASGHLPRKGSGSDCRLGHNAFSWVFSRYDQEFRFSHNGQHEPLGLLRGPAQLGVVLDLQVQELLFYEPASGTVLCAHHVSFPGPLFPVFAVADQTISIVR

SEQ ID NO: 6409 - protein, 85 aa, Homo sapiens
MLRRKPTRLELKLDDIEEFENIRKDLETRKKQKEDVEVVGGSDGEGAIGLSSDPKSREQMINDRIGYKPQPKPNNRSSQFGSLEF

SEQ ID NO: 6410 - protein, 247 aa, Homo sapiens
MLSDGCGSEEKISVPSCYGGIGAPVSRQVPASHDSELMAFMTRKLWDLEQQVKAQTDEILSKDQKIAALEDLVQTLRPHPAEATLQRQEELETMCVQLQRQVREMERFLSDYGLQWVGEPMDQEDSESKTVSEHGERDWMTAKKFWKPGDSLAPPEVDFDRLLASLQDLSELVVEGDTQVTPVPGGARLRTLEPIPLKLYRNGIMMFDGPFQPFYDPSTQRCLRDILDGFFPSELQRLYPNGVPFKV

SEQ ID NO: 6411 - protein, 487 aa, Homo sapiens; identical to SEQ ID NO: 5916

SEQ ID NO: 6412 - protein, 339 aa, Homo sapiens; identical to SEQ ID NO: 5550

SEQ ID NO: 6413 - protein, 520 aa, Homo sapiens
MSSPLASLSKTRKVPLPSEPMNPGRRGIRIYGDEDEVDMLSDGCGSEEKISVPSCYGGIGAPVSRQVPASHDSELMAFMTRKLWDLEQQVKAQTDEILSKDQKIAALEDLVQTLRPHPAEATLQRQEELETMCVQLQRQVREMERFLSDYGLQWVGEPMDQEDSESKTVSEHGERDWMTAKKFWKPGDSLAPPEVDFDRLLASLQDLSELVVEGDTQVTPVPGGARLRTLEPIPLKLYRNGIMMFDGPFQPFYDPSTQRCLRDILDGFFPSELQRLYPNGVPFKVSDLRNQVYLEDGLDPFPGEGRVVGRQLMHKALDRVEEHPGSRMTAEKFLNRLPKFVIRQGEVIDIRGPIRDTLQNCCPLPARIQEIVVETPTLAAERERSQESPNTPAPPLSMLRIKSENGEQAFLLMMQPDNTIGDVRALLAQARVMDASAFEIFSTFPPTLYQDDTLTLQAAGLVPKAALLLRARRAPKSSLKFSPGPCPGPGPGPSPGPGPGPSPGPGPGPSPCPGPSPSPQ

SEQ ID NO: 6414 - protein, 520 aa, Homo sapiens; identical to SEQ ID NO: 6413

SEQ ID NO: 6415 - protein, 277 aa, Homo sapiens
MFDGPFQPFYDPSTQRCLRDILDGFFPSELQRLYPNGVPFKVSDLRNQVYLEDGLDPFPGEGRVVGRQLMHKALDRVEEHPGSRMTAEKFLNRLPKFVIRQGEVIDIRGPIRDTLQNCCPLPARIQEIVVETPTLAAERERSQESPNTPAPPLSMLRIKSENGEQAFLLMMQPDNTIGDVRALLAQARVMDASAFEIFSTFPPTLYQDDTLTLQAAGLVPKAALLLRARRAPKSSLKFSPGPCPGPGPGPSPGPGPGPSPGPGPGPSPCPGPSPSPQ

SEQ ID NO: 6416 - protein, 437 aa, Homo sapiens
MAGGPPKALPSTGPHSLRDMPHPLAGSSSEEAVGGDSTPSPDLLMARSFGDKDLILPNGGTPAGTSSPASSSSLLNRLQLDDDIDGETRDLFVIVDDPKKHVCTMETYITYRITTKSTRVEFDLPEYSVRRRYQDFDWLRSKLEESQPTHLIPPLPEKFVVKGVVDRFSEEFVETRRKALDKFLKRITDHPVLSFNEHFNIFLTAKDLNAYKKQGIALLTRMGESVKHVTGGYKLRTRPLEFAAIGDYLDTFALKLGTIDRIAQRIIKEEIEYLVELREYGPVYSTWSALEGELAEPLEGVSACIGNCSTALEELTDDMTEDFLPVLREYILYSDSMKSVLKKRDQVQAEYEAKLEAVALRKEDRPKVPADVEKCQDRMECFNADLKADMERWQNNKRQDFRQLLMGMADKNIQYYEKCLMAWESIIPLLQEKQEAK

SEQ ID NO: 6417 - protein, 420 aa, Homo sapiens
MSSPRDFRAEPVNDYEGNDSEAEDLNFRETLPSSSQENTPRSKVFENKVNSEKVKLSLRNFPHNDYEDVFEEPSESGSDPSMWTARGPFRRDRWSSEDEEAAGPSQALSPLLSDTRKIVSEGELDQLAQIRPLIFNFHEQTAIKDCLKILEEKTAAYDIMQEFMALELKNLPGEFNSGNQPSNREKNRYRDILPYDSTRVPLGKSKDYINASYIRIVNCGEEYFYIATQGPLLSTIDDFWQMVLENNSNVIAMITREIEGGIIKCYHYWPISLKKPLELKHFRVFLENYQILQYFIIRMFQVVEKSTGTSHSVKQLQFTKWPDHGTPASADSFIKYIRYARKSHLTGPMVVHCSAGIGRTGVFLCVDVVFCAIVKNCSFNIMDIVAQMREQRSGMVQTKEQYHFCYDIVLEVLRKLLTLD

SEQ ID NO: 6418 - protein, 278 aa, Homo sapiens [sequence omitted]

SEQ ID NO: 6419 - protein, 226 aa, Homo sapiens
MSSPRDFRAEPVNDYEGNDSEAEDLNFRETLPSSSQENTPRSKVFENKVNSEKVKLSLRNFPHNDYEDVFEEPSESGSDPSMWTARGPFRRDRWSSEDEEAAGPSQALSPLLSDTRKIVSEGELDQLAQIRPLIFNFHEQTAIKDCLKILEEKTAAYDIMQEFMALELKNLPGEFNSGNQPSNREKNRYRDILPFQHHGYSGPNERTTFWHGSNEGAVSLLLRYCA

SEQ ID NO: 6420 - protein, 226 aa, Homo sapiens
MHQTCVRLEREASARPSPGPVLPPRPLPSHTELQIREGPKRTIRAAAEGAPCVGRVRCAPGNRGGREGASGVRGGVAQVPPRLPAPPIGPERDDLAGGAGRKPLPSTAAASSPGSAAAATAALCPPARLSTPSMSGLRVYSTSVTGSREIKSQQSEVTRILDGKRIQYQLVDISQDNALRDEMRALAGNPKATPPQIVNGDQYCGDYELFVEAVEQNTLQEFLKLA

SEQ ID NO: 6421 - protein, 505 aa, Homo sapiens
MDPGNENSATEAAAIIDLDPDFEPQSRPRSCTWPLPRPEIANQPSEPPEVEPDLGEKVHTEGRSEPILLPSRLPEPAGGPQPGILGAVTGPRKGGSRRNAWGNQSYAELISQAIESAPEKRLTLAQIYEWMVRTVPYFKDKGDSNSSAGWKNSIRHNLSLHSKFIKVHNEATGKSSWWMLNPEGGKSGKAPRRRAASMDSSSKLLRGRSKAPKKKPSVLPAPPEGATPTSPVGHFAKWSGSPCSRNREEADMWTTFRPRSSSNASSVSTRLSPLRPESEVLAEEIPASVSSYAGGVPPTLNEGLELLDGLNLTSSHSLLSRSGLSGFSLQHPGVTGPLHTYSSSLFSPAEGPLSAGEGCFSSSQALEALLTSDTPPPPADVLMTQVDPILSQAPTLLLLGGLPSSSKLATGVGLCPKPLEAPGPSSLVPTLSMIAPPPVMASAPIPKALGTPVLTPPTEAASQDRMPQDLDLDMYMENLECDMDNIISDLMDEGEGLDFNFEPDP

SEQ ID NO: 6422 - protein, 353 aa, Homo sapiens
MDYKSSLIQDGNPMENLEKQLICPICLEMFTKPVVILPCQHNLCRKCANDIFQAANPYWTSRGSSVSMSGGRFRCPTCRHEVIMDRHGVYGLQRNLLVENIIDIYKQECSSRPLQKGSHPMCKEHEDEKINIYCLTCEVPTCSMCKVFGIHKACEVAPLQSVFQGQKTELNNCISMLVAGNDRVQTIITQLEDSRRVTKENSHQVKEELSQKFDTLYAILDEKKSELLQRITQEQEKKLSFIEALIQQYQEQLDKSTKLVETAIQSLDEPGGATFLLTAKQLIKSIVEASKGCQLGKTEQGFENMDFFTLDLEHIADALRAIDFGTDEEEEEFIEEEDQEEEESTEGKEEGHQ

SEQ ID NO: 6423 - protein, 392 aa, Homo sapiens
MGVNQSVGFPPVTGPHLVGCGDVMEGQNLQGSFFRLFYPCQKAEETMEQPLWIPRYEYCTGLAEYLQFNKRCGGLLFNLAVGSCRLPVSWNGPFKTKDSGYPLIIFSHGLGAFRTLYSAFCMELASRGFVVAVPEHRDRSAATTYFCKQAPEENQPTNESLQEEWIPFRRVEEGEKEFHVRNPQVHQRVSECLRVLKILQEVTAGQTVFNILPGGLDLMTLKGNIDMSRVAVMGHSFGGATAILALAKETQFRCAVALDAWMFPLERDFYPKARGPVFFINTEKFQTMESVNLMKKICAQHEQSRIITVLGSVHRSQTDFAFVTGNLIGKFFSTETRGSLDPYEGQEVMVRAMLAFLQKHLDLKEDYNQWNNLIEGIGPSLTPGAPHHLSSL

SEQ ID NO: 6424 - protein, 392 aa, Homo sapiens; identical to SEQ ID NO: 6423

SEQ ID NO: 6425 - protein, 70 aa, Homo sapiens
MVRTKTWTLKKHFVGYPTNSDFELKTAELPPLKNGEVLLEALFLTVDPYMRVAAKRLKEGDTMMGQQVAK

SEQ ID NO: 6426 - protein, 70 aa, Homo sapiens; identical to SEQ ID NO: 6425

SEQ ID NO: 6427 - protein, 177 aa, Homo sapiens; identical to SEQ ID NO: 4768

SEQ ID NO: 6428 - protein, 420 aa, Homo sapiens; identical to SEQ ID NO: 6417

SEQ ID NO: 6429 - protein, 278 aa, Homo sapiens [sequence omitted]

SEQ ID NO: 6430 - protein, 226 aa, Homo sapiens; identical to SEQ ID NO: 6419

SEQ ID NO: 6431 - protein, 262 aa, Homo sapiens
MSRYLRPPNTSLFVRNVADDTRSEDLRREFGRYGPIVDVYVPLDFYTRRPRGFAYVQFEDVRDAEDALHNLDRKWICGRQIEIQFAQGDRKTPNQMKAKEGRNVYSSSRYDDYDRYRRSRSRSYERRRSRSRSFDYNYRRSYSPRNSRPTGRPRRSRSHSDNDRFKHRNRSFSRSKSNSRSRSKSQPKKEMKAKSRSRSASHTKTRGTSKTDSKTHYKSGSRYEKESRKKEPPRSKSQSRSQSRSRSKSRSRSWTSPKSSGH

SEQ ID NO: 6432 - protein, 173 aa, Homo sapiens
MSRYLRPPNTSLFVRNVADDTRSEDLRREFGRYGPIVDVYVPLDFYTRRPRGFAYVQFEDVRDAEDALHNLDRKWICGRQIEIQFAQGDRKTPNQMKAKEGRNVYSSSRYDDYDRYRRSRSRSYERRRSRSRSFDYNYRRSYSPRNSRPTGRPRRSRSHSDNDSQVSKKKNER

SEQ ID NO: 6433 - protein, 222 aa, Homo sapiens
MSAFGHDEAWMEAGGFGLEAAERTEYQSLCKSKLLFLGEQSVGKTSIISRFMYNSFGCACQATVGIDFLSKTMYLEDQIVQLQLWDTAGQERFHSLIPSYIRDSTIAVVVYDITNINSFKETDKWVEHVRAERGDDVVIMLLGNKIDLDNKRQVTAEQGEEKSRNLNVMFIETSAKTGYNVKKLFRRVASALLSTRTSPPPKEGTVEIELESFEESGNRSYC

SEQ ID NO: 6434 - protein, 115 aa, Homo sapiens
MVQIIKDTNEFKTFLTAAGHKLAVVQFSSKRCGPCKRMFPVFHAMSVKYQNVFFANVDVNNSPELAETCHIKTIPTFQMFKKSQKVTLFSRIKRIICCYRSGFMSNLCLADDGNE

SEQ ID NO: 6435 - protein, 127 aa, Homo sapiens
MVQIIKDTNEFKTFLTAAGHKLAVVQFSSKRCGPCKRMFPVFHAMSVKYQNVFFANVDVNNSPELAETCHIKTIPTFQMFKKSQKVTLFSRIKRIICCYRSGFMSNLIFEFCGADAKKLEAKTQELM

SEQ ID NO: 6436 - protein, 588 aa, Homo sapiens
MHRSAPSQTTKRSRSPFSTTRRSWDDSESSGTNLNIDNEDYSRYPPREYRASGSRRGMAYGHIDSYGADDSEEEGAGPVERPPVRGKTGKFKDDKLYDPEKGARSLAGPPPHFSSFSRDVREERDKLDPVPAARCSASRADFLPQSSVASQSSSEGKLATKGDSSERERREQNLPARPSRAPVSICGGGENTSKSAEEPVVRPKIRNLASPNCVKPKIFFDTDDDDDMPHSTSRWRDTANDNEGHSDGLARRGRGESSSGYPEPKYPEDKREARSDQVKPEKVPRRRRTMADPDFWTHSDDYYKYCDEDSDSDKEWIAALRRKYRSREQTLSSSGESWETLPGKEEREPPQAKVSASTGTSPGPGASASAGAGAGASAGSNGSNYLEEVREPSLQEEQASLEEGEIPWLQYHENDSSSEGDNDSGHELMQPGVFMLDGNNNLEDDSSVSEDLEVDWSLFDGFADGLGVAEAISYVDPQFLTYMALEERLAQAMETALAHLESLAVDVEVANPPASKESIDALPEILVTEDHGAVGQEMCCPICCSEYVKGEVATELPCHHYFHKPCVSIWLQKSGTCPVCRCMFPPPL

SEQ ID NO: 6437 - protein, 203 aa, Homo sapiens
MPEQFSVAEFLAVTAEDLSSPAGAAAFAAKMPRYRGAALAREEILEGDQAILQRIKKAVRAIHSSGLGHVENEEQYREAVESLGNSHLSQNSHELSTGFLNLAVFTREVAALFKNLIQNLNNIVSFPLDSLMKGQLRDGRQDSKKQLEKAWKDYEAKMAKLEKERDRARVTGGIPAWNLGIPAKPHPTLKRASESPQAPPDPA

SEQ ID NO: 6438 - protein, 643 aa, Homo sapiens; identical to SEQ ID NO: 6047

SEQ ID NO: 6439 - protein, 455 aa, Homo sapiens
MGQESSKPVWPNPTGGYQSNTGRRYGRRHAYVSFRPPTSQRERIASQRKTNSEVPMHRSAPSQTTKRSRSPFSTTRRSWDDSESSGTNLNIDNEDYSSTSRWRDTANDNEGHSDGLARRGRGESSSGYPEPKYPEDKREARSDQVKPEKVPRRRRTMADPDFWTHSDDYYKYCDEDSDSDKEWIAALRRKYRSREQTLSSSGESWETLPGKEEREPPQAKVSASTGTSPGPGASASAGAGAGASAGSNGSNYLEEVREPSLQEEQASLEEGEIPWLQYHENDSSSEGDNDSGHELMQPGVFMLDGNNNLEDDSSVSEDLEVDWSLFDGFADGLGVAEAISYVDPQFLTYMALEERLAQAMETALAHLESLAVDVEVANPPASKESIDALPEILVTEDHGAVGQEMCCPICCSEYVKGEVATELPCHHYFHKPCVSIWLQKSGTCPVCRCMFPPPL

SEQ ID NO: 6440 - protein, 129 aa, Homo sapiens
MAELIQKKLQGEVEKYQQLQKDLSKSMSGRQKLEAQLTENNIVKEELALLDGSNVVFKLLGPVLVKQELGEARATVGKRLDYITAEIKRYESQLRDLERQSEQQRETLAQLQQEFQRAQAAKAGAPGKA

SEQ ID NO: 6441 - protein, 129 aa, Homo sapiens; identical to SEQ ID NO: 6440

SEQ ID NO: 6442 - protein, 129 aa, Homo sapiens; identical to SEQ ID NO: 6440

SEQ ID NO: 6443 - protein, 503 aa, Homo sapiens
MKCEHCTRKECSKKTKTDDQENVSADAPSPAQENGEKGEFHKLADAKIFLSDCLACDSCMTAEEGVQLSQQNAKDFFRVLNLNKKCDTSKHKVLVVSVCPQSLPYFAAKFNLSVTDASRRLCGFLKSLGVHYVFDTTIAADFSILESQKEFVRRYRQHSEEERTLPMLTSACPGWVRYAERVLGRPITAHLCTAKSPQQVMGSLVKDYFARQQNLSPEKIFHVIVAPCYDKKLEALQESLPPALHGSRGADCVLTSGKVLISWWCTPVITATQEAAARESLEPGRQRLQRDKIAPLDSSLGGGGEIAQIMEQGDLSVRDAAVDTLFGDLKEDKVTRHDGASSDGHLAHIFRHAAKELFNEDVEEVTYRALRNKDFQEVTLEKNGEVVLRFAAAYGFRNIQNMILKLKKGKFPFHFVEVLACAGGCLNGRGQAQTPDGHADKALLRQMEGIYADIPVRRPESSAHVQELYQEWLEGINSPKAREVLHTTYQSQERGTHSLDIKW

SEQ ID NO: 6444 - protein, 115 aa, Homo sapiens
MATEPEAAEPVVPSLVDRYFTRWYKPDVKGKFCEDHCILQHSNRICVITLAESHPVLQSGKTIKSISYQISTNCSRLQNKVSGKFKRRIIYLEKVEDVIKRKMMPLSLGLHLPHS

SEQ ID NO: 6445 - protein, 521 aa, Homo sapiens
MNVSLSQKTVKIHRLFPMLAFSEPYEFVSLEWLQKWLDESTPTKPIDNHACLCSHDKLHPDKISIMKRISEYAADIFYSRYGGGPRLTVKALCKECVVERCRILRLKNQLNEDYKTVNNLLKAAVKGDGFWVGKSSLRSWRQLALEQLDEQDGDAEQSNGKMNGSTLNKDESKEERKEEEELNFNEDILCPHGELCISENERRLVSKEAWSKLQQYFPKAPEFPSYKECCSQCKILEREGEENEALHKMIANEQKTSLPNLFQDKNRPCLSNWPEDTDVLYIVSQFFVEEWRKFVRKPTRCSPVSSVGNSALLCPHGGLMFTFASMTKEDSKLIALIWPSEWQMIQKLFVVDHVIKITRIEVGDVNPSETQYISEPKLCPECREGLLCQQQRDLREYTQATIYVHKVVDNKKVMKDSAPELNVSSSETEEDKEEAKPDGEKDPDFNQIMHAFSVAPFDQNLSIDGKILSDDCATLGTLGVIPESVILLKADEPIADYAAMDDVMQVCMPEEGFKGTGLLGH

SEQ ID NO: 6446 - protein, 327 aa, Homo sapiens
MTAVGAERLTSVRAWLSCCGACVCVFLFLCLCVFPLRVHVHVWGGECRVDIAVFVSKHMIVALMHVTGAAGLLRLCVRACVCMRVCATAHMYRVDKSFTSRRSVWRSDGQNQHFPQALDLSRVNLVPSYTPSLYPKNTDLFEMIEKMQGSRMDEQRCSFPPPLKTEEDYIPYPSVHEVLGREGPFPLILLPQFGGYWIEGTNHEITSIPETEPLQSPTTKVKLECNPTARIYRKHFLGKEHFNYYSLDAALGHLVFSLKYDVIGDQEHLRLLLRTKCRTYHDVIPISCLTEFPNVVQMAKLVCEDVNVDRFYPVLYPKVWLDLGTAH

SEQ ID NO: 6447 - protein, 692 aa, Homo sapiens
MIEKMQGSRMDEQRCSFPPPLKTEEDYIPYPSVHEVLGREGPFPLILLPQFGGYWIEGTNHEITSIPETEPLQSPTTKVKLECNPTARIYRKHFLGKEHFNYYSLDAALGHLVFSLKYDVIGDQEHLRLLLRTKCRTYHDVIPISCLTEFPNVVQMAKLVCEDVNVDRFYPVLYPKASRLIVTFDEHVISNNFKFGVIYQKLGQTSEEELFSTNEESPAFVEFLEFLGQKVKLQDFKGFRGGLDVTHGQTGTESVYCNFRNKEIMFHVSTKLPYTEGDAQQLQRKRHIGNDIVAVVFQDENTPFVPDMIASNFLHAYVVVQAEGGGPDGPLYKVSVTARDDVPFFGPPLPDPAVFRKGPEFQEFLLTKLINAEYACYKAEKFAKLEERTRAALLETLYEELHIHSQSMMGLGGDEDKMENGSGGGGFFESFKRVIRSRSQSMDAMGLSNKKPNTVSTSHSGSFAPNNPDLAKAAGISLLIPGKSASRFGRRGSAIGIGTVEEVVVRGAAGSGGCLHALFSARSQDGGHIGDVAPLPPGQAPGRAGWSGGSSDGTQHLLWGLSLIVPGKSPTRKKSGPFGSRRSSAIGIENIQEVQEKRESPPAGQKTPDSGHVSQEPKSENSSTQSSPEMPTTKNRAETAAQRAEALKLPLLVQCQQLRQRGGGDGGCGRRGHRPGERVILRNTPQAGLLHL

SEQ ID NO: 6448 - protein, 694 aa, Homo sapiens
MAQLRPAVPPGRPRRGSLPAGASWQNTDLFEMIEKMQGSRMDEQRCSFPPPLKTEEDYIPYPSVHEVLGREGPFPLILLPQFGGYWIEGTNHEITSIPETEPLQSPTTKVKLECNPTARIYRKHFLGKEHFNYYSLDAALGHLVFSLKYDVIGDQEHLRLLLRTKCRTYHDVIPISCLTEFPNVVQMAKLVCEDVNVDRFYPVLYPKASRLIVTFDEHVISNNFKFGVIYQKLGQTSEEELFSTNEESPAFVEFLEFLGQKVKLQDFKGFRGGLDVTHGQTGTESVYCNFRNKEIMFHVSTKLPYTEGDAQQLQRKRHIGNDIVAVVFQDENTPFVPDMIASNFLHAYVVVQAEGGGPDGPLYKVSVTARDDVPFFGPPLPDPAVFRKGPEFQEFLLTKLINAEYACYKAEKFAKLEERTRAALLETLYEELHIHSQSMMGLGGDEDKMENGSGGGGFFESFKRVIRSRSQSMDAMGLSNKKPNTVSTSHSGSFAPNNPDLAKAAGISLIVPGKSPTRKKSGPFGSRRSSAIGIENIQEVQEKRESPPAGQKTPDSGHVSQEPKSENSSTQSSPEMPTTKNRAETAAQRAEALKDFSRSSSSASSFASVVEETEGVDGEDTGLESVSSSGTPHKRDSFIYSTWLEDSVSTTSGGSSPGPSRSPHPDAGKLGDPACPEIKIQLEASEQHMPQLGC

SEQ ID NO: 6449 - protein, 693 aa, Homo sapiens
MAQLRPAVPPGRPRRGSLPAGASWQNTDLFEMIEKMQGSRMDEQRCSFPPPLKTEEDYIPYPSVHEVLGREGPFPLILLPQFGGYWIEGTNHEITSIPETEPLQSPTTKVKLECNPTARIYRKHFLGKEHFNYYSLDAALGHLVFSLKYDVIGDQEHLRLLLRTKCRTYHDVIPISCLTEFPNVVQMAKLVCEDVNVDRFYPVLYPKASRLIVTFDEHVISNNFKFGVIYQKLGQTSEEELFSTNEESPAFVEFLEFLGQKVKLQDFKGFRGGLDVTHGQTGTESVYCNFRNKEIMFHVSTKLPYTEGDAQLQRKRHIGNDIVAVVFQDENTPFVPDMIASNFLHAYVVVQAEGGGPDGPLYKVSVTARDDVPFFGPPLPDPAVFRKGPEFQEFLLTKLINAEYACYKAEKFAKLEERTRAALLETLYEELHIHSQSMMGLGGDEDKMENGSGGGGFFESFKRVIRSRSQSMDAMGLSNKKPNTVSTSHSGSFAPNNPDLAKAAGISLIVPGKSPTRKKSGPFGSRRSSAIGIENIQEVQEKRESPPAGQKTPDSGHVSQEPKSENSSTQSSPEMPTTKNRAETAAQRAEALKDFSRSSSSASSFASVVEETEGVDGEDTGLESVSSSGTPHKRDSFIYSTWLEDSVSTTSGGSSPGPSRSPHPDAGKLGDPACPEIKIQLEASEQHMPQLGC

SEQ ID NO: 6450 - protein, 663 aa, Homo sapiens
MIEKMQGSRMDEQRCSFPPPLKTEEDYIPYPSVHEVLGREGPFPLILLPQFGGYWIEGTNHEITSIPETEPLQSPTTKVKLECNPTARIYRKHFLGKEHFNYYSLDAALGHLVFSLKYDVIGDQEHLRLLLRTKCRTYHDVIPISCLTEFPNVVQMAKLVCEDVNVDRFYPVLYPKASRLIVTFDEHVISNNFKFGVIYQKLGQTSEEELFSTNEESPAFVEFLEFLGQKVKLQDFKGFRGGLDVTHGQTGTESVYCNFRNKEIMFHVSTKLPYTEGDAQQLQRKRHIGNDIVAVVFQDENTPFVPDMIASNFLHAYVVVQAEGGGPDGPLYKVSVTARDDVPFFGPPLPDPAVFRKGPEFQEFLLTKLINAEYACYKAEKFAKLEERTRAALLETLYEELHIHSQSMMGLGGDEDKMENGSGGGGFFESFKRVIRSRSQSMDAMGLSNKKPNTVSTSHSGSFAPNNPDLAKAAGISLIVPGKSPTRKKSGPFGSRRSSAIGIENIQEVQEKRESPPAGQKTPDSGHVSQEPKSENSSTQSSPEMPTTKNRAETAAQRAEALKDFSRSSSSASSFASVVEETEGVDGEDTGLESVSSSGTPHKRDSFIYSTWLEDSVSTTSGGSSPGPSRSPHPDAGKLGDPACPEIKIQLEASEQHMPQLGC

SEQ ID NO: 6451 - protein, 247 aa, Homo sapiens
MLVLRSALTRALASRTLAPQMCSSFATGPRQYDGIFYEFRSYYLKPSKMNEFLENFEKNAHLRTAHSELVGYWSVEFGGRMNTVFHIWKYDNFAHRTEVRKALAKDKEWQEQFLIPNLALIDKQESEITYLVPWCKLEKPPKEGVYELATFQMKPGGPALWGDAFKRAVHAHVNLGYTKLVGVFHTEYGALNRVHVLWWNESADSRAAGRHKSHEDPRVVAAVRESVNYLVSQQNMLLIPTSFSPLK

SEQ ID NO: 6452 - protein, 1197 aa, Homo sapiens; identical to SEQ ID NO: 5099

SEQ ID NO: 6453 - protein, 1197 aa, Homo sapiens; identical to SEQ ID NO: 5099

SEQ ID NO: 6454 - protein, 348 aa, Homo sapiens
MSLPRFQRVNFGPYDNYIPVSELSKKSWNQQHFALLFPKPQRPGTKRRSKPSQIRDNTVSIIDEEQLRGDRRQPLWMYRSLMRISERPSVYLAARRQPLKPTRTVEVDSKAAEIGKKGEDKTTQKDTTDSESELKQGKKDSKKGKDIEKGKEEKLDAKKDSKKGKKDAEKGKDSATESEDEKGGAKKDNKKDKKDSNKGKDSATESEGEKGGTEKDSKKGKKDSKKGKDSAIELQAVKADEKKDEDGKKDANKGDESKDAKKDAKEIKKGKKDKKKPSSTDSDSKDDVKKESKKDATKDAKKVAKKDTEKESADSKKDAKKNAKKDAKKDAKKNAKKDEKKDAKKKGK

SEQ ID NO: 6455 - protein, 504 aa, Homo sapiens
MNSQPQTRSPFFQRPQIQPPRATIPNSSPSIRPGAQTPTAVYQANQHIMMVNHLPMPYPVPQGPQYCIPQYRHSGPPYVGPPQQYPVQPPGPGPFYPGPGPGDFPNAYGTPFYPSQPVYQSAPIIVPTQQQPPPAKREKKTIRIRDPNQGGKDITEEIMSGGGSRNPTPPIGRPTSTPTPPQQLPSQVPEHSPVVYGTVESAHLAASTPVTAASDQKQEEKPKPDPVLKSPSPVLRLVLSGEKKEQEGQTSETTAIVSIAELPLPPSPTTVSSVARSTIAAPTSSALSSQPIFTTAIDDRCELSSPREDTIPIPSLTSCTETSDPLPTNENDDDICKKPCSVAPNDIPLVSSTNLINEINGVSEKLSATESIVEIVKQEVLPLTLELEILENPPEEMKLECIPAPITPSTVPSFPPTPPTPPASPPHTPVIVPAAATTVSSPSAAITVQRVLEEDESIRTCLSEDAKEIQNKIEVEADGQTEEILDSQNLNSRRSPVPETSNEC

SEQ ID NO: 6456 - protein, 247 aa, Homo sapiens
MLKFLVWFLQWCVCVLVQPAKELLHCLKMQMRISKYTKCLQAQIAITVPKTWKKPKDRTRTTEEMLEAELELKAEEELSIDKVLESEQDKMSQGFHPERDPSDLKKVKAVEENGEEAEPVRNGAESVSEGEGIDANSGSTDSSGDGVTFPFKPESWKPTDTEGKKQYDREFLLDFQFMPACIQKPEGLPPISDVVLDKINQPKLPMRTLDPRILPRGPDFTPAFADFGRQTPGGRGVPVSASSLQLT

SEQ ID NO: 6457 - protein, 1305 aa, Homo sapiens
MNSQPQTRSPFFQRPQIQPPRATIPNSSPSIRPGAQTPTAVYQANQHIMMVNHLPMPYPVPQGPQYCIPQYRHSGPPYVGPPQQYPVQPPGPGPFYPGPGPGDFPNAYGTPFYPSQPVYQSAPIIVPTQQQPPPAKREKKTIRIRDPNQGGKDITEEIMSGGGSRNPTPPIGRPTSTPTPPQQLPSQVPEHSPVVYGTVESAHLAASTPVTAASDQKQAQIAITVPKTWKKPKDRTRTTEEMLEAELELKAEEELSIDKVLESEQDKMSQGFHPERDPSDLKKVKAVEENGEEAEPVRNGAESVSEGEGIDANSGSTDSSGDGVTFPFKPESWKPTDTEGKKQYDREFLLDFQFMPACIQKPEGLPPISDVVLDKINQPKLPMRTLDPRILPRGPDFTPAFADFGRQTPGGRGVPLLNVGSRRSQPGQRREPRKIITVSVKEDVHLKKAENAWKPSQKRDSQADDPENIKTQELFRKVRSILNKLTPQMFNQLMKQVSGLTVDTEERLKGVIDLVFEKAIDEPSFSVAYANMCRCLVTLKVPMADKPGNTVNFRKLLLNRCQKEFEKDKADDDVFEKKQKELEAASAPEERTRLHDELEEAKDKARRRSIGNIKFIGELFKLKMLTEAIMHDCVVKLLKNHDEESLECLCRLLTTIGKDLDFEKAKPRMDQYFNQMEKIVKERKTSSRIRFMLQDVIDLRLCNWVSRRADQGPKTIEQIHKEAKIEEQEEQRKVQQLMTKEKRRPGVQRVDEGGWNTVQGAKNSRVLDPSKFLKITKPTIDEKIQLVPKAQLGSWGKGSSGGAKASETDALRSSASSLNRFSALQPPAPSGSTPSTPVEFDSRRTLTSRGSMGREKNDKPLPSATARPNTFMRGGSSKDLLDNQSQEEQRREMLETVKQLTGGVDVERNSTEAERNKTRESAKPEISAMSAHDKAALSEEELERKSKSIIDEFLHINDFKEAMQCVEELNAQGLLHVFVRVGVESTLERSQITRDHMGQLLYQLVQSEKLSKQDFFKGFSETLELADDMAIDIPHIWLYLAELVTPMLKEGGISMRELTIEFSKPLLPVGRAGVLLSEILHLLCKQMSHKKVGALWREADLSWKDFLPEGEDVHNFLLEQKLDFIESDSPCSSEALSKKELSAEELYKRLEKLIIEDKANDEQIFDWVEANLDEIQMSSPTFLRALMTAVCKAAIIADSSTFRVDTAVIKQRVPILLKYLDSDTEKELQALYALQASIVKLDQPANLLRMFFDCLYDEEVISEDAFYKWESSKDPAEQNGKGVALKSVTAFFTWLREAEEESEDN

SEQ ID NO: 6458 - protein, 1593 aa, Homo sapiens
MNSQPQTRSPGGFRPIQFFQRPQIQPPRATIPNSSPSIRPGAQTPTAVYQANQHIMMVNHLPMPYPVPQGPQYCIPQYRHSGPPYVGPPQQYPVQPPGPGPFYPGPGPGDFPNAYGTPFYPSQPVYQSAPIIVPTQQQPPPAKREKKTIRIRDPNQGGKDITEEIMSGGGSRNPTPPIGRPTSTPTPPQLPSQVPEHSPVVYGTVESAHLAASTPVTAASDQKQEEKPKPDPVLKSPSPVLRLVLSGEKKEQEGQTSETTAIVSIAELPLPPSPTTVSSVARSTIAAPTSSALSSQPIFTTAIDDRCELSSPREDTIPIPSLTSCTETSDPLPTNENDDDICKKPCSVAPNDIPLVSSTNLINEINGVSEKLSATESIVEIVKQEVLPLTLELEILENPPEEMKLECIPAPITPSTVPSFPPTPPTPPASPPHTPVIVPAAATTVSSPSAAITVQRVLEEDESIRTCLSEDAKEIQNKIEVEADGQTEEILDSQNLNSRRSPVPAQIAITVPKTWKKPKDRTRTTEEMLEAELELKAEEELSIDKVLESEQDKMSQGFHPERDPSDLKKVKAVEENGEEAEPVRNGAESVSEGEGIDANSGSTDSSGDGVTFPFKPESWKPTDTEGKKQYDREFLLDFQFMPACIQKPEGLPPISDVVLDKINQPKLPMRTLDPRILPRGPDFTPAFADFGRQTPGGRGVPLLNVGSRRSQPGQRREPRKIITVSVKEDVHLKKAENAWKPSQKRDSQADDPENIKTQELFRKVRSILNKLTPQMFNQLMKQVSGLTVDTEERLKGVIDLVFEKAIDEPSFSVAYANMCRCLVTLKVPMADKPGNTVNFRKLLLNRCQKEFEKDKADDDVFEKKQKELEAASAPEERTRLHDELEEAKDKARRRSIGNIKFIGELFKLKMLTEAIMHDCVVKLLKNHDEESLECLCRLLTTIGKDLDFEKAKPRMDQYFNQMEKIVKERKTSSRIRFMLQDVIDLRLCNWVSRRADQGPKTIEQIHKEAKIEEQEEQRKVQQLMTKEKRRPGVQRVDEGGWNTVQGAKNSRVLDPSKFLKITKPTIDEKIQLVPKAQLGSWGKGSSGGAKASETDALRSSASSLNRFSALQPPAPSGSTPSTPVEFDSRRTLTSRGSMGREKNDKPLPSATARPNTFMRGGSSKDLLDNQSQEEQRREMLETVKQLTGGVDVERNSTEAERNKTRESAKPEISAMSAHDKAALSEEELEARGSSKSIIDEFLHINDFKEAMQCVEELNAQGLLHVFVRVGVESTLERSQITRDHMGQLLYQLVQSEKLSKQDFFKGFSETLELADDMAIDIPHIWLYLAELVTPMLKEGGISMRELTIEFSKPLLPVGRAGVLLSEILHLLCKQMSHKKVGALWREADLSWKDFLPEGEDVHNFLLEQKLDFIESDSPCSSEALSKKELSAEELYKRLEKLIIEDKANDEQIFDWVEANLDEIQMSSPTFLRALMTAVCKAAIIADSSTFRVDTAVIKQRVPILLKYLDSDTEKELQALYALQASIVKLDQPANLLRMFFDCLYDEEVISEDAFYKWESSKDPAEQNGKGVALKSVTAFFTWLREAEEESEDN

SEQ ID NO: 6459 - protein, 333 aa, Homo sapiens
MSGDEMIFDPTMSKKKKKKKKPFMLDEEGDTQTEETQPSETKEVEPEPTEDKDLEADEEDTRKKDASDDLDDLNFFNQKKKKKKTKKIFDIDEAEEGVKDLKIESDVQEPTEPEDDLDIMLGNKKKKKKNVKFPDEDEILEKDEALEDEDNKKDDGISFSNQTGPAWAGSERDYTYEELLNRVFNIMREKNPDMVAGEKRKFVMKPPQVVRVGTKKTSFVNFTDICKLLHRQPKHLLAFLLAELGTSGSIDGNNQLVIKGRFQQKQIENVLRRYIKEYVTCHTCRSPDTILQKDTRLYFLQCETCHSRCSVASIKTGFQAVTGKRAQLRAKAN

SEQ ID NO: 6460 - protein, 872 aa, Homo sapiens
MGEGGLPPAFQLLLRACDQGDTETARRLLEPGAAEPAERGAEPEAGAEPAGAEVAGPGAAAAGAVGAPVPVDCSDEAGNTALQFAAAGGHEPLVRFLLRRGASVNSRNHYGWSALMQAARFGHVSVAHLLLDHGADVNAQNRLGASVLTVASRGGHLGVVKLLLEAGAFVDHHHPSGEQLGLGGSRDEPLDITALMAAIQHGHEAVVRLLMEWGADPNHAARTVGWSPLMLAALTGRLGVAQQLVEKGANPDHLSVLEKTAFEVALDCKHRDLVDYLDPLTTVRPKTDEEKRRPDIFHALKMGNFQLVKEIADEDPSHVNLVNGDGATPLMLAAVTGQLALVQLLVERHADVDKQDSVHGWTALMQATYHGNKEIVKYLLNQGADVTLRAKNGYTAFDLVMLLNDPDTELVRLLASVCMQVNKDKGRPSHQPPLPHSKVRQPWSIPVLPDDKGGLKSWWNRMSNRFRKLKLMQTLPRGLSSNQPLPFSDEPEPALDSTMRAAPQDKTSRSALPDAAPVTKDNGPGSTRGEKEDTLLTTMLRNGAPLTRLPSDKLKAVIPPFLPPSSFELWSSDRSRTRHNGKADPMKTALPQRASRGHPVGGGGTDTTPVRPVKFPSLPRSPASSANSGNFNHSPHSSGGSSGVGVSRHGGELLNRSGGSIDNVLSQIAAQRKKAAGLLEQKPSHRSSPVGPAPGSSPSELPASPAGGSAPVGKQKLETSKRPPSGTSTTSKSTSPTLTPSPSPKGHTAESSVSSSSSHRQSKSSGGSSSGTITDEDELTGILKKLSLEKYQPIFEEQEVDMEAFLTLTDGDLKELGIKTDGSRQQILAAISELNAGKGRERQILQETIHNFHSSFESSASNTRAPGNSPCA

SEQ ID NO: 6461 - protein, 160 aa, Homo sapiens
MEAERPQEEEDGEQGPPQDEEGWPPPNSTTRPWRSAPPSPPPPGTRHTALGPRSASLLSLQTELLLDLVAEAQSRRLEEQRATFYTPQNPSSLAPAPLRPLEDREQLYSTILSHQCQRMEAQRSEPPLPPGGQELLELLLRVQGGGRMEEQRSRPPTHTC

SEQ ID NO: 6462 - protein, 160 aa, Homo sapiens; identical to SEQ ID NO: 6461

SEQ ID NO: 6463 - protein, 929 aa, Homo sapiens
MQGLPDPPSQRGIIPRAFEHVFESVQCAENTKFLVRASYLEIYNEDVRDLLGADTKQKLELKEHPEKGVYVKGLSMHTVHSVAQCEHIMETGWKNRSVGYTLMNKDSSRSHSIFTISIEMSAVDERGKDHLRAGKLNLVDLAGSERQSKTGATGERLKEATKINLSLSALGNVISALVDGRCKHVPYRDSKLTRLLQDSLGGNTKTLMVACLSPADNNYDETLSTLRYANRAKNIRNKPRINEDPKDALLREYQEEIKKLKAILTQQMSPSSLSALLSRQVPPDPVQVEEKLLPQPVIQHDVEAEKQLIREEYEERLARLKADYKAEQESRARLEEDITAMRNSYDVRLSTLEENLRKETEAVLQVGVLYKAEVMSRAEFASSAEYPPAFQYETVVKPKVFSTTDTLPSDDVSKTQVSSRFAELPKVEPSKSEISLGSSESSSLEETSVSEAFPGPEEPSNVEVSMPTEESRSRYFLDECLGQEAAGHLLGEQNYLPQEEPQEVPLQGLLGLQDPFAEVEAKLARLSSTVARTDAPQADVPKVPVQVPAPTDLLEPSDARPEAEAADDFPPRPEVDLASEVALEVVRTAEPGVWLEAQAPVALVAQPEPLPATAGVKRESVGMEVAVLTDDPLPVVDQQQVLARLQLLEQQVVGGEQAKNKDLKEKHKRRKRYADERRKQLVAALQNSDEDSGDWVLLNVYDSIQEEVRAKSKLLEKMQRKLRAAEVEIKDLQSEFQLEKIDYLATIRRQERDSMLLQQLLEQVQPLIRRDCNYSNLEKILRESCWDEDNGFWKIPHPVITKTSLPVAVSTGPQNKPARKTSAADNGEPNMEDDRYRLMLSRSNSENIASNYFRSKRASQILSTDARKSLTHHNSPPGLSCPLSNNSAIPPTQAPEMPQPRPFRLESLDIPFTKAKRKKSKSNFGSEPL

SEQ ID NO: 6464 - protein, 141 aa, Homo sapiens
MNKHVLKIQKELEEAKEKLARQHKRRSDDDDRSSDRKDGVLEEQIERLQEKVESAQSEQKNLFLVIFQRFIMILTEHLVRCETDGTSVLTPWYKNCIERLQQIFLQVCGELRLGNNTILSHKDFSLKKILVKFVRRLYSTC

SEQ ID NO: 6465 - protein, 790 aa, Homo sapiens
MSRRRHSDENDGGQPHKRRKTSDANETEDHLESLICKVGEKSACSLESNLEGLAGVLEADLPNYKSKILRLLCTVARLLPEKLTIYTTLVGLLNARNYNFGGEFVEAMIRQLKESLKANNYNEAVYLVRFLSDLVNCHVIAAPSMVAMFENFVSVTQEEDVPQVRRDWYVYAFLSSLPWVGKELYEKKDAEMDRIFANTESYLKRRQKTHVPMLQVWTADKPHPQEEYLDCLWAQIQKLKKDRWQERHILRPYLAFDSILCEALQHNLPPFTPPPHTEDSVYPMPRVIFRMFDYTDDPEGPVMPGSHSVERFVIEENLHCIIKSHWKERKTCAAQLVSYPGKNKIPLNYHIVEVIFAELFQLPAPPHIDVMYTTLLIELCKLQPGSLPQVLAQATEMLYMRLDTMNTTCVDRFINWFSHHLSNFQFRWSWEDWSDCLSQDPESPKPKFVREVLEKCMRLSYHQRILDIVPPTFSALCPANPTCIYKYGDESSNSLPGHSVALCLAVAFKSKATNDEIFSILKDVPNPNQDDDDDEGFSFNPLKIEVFVQTLLHLAAKSFSHSFSALAKFHEVFKTLAESDEGKLHVLRVMFEVWRNHPQMIAVLVDKMIRTQIVDCAAVANWIFSSELSRDFTRLFVWEILHSTIRKMNKHVLKIQKELEEAKEKLARQHKRRSDDDDRSSDRKDGVLEEQIERLQEKVESAQSEQKNLFLVIFQRFIMILTEHLVRCETDGTSVLTPWYKNCIERLQQIFLQHHQIIQQYMVTLENLLFTAELDPHILAVFQQFCALQA

SEQ ID NO: 6466 - protein, 232 aa, Homo sapiens
MSQVLSILGMHTLMSNQQYYQALSSSSIMNKEGLNSVIKPTQYKPVPDEEPNSTDVEETLERIKNNDPKLEEVNLNNIRNIPIPTLKAYAEALKENSYVKKFSIVGTRSNDPVAYALAEMLKENKVLKTLNVESNFISGAGILRLVEALPYNTSLVEMKIDNQSQPLGNKVEMEIVSMLEKNATLLKFGYHFTQQGPRLRASNAMMNNNDLVRKRRLADLTGPIIPKCRSGV

SEQ ID NO: 6467 - protein, 800 aa, Homo sapiens
MSSLGASFVQIKFDDLQFFENCGGGSFGSVYRAKWISQDKEVAVKKLLKIEKEAEILSVLSHRNIIQFYGVILEPPNYGIVTEYASLGSLYDYINSNRSEEMDMDHIMTWATDVAKGMHYLHMEAPVKVIHRDLKSRNVVIAADGVLKICDFGASRFHNHTTHMSLVGTFPWMAPEVIQSLPVSETCDTYSYGVVLWEMLTREVPFKGLEGLQVAWLVVEKNERLTIPSSCPRSFAELLHQCWEADAKKRPSFKQIISILESMSNDTSLPDKCNSFLHNKAEWRCEIEATLERLKKLERDLSFKEQELKERERRLKMWEQKLTEQSNTPLLPSFEIGAWTEDDVYCWVQQLVRKGDSSAEMSVYASLFKENNITGKRLLLLEEEDLKDMGIVSKGHIIHFKSAIEKLTHDYINLFHFPPLIKDSGGEPEENEEKIVNLELVFGFHLKPGTGPQDCKWKMYMEMDGDEIAITYIKDVTFNTNLPDAEILKMTKPPFVMEKWIVGIAKSQTVECTVTYESDVRTPKSTKHVHSIQWSRTKPQDEVKAVQLAIQTLFTNSDGNPGSRSDSSADCQWLDTLRMRQIASNTSLQRSQSNPILGSPFFSHFDGQDSYAAAVRRPQVPIKYQQITPVNQSRSSSPTQYGLTKNFSSLHLNSRDSGFSSGNTDTSSERGRYSDRSRNKYGRGSISLNSSPRGRYSGKSQHSTPSRGRYPGKFYRVSQSALNPHQSPDFKRSPRDLHQPNTIPGMPLHPETDSRASEEDSKVSEGGWTKVEYRKKPHRPSPAKTNKERARGDHRGWRNF

SEQ ID NO: 6468 - protein, 356 aa, Homo sapiens
MRRFLRPGHDPVRERLKRDLFQFNKTVEHGFPHQPSALGYSPSLRILAIGTRSGAIKLYGAPGVEFMGLHQENNAVTQIHLLPGQCQLVTLLDDNSLHLWSLKVKGGASELQEDESFTLRGPPGAAPSATQITVVLPHSSCELLYLGTESGNVFVVQLPAFRALEDRTISSDAVLQRLPEEARHRRVFEMVEALQEHPRDPNQILIGYSRGLVVIWDLQGSRVLYHFLSSQQLENIWWQRDGRLLVSCHSDGSYCQWPVSSEAQQPEPLRSLVPYGPFPCKAITRILWLTTRQGLPFTIFQGGMPRASYGDRHCISVIHDGQQTAFDFTSRVIGFTVLTEADPAASRRASGVGAQG

SEQ ID NO: 6469 - protein, 841 aa, Homo sapiens
MGARAAGTSSGGGPRPCLARGLSASPFPAKQQHPQAGASPAELQQRAYYRARQDAASQPGLGFLISPSSCSSWGPGSFTRSCGYPTLCSSWISKREPGELSGVWTSAWRTHAAFTGSQDLCLYKGLGSIYEDKTALSLLGLGEETNEEDEEESDNQSVHSSSEPLRNLHLDIGALGGDFEYEESLRTSQPEEKKDVSLDSDAAGPPTPCKPSSPGADSSLSSAVGKGRQGSGARPGLPEKEENEKSEPKICRNLVTPKADPTGSEPAKASEKEAPEDTVDAGEEGSRREEAAKEPKKKASALEEGSSDASQELEISEHMKEPQLSDSIASDPKSFHGLDFGFRSRISEHLLDVDVLSPVLGGACRQAQQPLGIEDKDDSQSSQDELQSKQSKGLEERYHRLSPPLPHEERAQSPPRSLATEEEPPQGPEGQPEWKEAEELGEDSAASLSLQLSLQRRSTEPVAPPEQLSEAALKAMEEAVAQVLEQDQRHLLESKQEKMQQLREKLCQEEEEEILRLHQQKEQSLSSLRERLQKAIEEEEARMREEESQRLSWLRAQVQSSTQADEDQIRAEQEASLQKLREELESQQKAERASLEQKNRQMLEQLKEEIEASEKSEQAALNAAKEKALQQLREQLEGERKEAVATLEKEHSAELERLCSSLEAKHREVVSSLQKKIQEAQQKEEAQLQKCLGQVEHRVHQKSYHVAGYEHELSSLLREKRQEVEGEHERRLDKMKEEHQQVMAKAREQYEAEERKQRAELLGHLTGELERLQRAHERELETVRQEQHKRLEDLRRRHREQERKLQDLELDLETRAKDVKARLALLEVQVRDLQESLTSES

SEQ ID NO: 6470 - protein, 350 aa, Homo sapiens
MIRGFEAPMAENPPPPPPPVIFCHDSPKRVLVSVIRTTPIKPTCGGGGEPEPPPPLIPTSPGFSDFMVYPWRWGENAHNVTLSPGAAGAAASAALPAAAAAEHSGLRGRGAPPPAASASAAASGGEDEEEASSPDSGHLKDGIRRGRPRADTVRDLINEGEHSSSRIRCNICNRVFPREKSLQAHKRTHTGERPYLCDYPDCGKAFVQSGQLKTHQRLHTGEKPFVCSENGCLSRFTHANRHCPKHPYARLKREEPTDTLSKHQAADNKAAAEWLARYWEMREQRTPTLKGKLVQKADQEQQDPLEYLQSDEEDDEKRGAQRRLQEQRERLHGALALIELANLTGAPLRQ

SEQ ID NO: 6471 - protein, 378 aa, Homo sapiens
MNMIWRNSISCLRLGKVPHRYQSGYHPVAPLGSRILTDPAKVFEHNMWDHMQWSKEEEAAARKKVKENSAVRVLLEEQVKYEREASKYWDTFYKIHKNKFFKDRNWLLREFPEILPVDQKPEEKARESSWDHVKTSATNRFSRMHCPTVPDEKNHYEKSSGSSEGQSKTESDFSNLDSEKHKKGPMETGLFPGSNATFRILEVGCGAGNSVFPILNTLENSPESFLYCCDFASGAVELVKSHSSYRATQCFAFVHDVCDDGLPYPFPDGILDVILLVFVLSSIHPDRMQGVVNRLSKLLKPGGMLLFRDYGRYDKTQLRFKKGHCLSENFYVRGDGTRAYFFTKGEVHSMFCKASLDEKQNLVDRRLQVNRKKQVKMH

SEQ ID NO: 6472 - protein, 598 aa, Homo sapiens
MGLRASRPSKLTWKKWATTAASNSCSRSVSSCRRCTGGRLMKEPWRRPSSSICYTSRSSTIKFSSNKFKTLSVLLSHLHLFRLHVKISQPSLPISSRGAASSSQFQGLPSRSAIFQQQPENCSSPPNVALTCLGMQQPAQSQQVTIQVQEPVDMLSNMPGTAAGSSGRGISISPSAGQMQMQHRTNLMATLSYGHRPLSKQLSADSAEAHSAHQQPPHYTTSALQQALLSPTPPDYTRHQQVPHILQGLLSPRHSLTGHSDIRLPPTEFAQLIKRQQQQRQQQQQQQQQQEYQELFRHMNQGDAGSLAPSLGGQSMTERQALSYQNADSYHHHTSPQHLLQIRAQECVSQASSPTPPHGYAHQPALMHSESMEEDCSCEGAKDGFQDSKSSSTLTKGCHDSPLLLSTGGPGDPESLLGTVSHAQELGIHPYGHQPTAAFSKNKVPSREPVIGNCMDRSSPGQAVELPDHNGLGYPARPSVHEHHRPRALQRHHTIQNSDDAYVQLDNLPGMSLVAGKALSSARMSDAVLSQSSLMGSQQFQDGENEECGASLGGHEHPDLSDGSQHLNSSCYPSTCITDILLSYKHPEVSFSMEQAGV

SEQ ID NO: 6473 - protein, 1320 aa, Homo sapiens
MAAAAASGAGGAAGAGTGGAGPAGRLLPPPAPGSPAAPAAVSPAAGQPRPPAPASRGPMPARIGYYEIDRTIGKGNFAVVKRATHLVTKAKVAIKIIDKTQLDEENLKKIFREVQIMKMLCHPHIIRLYQVMETERMIYLVTEYASGGEIFDHLVAHGRMAEKEARRKFKQIVTAVYFCHCRNIVHRDLKAENLLLDANLNIKIADFGFSNLFTPGQLLKTWCGSPPYAAPELFEGKEYDGPKVDIWSLGVVLYVLVCGALPFDGSTLQNLRARVLSGKFRIPFFMSTECEHLIRHMLVLDPNKRLSMEQICKHKWMKLGDADPNFDRLIAECQQLKEERQVDPLNEDVLLAMEDMGLDKEQTLQSLRSDAYDHYSAIYSLLCDRHKRHKTLRLGALPSMPRALAFQAPVNIQAEQAGTAMNISVPQVQLINPENQIVEPDGTLNLDSDEGEEPSPEALVRYLSMRRHTVGVADAAEVMEDLQKLLPGFPGVNPQAPFLQVAPNVNFMHNLLPMQNLQPTGQLEYKEQSLLQPPTLQLLNGMGPLGRRASDGGANIQLHAQQLLKRPRGPSPLVTMTPAVPAVTPVDEESSDGEPDQEAVQSSTYKDSNTLHLPTERFSPVRRFSDGAASIQAFKAHLEKMGNNSSIKQLQQECEQLQKMYGGQIDERTLEKTQQQHMLYQQEQHHQILQQQIQDSICPPQPSPPLQAACENQPALLTHQLQRLRIQPSSPPPNHPNNHLFRQPSNSPPPMSSAMIQPHGAASSSQFQGLPSRSAIFQQQPENCSSPPNVALTCLGMQQPAQSQQVTIQVQEPVDMLSNMPGTAAGSSGRGISISPSAGQMQMQHRTNLMATLSYGHRPLSKQLSADSAEAHSLNVNRFSPANYDQAHLHPHLFSDQSRGSPSSYSPSTGVGFSPTQALKVPPLDQFPTFPPSAHQQPPHYTTSALQQALLSPTPPDYTRHQQVPHILQGLLSPRHSLTGHSDIRLPPTEFAQLIKRQQQQRQQQQQQQQQQEYQELFRHMNQGDAGSLAPSLGGQSMTERQALSYQNADSYHHHTSPQHLLQIRAQECVSQASSPTPPHGYAHQPALMHSESMEEDCSCEGAKDGFQDSKSSSTLTKGCHDSPLLLSTGGPGDPESLLGTVSHAQELGIHPYGHQPTAAFSKNKVPSREPVIGNCMDRSSPGQAVELPDHNGLGYPARPSVHEHHRPRALQRHHTIQNSDDAYVQLDNLPGMSLVAGKALSSARMSDAVLSQSSLMGSQQFQDGENEECGASLGGHEHPDLSDGSQHLNSSCYPSTCITDILLSYKHPEVSFSMEQAGV

SEQ ID NO: 6474 - protein, 521 aa, Homo sapiens
MPRKKAAAAAWEEPSSGNGTARAGPRKRGGPAGRKRERPERCSSSSGGGSSGDEDGLELDGAPGGGKRAARPATAGKAGGAAVVITEPEHTKERVKLEGSKCKGQLLIFGATNWDLIGRKEVPKQQAAYRNLGQNLWGPHRYGCLAGVRVRTVVSGSCAAHSLLITTEGKLWSWGRNEKGQLGHGDTKRVEAPRLIEGLSHEVIVSAACGRNHTLALTETGSVFAFGENKMGQLGLGNQTDAVPSPAQIMYNGQPITKMACGAEFSMIMDCKGNLYSFGCPEYGQLGHNSDGKFIARAQRIEYDCELVPRRVAIFIEKTKDGQILPVPNVVVRDVACGANHTLVLDSQKRVFSWGFGGYGRLGHAEQKDEMVPRLVKLFDFPGRGASQIYAGYTCSFAVSEVGGLFFWGATNTSRESTMYPKAVQDLCGWRIRSLACGKSSIIVAADESTISWGPSPTFGELGYGDHKPKSSTAAQEVKTLDGIFSEQVAMGYSHSLVIARDESETEKEKIKKLPEYNAAL

SEQ ID NO: 6475 - protein, 521 aa, Homo sapiens; identical to SEQ ID NO: 6474

SEQ ID NO: 6476 - protein, 183 aa, Homo sapiens
MTDQTYCDRLVQDTPFLTGHGRLSEQQVDRIILQLNRYYPQILTNKEAEKFRNPKASLRVRLCDLLSHLQRSGERDCQEFYRALYIHAQPLHSRLPSRHALQNSDCTELDSGSQSGELSNRGPMSFLAGLGLAVGLALLLYCYPPDPKGLPGTRRVLGFSPVIIDRHVSRYLLAFLADDLGGL

SEQ ID NO: 6477 - protein, 163 aa, Homo sapiens
MLDLLDIEGLYPLYNRVERYLEEFPEERKTLQIDGPYDEAFYQKLLDLSTEDDGTVAFALTKVQQYRVAMTAKDCSIMIALSPCLQDASSDQRPVVPSSRSRFAFSVSVLDLDLKPYESIPHQYKLDGKIVNYYSKTVRAKDNAVMSTRFKESEDCTLVLHKV

SEQ ID NO: 6478 - protein, 258 aa, Homo sapiens
MARPPVPGSVVVPNWHESAEGKEYLACILRKNRRRVFGLLERPVLLPPVSIDTASYKIFVSGKSGVGKTALVAKLAGLEVPVVHHETTGIQTTVVFWPAKLQASSRVVMFRFEFWDCGESALKKFDHMLLACMENTDAFLFLFSFTDRASFEDLPGQLARIAGEAPGVVRMVIGSKFDQYMHTDVPERDLTAFRQAWELPLLRVKSVPGRRLADGRTLDGRAGLADVAHILNGLAEQLWHQDQVAAGLLPNPPESAPE

SEQ ID NO: 6479 - protein, 110 aa, Homo sapiens
MADKVLKEKRKQFIRSVGEGTINGLLGELLETRVLSQEEIEIVKCENATVMDKARALLDSVIRKGAPACQICITYICEEDSHLAGTLGLSAGPTSGNHLTTQDSQIVLPS

SEQ ID NO: 6480 - protein, 307 aa, Homo sapiens
MEPSSLELPADTVQRIAAELKCHPTDERVALHLDEEDKLRHFRECFYIPKIQDLPPVDLSLVNKDENAIYFLGNSLGLQPKMVKTYLEEELDKWAKIAAYGHEVGKRPWITGDESIVGLMKDIVGANEKEIALMNALTVNLHLLMLSFFKPTPKRYKILLEAKAFPSDHYAIESQLQLHGLNIEESMRMIKPREGEETLRIEDILEVIEKEGDSIAVILFSGVHFYTGQHFNIPAITKAGQAKGCYVGFDLAHAVGNVELYLHDWGVDFACWCSYKYLNAGAGGIAGAFIHEKHAHTIKPARSEFFN

SEQ ID NO: 6481 - protein, 1019 aa, Homo sapiens
MEPGEVKDRILENISLSVKKLQSYFAACEDEIPAIRNHDKVLQRLCEHLDHALLYGLQDLSSGYWVLVVHFTRREAIKQIEVLQHVATNLGRSRAWLYLALNENSLESYLRLFQENLGLLHKYYVKNALVCSHDHLTLFLTLVSGLEFIRFELDLDAPYLDLAPYMPDYYKPQYLLDFEDRLPSSVHGSDSLSLNSFNSVTSTNLEWDDSAIAPSSEDYDFGDVFPAVPSVPSTDWEDGDLTDTVSGPRSTASDLTSSKASTRSPTQRQNPFNEEPAETVSSSDTTPVHTTSQEKEEAQALDPPDACTELEVIRVTKKKKIGKKKKSRSDEEASPLHPACSQKKCAKQGDGDSRNGSPSLGRDSPDTMLASPQEEGEGPSSTTESSERSEPGLLIPEMKDTSMERLGQPLSKVIDQLNGQLDPSTWCSRAEPPDQSFRTGSPGDAPERPPLCDFSEGLSAPMDFYRFTVESPSTVTSGGGHHDPAGLGQPLHVPSSPEAAGQEEEGGGGEGQTPRPLEDTTREAQELEAQLSLVREGPVSEPEPGTQEVLCQLKRDQPSPCLSSAEDSGVDEGQGSPSEMVHSSEFRVDNNHLLLLMIHVFRENEEQLFKMIRMSTGHMEGNLQLLYVLLTDCYVYLLRKGATEKPYLVEEAVSYNELDYVSVGLDQQTVKLVCTNRRKQFLLDTADVALAEFFLASLKSAMIKGCREPPYPSILTDATMEKLALAKFVAQESKCEASAVTVRFYGLVHWEDPTDESLGPTPCHCSPPEGTITKEGMLHYKAGTSYLGKEHWKTCFVVLSNGILYQYPDRTDVIPLLSVNMGGEQCGGCRRANTTDRPHAFQVILSDRPCLELSAESEAEMAEWMQHLCQAVSKGVIPQGVAPSPCIPCCLVLTDDRLFTCHEDCQTSFFRSLGTAKLGDISAVSTEPGKEYCVLEFSQDSQQLLPPWVIYLSCTSELDRLLSALNSGWKTIYQVDLPHTAIQEASNKKKFEDALSLIHSAWQRSDSLCRGRASRDPWC

SEQ ID NO: 6482 - protein, 105 aa, Homo sapiens
MKPFEDALKNQPLGPVLSKAASVECISPVSPRAPDAKMLEELQAETWYQGEMSRKEAEGLLEKDGDFLVRKSTTNPGSFVLTGMHNGQAKHLLLVDPEGTRSNSY

SEQ ID NO: 6483 - protein, 105 aa, Homo sapiens; identical to SEQ ID NO: 6482

SEQ ID NO: 6484 - protein, 593 aa, Homo sapiens
MLAAKYNRFRNDSVTSVDDLLHSLSVSGGGGKVSAARATPAAAPYLVSGEALRKAPDDGPGSLGHLLHKVSHLKLSSSGLRGLSSAARERAGARLSGSCSAPSLAAPDGSAPSAPRAPAMSAARKGRPGDEPLPRPPRGAPHASDQVLGPGVTYVVKYLGCIEVLRSMRSLDFSTRTQITREAISRVCEAVPGAKGAFKKRKPPSKMLSSILGKSNLQFAGMSISLTISTASLNLRTPDSKQIIANHHMRSISFASGGDPDTTDYVAYVAKDPVNRRACHILECCDGLAQDVIGSIGQAFELRFKQYLQCPTKIPALHDRMQSLDEPWTEEEGDGSDHPYYNSIPSKMPPPGGFLDTRLKPRPHAPDTAQFAGKEQTYYQGRHLGDTFGEDWQQTPLRQGSSDIYSTPEGKLHVAPTGEAPTYVNTQQIPPQAWPAAVSSAESSPRKDLFDMKPFEDALKNQPLGPVLSKAASVECISPVSPRAPDAKMLEELQAETWYQGEMSRKEAEGLLEKDGDFLVRKSTTNPGSFVLTGMHNGQAKHLLLVDPEGTIRTKDRVFDSISHLINHHLESSLPIVSAGSELCLQQPVERKQ

SEQ ID NO: 6485 - protein, 230 aa, Homo sapiens
MNTLMDVLRHRPGWVEVKDEGEWDFYWCDVSWLRENFDHTYMDEHVRISHFRNHYELTRKNYMVKNLKRFRKQLEREAGKLEAAKCDFFPKTFEMPCEYHLFVEEFRKNPGITWIMKPDTRSSDDQKDDIPVENYVAQRYIENPYLIGGRKFDLRVYVLVMSYIPLRAWLYRDGFARFSNTRFTLNSIDDQYVHLTNVAVQKTSPDYHPKKVAPGGQCVPITDSQQPGRL

SEQ ID NO: 6486 - protein, 355 aa, Homo sapiens
MNTLMDVLRHRPGWVEVKDEGEWDFYWCDVSWLRENFDHTYMDEHVRISHFRNHYELTRKNYMVKNLKRFRKQLEREAGKLEAAKCDFFPKTFEMPCEYHLFVEEFRKNPGITWIMKPDTRSSDDQKDDIPVENYVAQRYIENPYLIGGRKFDLRVYVLVMSYIPLRAWLYRDGFARFSNTRFTLNSIDDQYVHLTNVAVQKTSPDYHPKKGCKWTLQRFRQYLASKHGPEAVETLFRDIDNIFVKSLQSVQKVIISDKHCFELYGYDILIDQDLKPWLLEVNASPSLTASSQEDYELKTCLLEDTLHVVDMEARLRQRSEETTEAALLLPSSSEESFQLIPSCQEEISLSRPCV

SEQ ID NO: 6487 - protein, 279 aa, Homo sapiens
MSRPKNQNYKGHGLSKGKEREQRASIRFKTTLMNTLMDVLRHRPGWVEVKDEGEWDFYWCDVSWLRENFDHTYMDEHVRISHFRNHYELTRKNYMVKNLKRFRKQLEREAGKLEAAKCDFFPKTFEMPCEYHLFVEEFRKNPGITWIMKPVARSQGKGIFLFRRLKDIVDWRKDTRSSDDQKDDIPVENYVAQRYIENPYLIGGRKFDLRVYVLVMSMFTSPTWLCKKHLPTTTQRRAASGRCSASGSTWRPNTGPRQWRHSSGTSTTSLSKACRVCRR

SEQ ID NO: 6488 - protein, 371 aa, Homo sapiens
MSRPKNQNYKGHGLSKGKEREQRASIRFKTTLMNTLMDVLRHRPGWVEVKDEGEWDFYWCDVSWLRENLEREAGKLEAAKCDFFPKTFEMPCEYHLFVEEFRKNPGITWIMKPVARSQGKGIFLFRRLKDIVDWRKDTRSSDDQKDDIPVENYVAQRYIENPYLIGGRKFDLRVYVLVMSYIPLRAWLYRDGFARFSNTRFTLNSIDDQYVHLTNVAVQKTSPDYHPKKLHPTVGPLCIHSPENGSLSVTPWPWDAHMGCKWTLQRFRQYLASKHGPEAVETLFRDIDNIFVKSLQSVQKVIISDKHCFELYGYDILIDQDLKPWLLEVNASPSLTASSQEDYELKTCLLEDTLHVVDMEASFSPIIPAEV

SEQ ID NO: 6489 - protein, 439 aa, Homo sapiens
MVPSREALLGPGTTAIRCPKKLQNQNYKGHGLSKGKEREQRASIRFKTTLMNTLMDVLRHRPGWVEVKDEGEWDFYWCDVSWLRENFDHTYMDEHVRISHFRNHYELTRKNYMVKNLKRFRKQLEREAGKLEAAKCDFFPKTFEMPCEYHLFVEEFRKNPGITWIMKPVARSQGKGIFLFRRLKDIVDWRKDTRSSDDQKDDIPVENYVAQRYIENPYLIGGRKFDLRVYVLVMSVFAECLLWSGHRRQDVHLTNVAVQKTSPDYHPKKGCKWTLQRFRQYLASKHGPEAVETLFRDIDNIFVKSLQSVQKVIISDKHCFELYGYDILIDQDLKPWLLEVNASPSLTASSQEDYELKTCLLEDTLHVVDMEARLTGREKRVGGFDLMWNDGPVSREEGAPDLSGMGNFVTNTHLGCVNDRKKQLRQLFCSLQVQKKASS

SEQ ID NO: 6490 - protein, 166 aa, Homo sapiens
MKEMLAKDLEESQGGKSSEVLSATELRVQLAQKEQELARAKEALQAMKADRKRLKGEKTDLVSQMQQLYATLESREEQLRDFIRNYEQHRKESEDAVKALAKEKDLLEREKWELRRQAKEATDHATALRSQLDLKDNRMKELEAELAMAKQSLATLTKDVPKRHSL

SEQ ID NO: 6491 - protein, 775 aa, Homo sapiens
MMEDNKQLALRIDGAVQSASQEVTNLRAELTATNRRLAELSGGGGPGPGPGAAASASAAGDSAATNMENPQLGAQVLLREEVSRLQEEVHLLRQMKEMLAKDLEESQGGKSSEVLSATELRVQLAQKEQELARAKEALQAMKADRKRLKGEKTDLVSQMQQLYATLESREEQLRDFIRNYEQHRKESEDAVKALAKEKDLLEREKWELRRQAKEATDHATALRSQLDLKDNRMKELEAELAMAKQSLATLTKDVPKRHSLAMPGETVLNGNQEWVVQADLPLTAAIRQSQQTLYHSHPPHPADRQAVRVSPCHSRQPSVISDASAAEGDRSSTPSDINSPRHRTHSLCNGDSPGPVQKNLHNPIVQSLEDLEDQKRKKKKEKMGFGSISRVFARGKQRKSLDPGLFDDSDSQCSPTRQSLSLSEGEEQMDRLQQVELVRTTPMSHWKAGTVQAWLEVVMAMPMYVKACTENVKSGKVLLSLSDEDLQLGLGVCSSLHRRKLRLAIEDYRDAEAGRSLSKAAELDHHWVAKAWLNDIGLSQYSQAFQNHLVDGRMLNSLMKRDLEKHLNVSKKFHQVSILLGIELLYQVNFSREALQERRARCETQNIDPVVWTNQRVLKWVRDIDLKEYADNLTNSGVHGAVLVLEPTFNAEAMATALGIPSGKHILRRHLAEEMSAVFHPANSTGIREAERFGTPPGRASSVTRAGKEENSSGLKYKAGRLPLGKIGRGFSSKDPDFHDDYGSLQNEDCGDDDPQSRLEQCRLEGYNSLEVTNV

SEQ ID NO: 6492 - protein, 286 aa, Homo sapiens
MYSLDRIFAGFRTRSQMLLGHIEEQDKVLHCQFSDNSDDEESEGQEKSGTRCRSRSWIQKPDSVCSLVELSDTQDETQKSDLENEDLKIDCLQESQELNLQKLKNSERILTEAKQKMRELTINIKMKEDLIKELIKTGNDAKSVSKQYSLKVTKLEHDAEQAKVELIETQKQLQELENKDLSDVAMKVKLQKEFRKKMDAAKLRVQVLQKKQQDSKKLASLSIQNEKRANELEQSVDHMKYQKIQLQRKLREENEKRKQLDAVIKRDQQKIKVILSYIPAKYNMKC

SEQ ID NO: 6493 - protein, 553 aa, Homo sapiens
MNKNTSTVVSPSLLEKDPAFQMITIAKETGLGLKVLGGINRNEGPLVYIQEIIPGGDCYKDGRLKPGDQLVSVNKESMIGVSFEEAKSIITGAKLRLESAWEIAFIRQKSDNIQPENLSCTSLIEASGEYGPQASTLSLFSSPPEILIPKTSSTPKTNNDILSSCEIKTGYNKTVQIPITSENSTVGLSNTDVASAWTENYGLQEKISLNPSVRFKAEKLEMALNYLGIQPTKEQHQALRQQVQADSKGTVSFGDFVQVARNLFCLQLDEVNVGAHEISNILDSQLLPCDSSEADEMERLKCERDDALKEVNTLKEKLLESDKQRKQLTEELQNVKQEAKAVVEETRALRSRIHLAEAAQRQAHGMEMDYEEVIRLLEAKITELKAQLADYSDQNKESVQDLKKRIMVLDCQLRKSEMARKTFEASTEKLLHFVEAIQEVFSDNSTPLSNLSERRAVLASQTSLTPLGRNGRSIPATLALESKELVKSVRALLDMDCLPYGWEEAYTADGIKYFINHVTQTTSWIHPVMSVLNLSRSEENEEDCSRELPNQKS

SEQ ID NO: 6494 - protein, 187 aa, Homo sapiens
MAAPGALLVMGVSGSGKSTVGALLASELGWKFYDADDYHPEENRRKMGKGIPLNDQDRIPWLCNLHDILLRDVASGQRVVLACSALKKTYRDILTQGKDGVALKCEESGKEAKQAEMQLLVVHLSGSFEVISGRLLKREGHFMPPELLQSQFETLEPPAAPENFIQISVDKNVSEIIATIMETLKMK

SEQ ID NO: 6495 - protein, 377 aa, Homo sapiens
MATIPDWKLQLLARRRQEEASVRGREKAERERLSQMPAWKRGLLERRRAKLGLSPGEPSPVLGTVEAGPPDPDESAVLLEAIGPVHQNRFIRQERQQQQQQQQRSEELLAERKPGPLEARERRPSPGEMRDQSPKGRESREERLSPRETRERRLGIGGAQELSLRPLEARDWRQSPGEVGDRSSRLSEAWKWRLSPGETPERSLRLAESREQSPRRKEVESRLSPGESAYQKLGLTEAHKWRPDSRESQEQSLVQLEATEWRLRSGEERQDYSEECGRKEEWPVPGVAPKETAELSETLTREAQGNSSAGVEAAEQRPVEDGERGMKPTEGWKWTLIMSLAGKGNQHLVTCFPHPVSGGRANCPISTLIQSPWCGWG

SEQ ID NO: 6496 - protein, 740 aa, Homo sapiens
MEADGDGEELARLRSVFAACDANRSGRLEREEFRALCTELRVRPADAEAVFQRLDADRDGAITFQEFARGFLGSLRGGRRRDWGPLDPAPAVSEAGPETHDSEEDEGDEDAAAALATSCGPASPGRAWQDFQARLGDEAKFIPREEQVSTLYQNINLVEPRLIQPYEHVIKNFIREIRLQSTEMENLAIAVKRAQDKAAMQLSELEEEMDQRIQAAEHKTRKDEKRKAEEALSDLRRQYETEVGDLQVTIKKLRKLEEQSKRVSQKEDVAALKKQIYDLSMENQKVKKDLLEAQTNIAFLQSELDALKSDYADQSLNTERDLEIIRAYTEDRNSLERQIEILQTANRKLHDSNDGLRSALENSYSKFNRSLHINNISPGNTISRSSPKFIGHSPQPLGYDRSSRSSYVDEDCDSLALCDPLQRTNCEVDSLPESCFDSGLSTLRDPNEYDSEVEYKHQRGFQRSHGVQESFGGDASDTDVPDIRDEETFGLEDVASVLDWKPQGSVSEGSIVSSSRKPISALSPQTDLVDDNAKSFSSQKAYKIVLAGDAAVGKSSFLMRLCKNEFRENISATLGVDFQMKTLIVDGERTVLQLWDTAGQERFRSIAKSYFRKADGVLLLYDVTCEKSFLNIREWVDMIEDAAHETVPIMLVGNKADIRDTAATEGQKCVPGHFGEKLAMTYGALFCETSAKDGSNIVEAVLHLAREVKKRTDKDDSRSITNLTGTNSKKSPQMKNCCNG

SEQ ID NO: 6497 - protein, 1374 aa, Homo sapiens
MEENESQKCEPCLPYSADRRQMQEQGKGNLHVTSPEDAECRRTKERLSNGNSRGSVSKSSRNIPRRHTLGGPRSSKEILGMQTSEMDRKREAFLEHLKQKYPHHASAIMGHQERLRDQTRSPKLSHSPQPPSLGDPVEHLSETSADSLEAMSEGDAPTPFSRGSRTRASLPVVRSTNQTKERSLGVLYLQYGDETKQLRMPNEITSADTIRALFVSAFPQQLTMKMLESPSVAIYIKDESRNVYYELNDVRNIQDRSLLKVYNKDPAHAFNHTPKTMNGDMRMQRELVYARGDGPGAPRPGSTAHPPHAIPNSPPSTPVPHSMPPSPSRIPYGGTRSMVVPGNATIPRDRISSLPVSRPISPSPSAILERRDVKPDEDMSGKNIAMYRNEGFYADPYLYHEGRMSIASSHGGHPLDVPDHIIAYHRTAIRSASAYCNPSMQAEMHMEQSLYRQKSRKYPDSHLPTLGSKTPPASPHRVSDLRMIDMHAHYNAHGPPHTMQPDRASPSRQAFKKEPGTLVYIEKPRSAAGLSSLVDLGPPLMEKQVFAYSTATIPKDRETSEKMMKTTANRNHTDSAGTPHVSGGKMLSALESTVPPSQPPPVGTSAIHMSLLEMRRSVAELRLQLQQMRQLQLQNQELLRAMMKKAELEISGKVMETMKRLEDPVQRQRVLVEQERQKYLHEEEKIVKKLCELEDFVEDLKKDSTAASRLVTLKDVEDGAFLLRQVGEAVATLKGEFPTLQNKMRAILRIEVEAVRFLKEEPHKLDSLLKRVRSMTDVLTMLRRHVTDGLLKGTDAAQAAQYMAMEKATAAEVLKSQEEAAHTSGQPFHSTGAPGDAKSEVVPLSGMMVRHAQSSPVVIQPSQHSVALLNPAQNLPHVASSPAVPQEATSTLQMSQAPQSPQIPMNGSAMQSLFIEEIHSVSAKNRAVSIEKAEKKWEEKRQNLDHYNGKEFEKLLEEAQANIMKSIPNLEMPPATGPLPRGDAPVDKVELSDSPNSEQDLEKLGGKSPPPPPPPPRRSYLPGSGLTTTRSGDVVYTGRKENITAKASSEDAGPSPQTRATKYPAEEPASAWTPSPPPVTTSSSKDEEEEEEEGDKIMAELQAFQKCSFMDVNSNSHAEPSRADSHVKDTRSGATVPPKEKKNLEFFHEDVRKSDVEYENGPQMEFQKGSSGAPQTSRMPVPMSAKNRPGTLDKPGKQSKLQDPRQYRQANGSAKKSGGDFKPTSPSLPASKIPALSPSSGKSSSLPSSSGDSSNLPNPPATKPSIASNPLSPQTGPPAHSASLIPSVSNGSLKFQSLTHTGKGHHLSFSPQSQNGRAPPPLSFSSSPPSPASSVSLNQGAKGTRTIHTPSLTSYKAQNGSSSKATPSTAKETS

SEQ ID NO: 6498 - protein, 1945 aa, Homo sapiens
MEENESQKCEPCLPYSADRRQMQEQGKGNLHVTSPEDAECRRTKERLSNGNSRGSVSKSSRNIPRRHTLGGPRSSKEILGMQTSEMDRKREAFLEHLKQKYPHHASAIMGHQERLRDQTRSPKLSHSPQPPSLGDPVEHLSETSADSLEAMSEGDAPTPFSRGSRTRASLPVVRSTNQTKERSLGVLYLQYGDETKQLRMPNEITSADTIRALFVSAFPQQLTMKMLESPSVAIYIKDESRNVYYELNDVRNIQDRSLLKVYNKDPAHAFNHTPKTMNGDMRMQRELVYARGDGPGAPRPGSTAHPPHAIPNSPPSTPVPHSMPPSPSRIPYGGTRSMVVPGNATIPRDRISSLPVSRPISPSPSAILERRDVKPDEDMSGKNIAMYRNEGFYADPYLYHEGRMSIASSHGGHPLDVPDHIIAYHRTAIRSASAYCNPSMQAEMHMEQSLYRQKSRKYPDSHLPTLGSKTPPASPHRVSDLRMIDMHAHYNAHGPPHTMQPDRASPSRQAFKKEPGTLVYIEKPRSAAGLSSLVDLGPPLMEKQVFAYSTATIPKDRETRERMQAMEKQIASLTGLVQSALFKGPITSYSKDASSEKMMKTTANRNHTDSAGTPHVSGGKMLSALESTVPPSQPPPVGTSAIHMSLLEMRRSVAELRLQLQQMRQLQLQNQELLRAMMKKAELEISGKVMETMKRLEDPVQRQRVLVEQERQKYLHEEEKIVKKLCELEDFVEDLKKDSTAASRLVTLKDVEDGAFLLRQVGEAVATLKGEFPTLQNKMRAILRIEVEAVRFLKEEPHKLDSLLKRVRSMTDVLTMLRRHVTDGLLKGTDAAQAAQYMAMEKATAAEVLKSQEEAAHTSGQPFHSTGAPGDAKSEVVPLSGMMVRHAQSSPVVIQPSQHSVALLNPAQNLPHVASSPAVPQEATSTLQMSQAPQSPQIPMNGSAMQSLFIEEIHSVSAKNRAVSIEKAEKKWEEKRQNLDHYNGKEFEKLLEEAQANIMKSIPNLEMPPATGPLPRGDAPVDKVELSEDSPNSEQDLEKLGGKSPPPPPPPPRRSYLPGSGLTTTRSGDVVYTGARGSENITAKASSEDAGPSPQTRATKYPAEEPASAWTPSPPPVTTSSSKDEEEEEEEGDKIMAELQAFQKCSFMDVNSNSHAEPSRADSHVKDTRSGATVPPKEKKNLEFFHEDVRKSDVEYENGPQMEFQKVTTGAVRPSDPPKWERGMENSISDASRTSEYKTEIIMKENSISNMSLLRDSRNYSQETVPKASFGFSGISPLEDEINKGSKISGLQYSIPDTENQTLNYGKTKEMEKQNTDKCHVSSHTRLTESSVHDFKTEDQEVITTDFGQVVLRPKEARHANVNPNEDGESSSSSPTEENAATDNIAFMITETTVQVLSSGEVHDIVSQKGEDIQTVNIDARKEMTPRQEGTDNEDPVVCLDKKPVIIIFDEPMDIRSAYKRLSTIFEECDEELERMMMEEKIEEEEEEENGDSVVQNNNTSQMSHKKVAPGNLRTGQQVETKSQPHSLATETRNPGGQEMNRTELNKFSHVDSPNSECKGEDATDDQFESPKKKFKFKFPKKQLAALTQAIRTGTKTGKKTLQVVVYEEEEEDGTLKQHKEAKRFEIARSQPEDTPENTVRRQEQPSIESTSPISRTDEIRKNTYRTLDSLEQTIKQLENTISEMSPKALVDTSCSSNRDSVASSSHIAQEASPRPLLVPDEGPTALEPPTSIPSASRKGSSGAPQTSRMPVPMSAKNRPGTLDKPGKQSKLQDPRQYRQANGSAKKSGGDFKPTSPSLPASKIPALSPSSGKSSSLPSSSGDSSNLPNPPATKPSIASNPLSPQTGPPAHSASLIPSVSNGSLKFQSLTHTGKGHHLSFSPQSQNGRAPPPLSFSSSPPSPASSVSLNQGAKGTRTIHTPSLTSYKAQNGSSSKATPSTAKETS

SEQ ID NO: 6499 - protein, 1264 aa, Homo sapiens
MQTSEMDRKREAFLEHLKQKYPHHASAIMGHQERLRDQTRSPKLSHSPQPPSLGDPVEHLSETSADSLEAMSEGDAPTPFSRGSRTRASLPVVRSTNQTKERSLGVLYLQYGDETKQLRMPNEITSADTIRALFVSAFPQQLTMKMLESPSVAIYIKDESRNVYYELNDVRNIQDRSLLKVYNKDPAHAFNHTPKTMNGDMRMQRELVYARGDGPGAPRPGSTAHPPHAIPNSPPSTPVPHSMPPSPSRIPYGGTRSMVVPGNATIPRDRISSLPVSRPISPSPSAILERRDVKPDEDMSGKNIAMYRNEGFYADPYLYHEGRMSIASSHGGHPLDVPDHIIAYHRTAIRSASAYCNPSMQAEMHMEQSLYRQKSRKYPDSHLPTLGSKTPPASPHRVSDLRMIDMHAHYNAHGPPHTMQPDRASPSRQAFKKEPGTLVYIEKPRSAAGLSSLVDLGPPLMEKQVFAYSTATIPKDRETRERMQAMEKQIASLTGLVQSALFKGPITSYSKDASSEKMMKTTANRNHTDSAGTPHVSGGKMLSALESTVPPSQPPPVGTSAIHMSLLEMRRSVAELRLQLQQMRQLQLQNQELLRAMMKKAELEISGKVMETMKRLEDPVQRQRVLVEQERQKYLHEEEKIVKKLCELEDFVEDLKKDSTAASRLVTLKDVEDGAFLLRQVGEAVATLKGEFPTLQNKMRAILRIEVEAVRFLKEEPHKLDSLLKRVRSMTDVLTMLRRHVTDGLLKGTDAAQAAQYMAMEKATAAEVLKSQEEAAHTSGQPFHSTGAPGDAKSEVVPLSGMMVRHAQSSPVVIQPSQHSVALLNPAQNLPHVASSPAVPQEATSTLQMSQAPQSPQIPMNGSAMQSLFIEEIHSVSAKNRAVSIEKAEKKWEEKRQNLDHYNGKEFEKLLEEAQANIMKSIPNLEMPPATGPLPRGDAPVDKVELSEDSPNSEQDLEKLGGKSPPPPPPPPRRSYLPGSGLTTTRSGDVVYTGRKENITAKASSEDAGPSPQTRATKYPAEEPASAWTPSPPPVTTSSSKDEEEEEEEGDKIMAELQGSSGAPQTSRMPVPMSAKNRPGTLDKPGKQSKLQDPRQYRQANGSAKKSGGDFKPTSPSLPASKIPALSPSSGKSSSLPSSSGDSSNLPNPPATKPSIASNPLSPQTGPPAHSASLIPSVSNGSLKFQSLTHTGKGHHLSFSPQSQNGRAPPPLSFSSSPPSPASSVSLNQGAKGTRTIHTPSLTSYKAQNGSSSKATPSTAKETS

SEQ ID NO: 6500 - protein, 176 aa, Homo sapiens
MGCCGCSGGCGSGCGGCGSGSGGCGSGCGGCGSSCCVPICCCKPVCCCVPACSCSSCGSCGGSKGGCGSCGSSKGGCGSCGCSQSNCCKPCCSSSGCGSFCCQSSCSKPCCCQSSCCQSSCCKPCCCQSSCCQSSCFKPCCCQSSCCVPVCCQSSCCKPCCSQSSCCVPICCQYKI

SEQ ID NO: 6501 - protein, 170 aa, Homo sapiens
MGCCGCSGGCGSGCGGCGSGCGGCGSGCGGYGSGCGGCGSSCCVPVCCCKPVCCCVPACSCSSCGSCGGSKGDCGCGSCGGSKGGCGSCGCSQCNCCKPCCCSSGCGSCCQSSCCNPCCCQSSCCVPVCCQSSCCKPCCCQSSCCVPSSCCRSCCSKSSCCVPICCQYKI

SEQ ID NO: 6502 - protein, 722 aa, Homo sapiens
MIDSVKLRRDSAADFFSHYEYLCALQNSVPLPAVRACLREGVLDFNADRLRGVDWAPLLSTLKINKDLPLVSIKSFFQPWLGDTGSDMNKFCRSRVPAIRYKDVTFQLCKALKGCLSISSVLKNLELNGLILRERDLTILAKGLNKSASLVHLSLANCPIGDGGLEIICQGIKSSITLKTVNFTGCNLTWQGADHMAKILKYQTMRRHEETWAESLRYRRPDLDCMAGLRRITLNCNTLIGDLGACAFADSLSEDLWLRALDLQQCGLTNEGAKALLEALETNTTLVVLDIRKNPLIDHSMMKAVIKKVLQNGRSAKSEYQWITSPSVKEPSKTAKQKRRTIILGSGHKGKATIRIVGLATKKPVSSGRKHSLGKEYYAPAPLPPGVSGFLPWRTAERAKRHRGFPLIKTRDICNQLQQPGFPVTVTVESPSSSEVEEVDDSSESVHEVPEKTSIEQEALQEKLEECLKQLKEERVIRLKVDKRVSELEHENAQLRNINFSLSEALHAQSLTNMILDDEGVLGSIENSFQKFHAFLDLLKDAGLGQLATMAGIDQSDFQLLGHPQMTSTVSNPPKEEKKALEDEKPEPKQNALGQMQNIQVSICMQSAYNEGTLMKFQKITGDARIPLPLDSFPVPVSTPEGLGTSSNNLGVPATEQRQESFEGFIARMCSPSPDATSGTGSQRKEEELSRNSRSSSEKKTKTGEYTKKHSDKQHPGKDLHS

SEQ ID NO: 6503 - protein, 373 aa, Homo sapiens
MALNVAPVRDTKWLTLEVCRQFQRGTCSRSDEECKFAHPPKSCQVENGRVIACFDSLKGRCSRENCKYLHPPTHLKTQLEINGRNNLIQQKTAAAMLAQQMQFMFPGTPLHPVPTFPVGPAIGTNTAISFAPYLAPVTPGVGLVPTEILPTTPVIVPGSPPVTVPGSTATQKLLRTDKLEVCREFQRGNCARGETDCRFAHPADSTMIDTSDNTVTVCMDYIKGRCMREKCKYFHPPAHLQAKIKAAQHQANQAAVAAQAAAAAATVMAFPPGALHPLPKRQALEKSNGTSAVFNPSVLHYQQALTSAQLQQHAAFIPTGSVLCMTPATSIDNSEIISRNGMECQESALRITKHCYCTYYPVSSSIELPQTAC

SEQ ID NO: 6504 - protein, 106 aa, Homo sapiens
MTQSTAKAMKRPLEATVDLAFPPGALHPLPKRQALEKSNGTSAVFNPSVLHYQQALTSAQLQQHAAFIPTVPMMHSATSATVSAATTPATSVPFAATATANQLVYS

SEQ ID NO: 6505 - protein, 304 aa, Homo sapiens
MAKIEKNAPTMEKKPELFNIMEVDGVPTLILSKEWWEKVCNFQAKPDDLILATYPKSGTTWMHEILDMILNDGDVEKCKRAQTLDRHAFLELKFPHKEKPDLEFVLEMSSPQLIKTHLPSHLIPPSIWKENCKIVYVARNPKDCLVSYYHFHRMASFMPDPQNLEEFYEKFMSGKVVGGSWFDHVKGWWAAKDMHRILYLFYEDIKKNPKHEIHKVLEFLEKTWSGDVINKIVHHTSFDVMKDNPMANHTAVPAHIFNHSISKFMRKGMPGDWKNHFTVALNENFDKHYEKKMAGSTLNFCLEI

SEQ ID NO: 6506 - protein, 395 aa, Homo sapiens
MASAASVTSLADEVNCPICQGTLREPVTIDCGHNFCRACLTRYCEIPGPDLEESPTCPLCKEPFRPGSFRPNWQLANVVENIERLQLVSTLGLGEEDVCQEHGEKIYFFCEDDEMQLCVVCREAGEHATHTMRFLEDAAAPYREQIHKCLKCLRKEREEIQEIQSRENKRMQVLLTQVSTKRQQVISEFAHLRKFLEEQQSILLAQLESQDGDILRQRDEFDLLVAGEICRFSALIEELEEKNERPARELLTDIRSTLIRCETRKCRKPVAVSPELGQRIRDFPQQALPLQREMKMFLEKLCFELDYEPAHISLDPQTSHPKLLLSEDHQRAQFSYKWQNSPDNPQRFDRATCVLAHTGITGGRHTWVWMARVPGDSGCCQFCSPPSVLGTEVAA

SEQ ID NO: 6507 - protein, 481 aa, Homo sapiens
MASAASVTSLADEVNCPICQGTLREPVTIDCGHNFCRACLTRYCEIPGPDLEESPTCPLCKEPFRPGSFRPNWQLANVVENIERLQLVSTLGLGEEDVCQEHGEKIYFFCEDDEMQLCVVCREAGEHATHTMRFLEDAAAPYREQIHKCLKCLRKEREEIQEIQSRENKRMQVLLTQVSTKRQQVISEFAHLRKFLEEQQSILLAQLESQDGDILRQRDEFDLLVAGEICRFSALIEELEEKNERPARELLTDIRSTLIRCETRKCRKPVAVSPELGQRIRDFPQQALPLQREMKMFLENLPNHLVIPTAHISLDPQTSHPKLLLSEDHQRAQFSYKWQNSPDNPQRFDRATCVLAHTGITGGRHTWVVSIDLAHGGSCTVGVVSEDVQRKGELRLRPEEGVWAVRLAWGFVSALGSFPTRLTLKEQPRQVRVSLDYEVGWVTFTNAVTREPIYTFTASFTRKVIPFFGLWGRGSSFSLSS

SEQ ID NO: 6508 - protein, 867 aa, Homo sapiens; identical to SEQ ID NO: 5803

SEQ ID NO: 6509 - protein, 92 aa, Homo sapiens [sequence omitted]

SEQ ID NO: 6510 - protein, 843 aa, Homo sapiens
MAVEDSTLQVVVRVRPPTPRELDSQRRPVVQVVDERVLVFNPEEPDGGFPGLKWGGTHDGPKKKGKDLTFVFDRVFGEAATQQDVFQHTTHSVLDSFLQGYNCSVFAYGATGAGKTHTMLGREGDPGIMYLTTVELYRRLEARQQEKHFEVLISYQEVYNEQIHDLLEPKGPLAIREDPDKGVVVQGLSFHQPASAEQLLEILTRGNRNRTQHPTDANATSSRSHAIFQIFVKQQDRVPGLTQAVQVAKMSLIDLAGSERASSTHAKGERLREGANINRSLLALINVLNALADAKGRKTHVPYRDSKLTRLLKDSLGGNCRTVMIAAISPSSLTYEDTYNTLKYADRAKEIRLSLKSNVTSLDCHISQYATICQQLQAEVAALRKKLQVYEGGGQPPPQDLPGSPKSGPPPEHLPSSPLPPHPPSQPCTPELPAGPRALQEESLGMEAQVERAMEGNSSDQEQSPEDEDEGPAEEVPTQMPEQNPTHALPESPRLTLQPKPVVGHFSARELDGDRSKQLALKVLCVAQRQYSLLQAANLLTPDMITEFETLQQLVQEEKIEPGAEALRTSGLARGAPLAQELCSESIPVPSPLCPEPPGYTGPVTRTMARRLSGPLHTLGIPPGPNCTPAQGSRWPMEKKRRRPSALEADSPMAPKRGTKRQRQSFLPCLRRGSLPDTQPSQGPSTPKGERASSPCHSPRVCPATVIKSRVPLGPSAMQNCSTPLALPTRDLNATFDLSEEPPSKPSFHECIGWDKIPQELSRLDQPFIPRAPVPLFTMKGPKPTSSLPGTSACKKKRVASSSVSHGRSRIARLPSSTLKRPGPLYSQVTGTRDRDSLGHGGR

SEQ ID NO: 6511 - protein, 186 aa, Homo sapiens
MEPPRGPPANGAEPSRAVGTVKVYLPNKQRTVVTVRDGMSVYDSLDKALKVRGLNQDCCVVYRLIKGRKTVTAWDTAIAPLDGEELIVEVLEDVPLTMHNFVRKTFFSLAFCDFCLKFLFHGFRCQTCGYKFHQHCSSKVPTVCVDMSTNRQQFYHSVQDLSGGSRQHEAPSNRPLNELLTPQGPR

SEQ ID NO: 6512 - protein, 605 aa, Homo sapiens
MEPPRGPPANGAEPSRAVGTVKVYLPNKQRTVVTVRDGMSVYDSLDKALKVRGLNQDCCVVYRLIKGRKTVTAWDTAIAPLDGEELIVEVLEDVPLTMHNFVRKTFFSLAFCDFCLKFLFHGFRCQTCGYKFHQHCSSKVPTVCVDMSTNRQQFYHSVQDLSGGSRQHEAPSNRPLNELLTPQGPSAAQHCDPEHFPFPAPANAPLQRIRSTSTPNVHMVSTTAPMDSNLIQLTGQSFSTDAAGSRGGSDGTPRGSPSPASVSSGRKSPHSKSPAEQRERKSLADDKKKVKNLGYRDSGYYWEVPPSEVQLLKRIGTGSFGTVFRGRWHGDVAVKVLKVSQPTAEQAQAFKNEMQVLRKTRHVNILLFMGFMTRPGFAIITQWCEGSSLYHHLHVADTRFDMVQLIDVARQTAQGMDYLHAKNIIHRDLKSNNIFLHEGLTVKIGDFGLATVKTRWSGAQPLEQPSGSVLWMAAEVIRMQDPNPYSFQSDVYAYGVVLYELMTGSLPYSHIGCRDQIIFMVGRGYLSPDLSKISSNCPKAMRRLLSDCLKFQREERPLFPQILATIELLQRSLPKIERSASEPSLHRTQADELPACLLSAARLVP

SEQ ID NO: 6513 - protein, 1013 aa, Homo sapiens
MVSSDRPVSLEDEVSHSMKEMIGGCCVCSDERGWAENPLVYCDGHGCSVAVHQACYGIVQVPTGPWFCRKCESQERAARVRCELCPHKDGALKRTDNGGWAHVVCALYIPEVQFANVSTMEPIVLQSVPHDRYNKTCYICDEQGRESKAATGACMTCNKHGCRQAFHVTCAQFAGLLCEEEGNGADNVQYCGYCKYHFSKLKKSKRGSNRSYDQSLSDSSSHSQDKHHEKEKKKYKEKDKHKQKHKKQPEPSPALVPSLTVTTEKTYTSTSNNSISGSLKRLEDTTARFTNANFQEVSAHTSSGKDVSETRGSEGKGKKSSAHSSGQRGRKPGGGRNPGTTVSAASPFPQGSFSGTPGSVKSSSGSSVQSPQDFLSFTDSDLRNDSYSHSQQSSATKDVHKGESGSQEGGVNSFSTLIGLPSTSAVTSQPKSFENSPGDLGNSSLPTAGYKRAQTSGIEEETVKEKKRKGNKQSKHGPGRPKGNKNQENVSHLSVSSASPTSSVASAAGSITSSSLQKSPTLLRNGSLQSLSVGSSPVGSEISMQYRHDGACPTTTFSELLNAIHNGIYNSNDVAVSFPNVVSGSGSSTPVSSSHLPQQSSGHLQQVGALSPSAVSSAAPAVATTQANTLSGSSLSQAPSHMYGNRSNSSMAALIAQSENNQTDQDLGDNSRNLVGRGSSPRGSLSPRSPVSSLQIRYDQPGNSSLENLPPVAASIEQLLERQWSEGQQFLLEQGTPSDILGMLKSLHQLQVENRRLEEQIKNLTAKKERLQLLNAQLSVPFPTITANPSPSHQIHTFSAQTAPTTDSLNSSKSPHIGNSFLPDNSLPVLNQDLTSSGQSTSSSSALSTPPPAGQSPAQQGSGVSGVQQVNGVTVGALASGMQPVTSTIPAVSAVGGIIGALPGNQLAINGIVGALNGVMQTPVTMSQNPTPLTHTTVPPNATHPMPATLTNSASGLGLLSDQQRQILIHQQQFQQLLNSQQLTPVHRHPHFTQLPPTHFSPSMEIMQVARGS

SEQ ID NO: 6514 - protein, 1027 aa, Homo sapiens
MVSSDRPVSLEDEVSHSMKEMIGGCCVCSDERGWAENPLVYCDGHGCSVAVHQACYGIVQVPTGPWFCRKCESQERAARVRCELCPHKDGALKRTDNGGWAHVVCALYIPEVQFANVSTMEPIVLQSVPHDRYNKTCYICDEQGRESKAATGACMTCNKHGCRQAFHVTCAQFAGLLCEEEGNGADNVQYCGYCKYHFSKLKKSKRGSNRSYDQSLSDSSSHSQDKHHEKEKKKYKEKDKHKQKHKKQPEPSPALVPSLTVTTEKTYTSTSNNSISGSLKRLEDTTARFTNANFQEVSAHTSSGKDVSETRGSEGKGKKSSAHSSGQRGRKPGGGRNPGTTVSAASPFPQGSFSGTPGSVKSSSGSSVQSPQDFLSFTDSDLRNDSYSHSQQSSATKDVHKGESGSQEGGVNSFSTLIGLPSTSAVTSQPKSFENSPGDLGNSSLPTAGYKRAQTSGIEEETVKEKKRKGNKQSKHGPGRPKGNKNQENVSHLSVSSASPTSSVASAAGSITSSSLQKSPTLLRNGSLQSLSVGSSPVGSEISMQYRHDGACPTTTFSELLNAIHNDRGDSSTLTKQELKFIGIYNSNDVAVSFPNVVSGSGSSTPVSSSHLPQQSSGHLQQVGALSPSAVSSAAPAVATTQANTLSGSSLSQAPSHMYGNRSNSSMAALIAQSENNQTDQDLGDNSRNLVGRGSSPRGSLSPRSPVSSLQIRYDQPGNSSLENLPPVAASIEQLLERQWSEGQQFLLEQGTPSDILGMLKSLHQLQVENRRLEEQIKNLTAKKERLQLLNAQLSVPFPTITANPSPSHQIHTFSAQTAPTTDSLNSSKSPHIGNSFLPDNSLPVLNQDLTSSGQSTSSSSALSTPPPAGQSPAQQGSGVSGVQQVNGVTVGALASGMQPVTSTIPAVSAVGGIIGALPGNQLAINGIVGALNGVMQTPVTMSQNPTPLTHTTVPPNATHPMPATLTNSASGLGLLSDQQRQILIHQQQFQQLLNSQQLTPVHRHPHFTQLPPTHFSPSMEIMQVRK

SEQ ID NO: 6515 - protein, 188 aa, Homo sapiens; identical to SEQ ID NO: 5612

SEQ ID NO: 6516 - protein, 126 aa, Homo sapiens
MVSSDRPVSLEDEVSHSMKEMIGGCCVCSDERGWAENPLVYCDGHGCSVAVHQACYGIVQVPTGPWFCRKCESQERAARVAESRSVAQAKVQWCDLSPLQPLLPGFKRFSCLSLPNGMQFLLVSLI

SEQ ID NO: 6517 - protein, 179 aa, Homo sapiens
MVSSDRPVSLEDEVSHSMKEMIGGCCVCSDERGWAENPLVYCDGHGCSVAVHQACYGIVQVPTGPWFCRKCESQERAARVMVCNSCWLASSENVTPGYIEHHCACASPHPRCLVSNVPPVSGALMHCFWACLTTAAFFGPQSFTTCHMSFLVSRDILFYIYGFMPFISVVIWRFKKERW

SEQ ID NO: 6518 - protein, 179 aa, Homo sapiens
MGLIFAKLWSLFCNQEHKVIIVGLDNAGKTTILYQFLMNEVVHTSPTIGSNVEEIVVKNTHFLMWDIGGQESLRSSWNTYYSNTEFIILVVDSIDRERLAITKEELYRMLAHEDLRKAAVLIFANKQDMKGCMTAAEISKYLTLSSIKDHPWHIQSCCALTGEGLCQGLEWMTSRIGVR

SEQ ID NO: 6519 - protein, 1113 aa, Homo sapiens
MSQTQDYECRSHNVDLPESRIPGSNTRLEWVEIIEAARERMYANLVTGECVWDPPAGVRIKRTSENQWWELFDPNTSRFYYYNASTQRTVWHRPQGCDIIPLAKLQTLKQNTESPRASAESSPGRGSSVSREGSTSSSLEPEPDTEKAQELPARAGRPAAFGTVKEDSGSSSPPGVFLEKDYEIYRDYSADGQLLHYRTSSLRWNSGAKERMLIKVADREPSFLAAQGNGYAPDGPPGVRSRRPSGSQHSPSLQTFAPEADGTIFFPERRPSPFLKRAELPGSSSPLLAQPRKPSGDSQPSSPRYGYEPPLYEEPPVEYQAPIYDEPPMDVQFEAGGGYQAGSPQRSPGRKPRPFLQPNKQGPPSPCQQLVLTKQKCPERFLSLEYSPAGKEYVRQLVYVEQAGSSPKLRAGPRHKYAPNPGGGSYSLQPSPCLLRDQRLGVKSGDYSTMEGPELRHSQPPTPLPQAQEDAMSWSSQQDTLSSTGYSPGTRKRKSRKPSLCQATSATPTEGPGDLLVEQPLAEEQPPCGTSLAPVKRAEGEAEGARGAAEPFLAQARLAWEAQQAHFHMKQRSSWDSQQDGSGYESDGALPLPMPGPVVRAFSEDEALAQQENRHWRRGTFEKLGFPQILLEKSVSVQTNLASPEPYLHPSQSEDLAACAQFESSRQSRSGVPSSSCVFPTFTLRKPSSETDIENWASKHFNKHTQGLFRRKVSIANMLAWSSESIKKPMIVTSDRHVKKEACELFKLIQMYMGDRRAKADPLHVALEVATKGWSVQGLRDELYIQLCRQTTENFRLESLARGWELMAICLAFFPPTPKFHSYLEGYIYRHMDPVNDTKVTQHIKELLERNTKKKSKLRKKPKPYVEEPDGVAISTYAKYCYHKLQKAALTGAKKGLKKPNVEEIRHAKNAVFSPSMFGSALQEVMGMQRERYPERQLPWVQTRLSEEVLALNGDQTEGIFRVPGDIDEVNALKLQVDQWKVPTGLEDPHVPASLLKLWYRELEEPLIPHEFYEQCIAHYDSPEAAVAVVHALPRINRMVLCYLIRFLQVFVQPANVAVTKMDVSNLAMVMAPNCLRCQSDDPRVIFENTRKEMSFLRVLIQHLDTSFMEGVL

SEQ ID NO: 6520 - protein, 273 aa, Homo sapiens; identical to SEQ ID NO: 5514

SEQ ID NO: 6521 - protein, 1210 aa, Homo sapiens
MPRGEAPGPGRRGAKDEALGEESGERWSPEFHLQRKLADSSHSEQQDRNRVSEELIMVVQEMKKYFPSERRNKPSTLDALNYALRCVHSVQANSEFFQILSQNGAPQADVSMYSLEELATIASEHTSKNTDTFVAVFSFLSGRLVHISEQAALILNRKKDVLASSHFVDLLAPQDMRVFYAHTARAQLPFWNNWTQRAAARYECAPVKPFFCRIRGGEDRKQEKCHSPFRIIPYLIHVHHPAQPELESEPCCLTVVEKIHSGYEAPRIPVNKRIFTTTHTPGCVFLEVDEKAVPLLGYLPQDLIGTSILSYLHPEDRSLMVAIHQKVLKYAGHPPFEHSPIRFCTQNGDYIILDSSWSSFVNPWSRKISFIIGRHKVRTSPLNEDVFATKIKKMNDNDKDITELQEQIYKLLLQPVHVSVSSGYGSLGSSGSQEQLVSIASSSEASGHRVEETKAEQMTLQQVYASVNKIKNLGQQLYIESMTKSSFKPVTGTRTEPNGGGESANGGGECKTFTSFHQTLKNNSVYTEPCEDLRNDEHSPSYQQINCIDSVIRYLKSYNIPALKRKCISCTNTTSSSSEEDKQNHKADDVQALQAGLQIPAIPKSEMPTNGRSIDTGGGAPQILSTAMLSLGSGISQCGYSSTIVHVPPPETARDATLFCEPWTLNMQPAPLTSEEFKHVGLTAAVLSAHTQKEEQNYVDKFREKILSSPYSSYLQQESRSKAKYSYFQGDSTSKQTRSAGCRKGKHKRKKLPEPPDSSSSNTGSGPRRGAHQNAQPCCPSAASSPHTSSPTFPPAAMVPSQAPYLVPAFPLPAATSPGREYAAPGTAPEGLHGLPLSEGLQPYPAFPFPYLDTFMTVFLPDPPVCPLLSPSFLPCPFLGATASSAISPSMSSAMSPTLDPPPSVTSQRREEEKWEAQSEGHPFITSRSSSPLQLNLLQEEMPRPSESPDQMRRNTCPQTEYQCVTGNNGSESSPATTGALSTGSPPRENPSHPTASALSTGSPPMKNPSHPTASALSTGSPPMKNPSHPTASTLSMGLPPSRTPSHPTATVLSTGSPPSESPSRTGSAASGSSDSSIYLTSSVYSSKISQNGQQSQDVQKKETFPNVAEEPIWRMIRQTPERILMTYQVPERVKEVVLKEDLEKLESMRQQQPQFSHGQKEELAKVYNWIQSQTVTQEIDIQACVTCENEDSADGAATSCGQVLVEDSC

SEQ ID NO: 6522 - protein, 378 aa, Homo sapiens
MPRGEAPGPGRRGAKDEALGEESGERWSPEFHLQRKLADSSHSEQQDRNRVSEELIMVVQEMKKYFPSERRNKPSTLDALNYALRCVHSVQANSEFFQILSQNGAPQADVSMYSLEELATIASEHTSKNTDTFVAVFSFLSGRLVHISEQAALILNRKKDVLASSHFVDLLAPQDMRVFYAHTARAQLPFWNNWTQRAARYECAPVKPFFCRIRGGEDRKQEKCHSPFRIIPYLIHVHHPAQPELESEPCCLTVVEKIHSGYEAPRIPVNKRIFTTTHTPGCVFLEVDEKAVPLLGYLPQDLIGTSILSYLHPEDRSLMVAIHQKVLKYAGHPPFEHSPIRFCTQNGDYIILDSSWSSFVNPWSRKISFIIGRHKVRT

SEQ ID NO: 6523 - protein, 597 aa, Homo sapiens
MERPAPLAVLPFSDPAHALSLLRGLSQLRAERKFLDVTLEAAGGRDFPAHRAVLAAASPYFRAMFAGQLRESRAERVRLHGVPPDMLQLLLDFSYTGRVAVSGDNAEPLLRAADLLQFPAVKEACGAFLQQQLDLANCLDMQDFAEAFSCSGLASAAQRFILRHVGELGAEQLERLPLARLLRYLRDDGLCVPKEEAAYQLALRWVRADPPRRAAHWPQLLEAVRLPFVRRFYLLAHVEAEPLVARCPPCLRLLREARDFQAARYDRHDRGPCPRMRPRPSTGLAEILVLVGGCDQDCDELVTVDCYNPQTGQWRYLAEFPDHLGGGYSIVALGNDIYVTGGSDGSRLYDCVWRYNSSVNEWAEVAPMLKAREYHSSSVLDGLLYVVAADSTERYDHTTDSWEALQPMTYPMDNCSTTACRGRLYAIGSLAGKETMVMQCYDPDTDLWSLVDCGQLPPWSFAPKTATLNGLMYFVRDDSAEVDVYNPTRNEWDKIPSMNQVHVGGSLAVLGGKLYVSGGYDNTFELSDVVEAYDPETRAWSVVGRLPEPTFWHGSVSIFRQFMPQTFSGGRGFELDSGSDDMDPGRPRPPRDPDELH

SEQ ID NO: 6524 - protein, 539 aa, Homo sapiens
MERPAPLAVLPFSDPAHALSLLRGLSQLRAERKFLDVTLEAAGGRDFPAHRAVLAAASPYFRAMFAGQLRESRAERVRLHGVPPDMLQLLLDFSYTGRVAVSGDNAEPLLRAADLLQFPAVKEACGAFLQQQLDLANCLDMQDFAEAFSCSGLASAAQRFILRHVGELGAEQLERLPLARLLRYLRDDGLCVPKEEAAYQLALRWVRADPPRRAAHWPQLLEAVRLPFVRRFYLLAHVEAEPLVARCPPCLRLLREARDFQAARYDRHDRGPCPRMRPRPSTGLAEILVLVGGCDQDCDELVTVDCYNPQTGQWRYLAEFPDHLGGGYSIVALGNDIYVTGGSDGSRLYDCVWRYNSSVNEWAEVAPMLKAREYHSSSVLDGLLYVVAADSTERYDHTTDSWEALQPMTYPMDNCSTTACRGRLYAIGSLAGKETMVMQCYDPDTDLWSLVDCGQLPPWSFAPKTATLNGLMYFVRDDSAEVDVYNPTRNEWDKIPSMNQVNFQAGQHWKHRLVLILQPKCHRDECLGSTAMMGGSHLN

SEQ ID NO: 6525 - protein, 688 aa, Homo sapiens
MDGSFVQHSVRVLQELNKQREKGQYCDATLDVGGLVFKAHWSVLACCSHFFQSLYGDGSGGSVVLPAGFAEIFGLLLDFFYTGHLALTSGNRDQVLLAARELRVPEAVELCQSFKPKTSVGQAAGGQSGLGPPASQNVNSHVKEPAGLEEEEVSRTLGLVPRDQEPRGSHSPQRPQLHSPAQSEGPSSLCGKLKQALKPCPLEDKKPEDCKVPPRPLEAEGAQLQGGSNEWEVVVQVEDDGDGDYMSEPEAVLTRRKSNVIRKPCAAEPALSAGSLAAEPAENRKGTAVPVECPTCHKKFLSKYYLKVHNRKHTGEKPFECPKCGKCYFRKENLLEHEARNCMNRSEQVFTCSVCQETFRRRMELRVHMVSHTGEMPYKCSSCSQQFMQKKDLQSHMIKLHGAPKPHACPTCAKCFLSRTELQLHEAFKHRGEKLFVCEECGHRASSRNGLQMHIKAKHRNERPHVCEFCSHAFTQKANLNMHLRTHTGEKPFQCHLCGKTFRTQASLDKHNRTHTGERPFSCEFCEQRFTEKGPLLRHVASRHQEGRPHFCQICGKTFKAVEQLRVHVRRHKGVRKFECTECGYKFTRQAHLRRHMEIHDRVENYNPRQRKLRNLIIEDEKMVVVALQPPAELEVGSAEVIVESLAQGGLASQLPGQRLCAEESFTGPGVLEPSLIITAAVPEDCDT

SEQ ID NO: 6526 - protein, 174 aa, Homo sapiens
MTHCCSPCCQPTCCRTTCCRTTCWKPTTVTTCSSTPCCQPACCVSSCCQPCCRPTCCQNTCCRTTCCQPTCVTSCCQPSCCSTPCCQPTCCGSSCCGQTSCGSSCGQSSSCAPVYCRRTCYYPTTVCLPGCLNQSCGSNCCQPCCRPACCETTCCRTTCFQPTCVSSCCQPSCC

SEQ ID NO: 6527 - protein, 198 aa, Homo sapiens
MVSSCCGSVCSDQGCSQDLCQETCCRPSCCQTTCCRTTCYRPSCCVSSCCRPQCCQSVCCQPTCCRPPRCCISSCCRPSCCMSSCCKPQCCQSVCCQPTTTCCHPRCCISSCCRPSCCVSSCCKPQCCQSVCCQPNCCRPSCSISSCCRPSCCESSCCRPCCCVRPVCGRVSCHTTCYRPTCVISSCPRPLCCASSCC

SEQ ID NO: 6528 - protein, 431 aa, Homo sapiens
MTSDCSSTHCSPESCGTASGCAPASSCSVETACLPGTCATSRCQTPSFLSRSRGLTGCLLPCYFTGSCNSPCLVGNCAWCEDGVFTSNEKETMQFLNDRLASYLEKVRSLEETNAELESRIQEQCEQDIPMVCPDYQRYFNTIEDLQQKILCTKAENSRLAVQLDNCKLATDDFKSKYESELSLRQLLEADISSLHGILEELTLCKSDLEAHVESLKEDLLCLKKNHEEEVNLLREQLGDRLSVELDTAPTLDLNRVLDEMRCQCETVLANNRREAEEWLAVQTEELNQQQLSSAEQLQGCQMEILELKRTASALEIELQAQQSLTESLECTVAETEAQYSSQLAQIQCLIDNLENQLAEIRCDLERQNQEYQVLLDVKARLEGEINTYWGLLDSEDSRLSCSPCSTTCTSSNTCEPCSAYVICTVENCCL

SEQ ID NO: 6529 - protein, 348 aa, Homo sapiens
MAGSLPPCVVDCGTGYTKLGYAGNTEPQFIIPSCIAIRESAKVVDQAQRRVLRGVDDLDFFIGDEAIDKPTYATKWPIRHGIIEDWDLMERFMEQVVFKYLRAEPEDHYFLMTEPPLNTPENREYLAEIMFESFNVPGLYIAVQAVLALAASWTSRQVGERTLTGIVIDSGDGVTHVIPVAEGYVIGSCIKHIPIAGRDITYFIQQLLREREVGIPPEQSLETAKAIKEKYCYICPDIVKEFAKYDVDPRKWIKQYTGINAINQKKFVIDVGYERFLGPEIFFHPEFANPDFMESISDVVDEVIQNCPIDVRRPLYKPEFFQVCHTKKDYEEYGPSICRHNPVFGVMS

SEQ ID NO: 6530 - protein, 90 aa, Homo sapiens; identical to SEQ ID NO: 4795

SEQ ID NO: 6531 - protein, 82 aa, Homo sapiens
MASSSGAGAAAAAAAANLNAVRETMDVLLEISRILNTGLDMETLSICVRLCEQGINPEALSSVIKELRKATEALKAAENMTS

SEQ ID NO: 6532 - protein, 1245 aa, Homo sapiens
METRAAENTAIFMCKCCNLFSPNQSELLSHVSEKHMEEGVNVDEIIIPLRPLSTPEPPNSSKTGDEFLVMKRKRGRPKGSTKKSSTEEELAENIVSPTEDSPLAPEEGNSLPPSSLECSKCCRKFSNTRQLRKHICIIVLNLGEEEGEAGNESDLELEKKCKEDDREKASKRPRSQKTEKVQKISGKEARQLSGAKKPIISVVLTAHEAIPGATKIVPVEAGPPETGATNSETTSADLVPRRGYQEYAIQQTPYEQPMKSSRLGPTQLKIFTCEYCNKVFKFKHSLQAHLRIHTNEKPYKCPQCSYASAIKANLNVHLRKHTGEKFACDYCSFTCLSKGHLKVHIERVHKKIKQHCRFCKKKYSDVKNLIKHIRDAHDPQDKKVKEALDELCLMTREGKRQLLYDCHICERKFKNELDRDRHMLVHGDKWPFACELCGHGATKYQALELHVRKHPFVYVCAVCRKKFVSSIRLRTHIKEVHGAAQEALVFTSSINQSFCLLEPGGDIQQEALGDQLQLVEEEFALQGVNALKEEACPGDTQLEEGRKEPEAPGEMPAPAVHLASPQAESTALPPCELETTVVSSSDLHSQEVVSDDFLLKNDTSSAEAHAAPEKPPDMQHRSSVQTQGEVITLLLSKAQSAGSDQESHGAQSPLGEGQNMAVLSAGDPDPSRCLRSNPAEASDLLPPVAGGGDTITHQPDSCKAAPEHRSGITAFMKVLNSLQKKQMNTSLCERIRKVYGDLECEYCGKLFWYQVHFDMHVRTHTREHLYYCSQCHYSSITKNCLKRHVIQKHSNILLKCPTDGCDYSTPDKYKLQAHLKVHTALDKRSYSCPVCEKSFSEDRLIKSHIKTNHPEVSMSTISEVLGRRVQLKGLIGKRAMKCPYCDFYFMKNGSDLQRHIWAHEGVKPFKCSLCEYATRSKSNLKAHMNRHSTEKTHLCDMCGKKFKSKGTLKSHKLLHTADGKQFKCTVCDYTAAQKPQLLRHMEQHVSFKPFRCAHCHYSCNISGSLKRHYNARGSHPNEEYANVGTGELAAEVLIQQGGLKCPVCSFVYGTKWEFNRHLKNKHGLKVVEIDGDPKWETATEAPEEPSTQYLHITEAEEDVQGTQAAVAALQDLRYTSESGDRLDPTAVNILQQIIELGAETHDATALASVVAMAPGTVTVVKQVTEEEPSSNHTVMIQETVQQASVELAEQHHLVVSSDDVEGIETVTVYTQGGEASEFIVYVQEAMQPVEEQAVEQPAQEL

SEQ ID NO: 6533 - protein, 756 aa, Homo sapiens
MALGEEKAEAEASEDTKAQSYGRGSCRERELDIPGPMSGEQPPRLEAEGGLISPVWGAEGIPAPTCWIGTDPGGPSRAHQPQASDANREPVAERSEPALSGLPPATMGSGDLLLSGESQVEKTKLSSSEEFPQTLSLAATTICSGHDADTEDDPSLADLPQALDLSQQPHSSGLSCLSQWKSVLSPGSAAQPSSCSISASSTGSSLQGHQERAEPRGGSLAKVSSSLEPVVPQEPSSVVGLGPRPQWSPQPVFSGGDASGLGRRRLSFQAEYWACVLPDSLPPSPDRHSPLWNPNKEYEDLLDYTYPLRPGPQLPKHLDSRVPADPVLQDSGVDLDSFSVSPASTLKSPTNVSPNCPPAEATALPFSGPREPSLKQWPSRVPQKQGGMGLASWSQLASTPRAPGSRDARWERREPALRGAKDRLTIGKHLDMGSPQLRTRDRGWPSPRPEREKRTSQSARRPTCTESRWKSEEEVESDDEYLALPARLTQVSSLVSYLGSISTLVTLPTGDIKGQSPLEVSDSDGPASFPSSSSQSQLPPGAALQGSGDPEGQNPCFLRSFVRAHDSAGEGSLGSSQALGVSSGLLKTRPSLPARLDRWPFSDPDVEGQLPRKGGEQGKESLVQCVKTFCCQLEELICWLYNVADVTDHGTAARSNLTSLKSSLQLYRQFKKDIDEHQSLTESVLQKGEILLQCLLENTPVLEDVLGRIAKQSGELESHADRLYDSILASLDMLAGCTLIPDKKPMAAMEHPCEGV

SEQ ID NO: 6534 - protein, 179 aa, Homo sapiens
MNPSMKQKQEEIKENIKNSSVPRRTLKMIQPSASGSLVGRENELSAGLSKRKHRNDHLTSTTSSPGVIVPESSENKNLGGVTQESFDLMIKENPSSQYWKEVAEKRRKALYEALKENEKLHKEIEQKDNEIARLKKENKELAEVAEHVQYMAELIERLNGEPLDNFESLDNQEFDSEEE

SEQ ID NO: 6535 - protein, 102 aa, Homo sapiens
MNPSMKQKQEEIKENIKNSSVPRRTLKMIQPSASGSLVGRENELSAGLSKRKHRNDHLTSTTSSPGVIVPESSENKNLGGVTQESFDLMIKENPSSQYWKEV

SEQ ID NO: 6536 - protein, 751 aa, Homo sapiens
MAEPASVTVTFDDVALYFSEQEWEILEKWQKQMYKQEMKTNYETLDSLGYAFSKPDLITWMEQGRMLLISEQGCLDKTRRTTSPPTDEQLNMKNTGKLLCFDDEGTAAKEEDCRLNGPQKQDLCAALRGKERKILLAQTATFQSPSLRETEILNKKVSITAYDPDKKDLRHKPRETPGRLEIPTGPRCYSCYVCRKVFQVRRDLLKHKRSHSKSQLCRYPKYKNSSRGKSELRRTQRLLCQKKRFQCSECEKSYFLKGSLVTHQVVHTGQRPYPCPECDKTFRYRANLKKHLCLHRGERPFCCGECGRAFVQQCELTEHLRLHSGEKPFQCPQCDRCFRLKRGMKVHLTQHSGKRPFHCPECGRSFSRKAALKTHQRTHSEEKPFSCGECGRKFIYKIKLDEHIRVHTGEKPFSCPECNKSFRLKRSLKAHGLQHIGKRPFQCPECSRGFFWRNAMRAHQRLHSEQKPFPCAECGKRFTRPSKLACHTRVHDRQKEFPCGECKKTFSQQSRLTQHLKVHTTEKPFSCAECGRSFRRRAHLTEHTRLHSGEEPFQCPECDKSFSWKASMKFHQRMHRDEKPFACGECDKTYTHQSQLTEHLRLHSGEKPYQCPECEKTFRLKGNLKSHLLQHSGQKPFSCVMCGKSFTQQYRLTEHIRVHSGEKPFQCPECDKSYCIRGSLKVHLYKHSGERPFQCPECGKGFLQKRSLKAHLCLHSGERPFSCDECGRSFTYVGALKTHIAVHAKEKPSSL

SEQ ID NO: 6537 - protein, 644 aa, Homo sapiens
MFLTYMETVTKELVSWMRGHESSVFSISVHASGKYAITTSSDTAQLWDLDTFQRKRKLNIRQSVGIQKVFFLPLSNTILSCFKDNSIFAWECDTLFCKYQLPAPPESSSILYKVFAVTRDGRILAAGGKSNHLHLWCLEARQLFRIIQMPTKVRAIRHLEFLPDSFDAGSNQVLGVLSQDGIMRFINMQTCKLLFEIGSLDEGISSSAISPHGRYIASIMENGSLNIYSVQALTQEINKPPPPLVKVIEDLPKNKLSSSDLKMKVTSGRVQQPAKSRESKMQTRILKQDLTGDFESKKNELPDGLNKKRLQILLKGYGEYPTKYRMFIWRSLLQLPENHTAFSTLIDKGTHVAFLNLQKKYPIKSRKLLRVLQRTLSALAHWSVIFSDTPYLPLLAFPFVKLFQNNQLICFEVIATLIINWCQHWFEYFPNPPINILSMIENVLAFHDKELLQHFIDHDITSQLYAWPLLETVFSEVLTREEWLKLFDNIFSNHPSFLLMTVVAYNICSRTPLLSCNLKDDFEFFFHHRNNLDINVVIRQVYHLMETTPTDIHPDSMLNVFVALTKGQYPVFNQYPKFIVDYQTQERERIRNDELDYLRERQLKICKLKSTSKELKMKLGTRNRSCFVKLKKQEEKCSYKRRRK

SEQ ID NO: 6538 - protein, 244 aa, Homo sapiens
MPHKIGFVVVSSSGHEDGFSARELMIHAPTVSGWRSPRFCQFPQEIVLQMVERCRIRKLQLLAHQYMISSKIEFYISESLPEYFAPYQAERFRRLGYVSLCDNEKTGCKARELKSVYVDAVGQFLKLIFHQNHVNKYNIYNQVALVAINIIGDPADFSDESNTASREKLIDHYLGHNSEDPALEGTYASSVRTGGESTFGELKGPAVPSSVTLSVLGTSLGQWFPCHLPAVDDNEGTPFQRCLV

SEQ ID NO: 6539 - protein, 925 aa, Homo sapiens
MPHKIGFVVVSSSGHEDGFSARELMIHAPTVSGWRSPRFCQFPQEIVLQMVERCRIRKLQLLAHQYMISSKIEFYISESLPEYFAPYQAERFRRLGYVSLCDNEKTGCKARELKSVYVDAVGQFLKLIFHQNHVNKYNIYNQVALVAINIIGDPADFSDESNTASREKLIDHYLGHNSEDPALEGTYARKSDYISPLDDLAFDMYQDPEVAQIIRKLDERKREAVQKERYDYAKKLKQAIADLQKVGERLGRYEVEKRCAVEKEDYDLAKEKKQQMEQYRAEVYEQLELHSLLDAELMRRPFDLPLQPLARSGSPCHQKPMPSLPQLEERGTENQFAEPFLQEKPSSYSLTISPQHSAVDPLLPATDPHPKINAESLPYDERPLPAIRKHYGEAVVEPEMSNADISDARRGGMLGEPEPLTEKALREASSAIDVLGETLVAEAYCKTWSYREDALLALSKKLMEMPVGTPKEDLKNTLRASVFLVRRAIKDIVTSVFQASLKLLKMIITQYIPKHKLSKLETAHCVERTIPVLLTRTGDSSARLRVTAANFIQEMALFKEVKSLQIIPSYLVQPLKANSSVHLAMSQMGLLARLLKDLGTGSSGFTIDNVMKFSVSALEHRVYEVRETAVRIILDMYRQHQASILEYLPPDDSNTRRNILYKTIFEGFAKIDGRATDAEMRARRKAATEEAEKQKKEEIKALQGQLAALKEIQAEVQEKESDAVKPKNQDIQGGKAAPAEALGIPDEHYLDNLCIFCGERSESFTEEGLDLHYWKHCLMLTRCDHCKQVVEISSLTEHLLTECDKKDGFGKCYRCSEAVFKEELPRHIKHKDCNPAKPEKLANRCPLCHENFSPGEEAWKAHLMGPAGCTMNLRKTHILQKAPALQPGKSSAVAASGPLGSKAGSKIPTPKGGLSKSSSRTYAKR

SEQ ID NO: 6540 - protein, 714 aa, Homo sapiens
MARAGSCGGAAAGAGRPEPWELSLEEVLKAYEQPLNEEQAWAVCFQGCRGLRGSPGRRLRDTGDLLLRGDGSVGAREPEAAEPATMVVPLASSEAQTVQSLGFAIYRALDWGLDESEERELSPQLERLIDLMANNDSEDSGCGAADEGYGGPEEEEEAEGVPRSVRTFAQAMRLCAARLTDPRGAQAHYQAVCRALFVETLELRAFLARVREAKEMLQKLREDEPHLETPRAELDSLGHTDWARLWVQLMRELRRGVKLKKVQEQEFNPLPTEFQLTPFEMLMQDIRARNYKLRKVMVDGDIPPRVKKDAHELILDFIRSRPPLKQVSERRLRPLPPKQRSLHEKILEEIKQERRLRPVRGEGWAARGFGSLPCILNACSGDAKSTSCINLSVTDAGGSAQRPRPRVLLKAPTLAEMEEMNTSEEEESPCGEVTLKRDRSFSEHDLAQLRSEVASGLQSATHPPGGTEPPRPRAGSAHVWRPGSRDQGTCPASVSDPSHPLLSNRGSSGDRPEASMTPDAKHLWLEFSHPVESLALTVEEVMDVRRVLVKAEMEKFLQNKELFSSLKKGKICCCCRAKFPLFSWPPSCLFCKRAVCTSCSIKMKMPSKKFGHIPVYTLGFESPQRVSAAKTAPIQRRDIFQSLQGPQWQSVEEAFPHIYSHGCVLKDVCSECTSFVADVVRSSRKSVDVLNTTPRRSRQTQSLYIPNTRTLDFK

SEQ ID NO: 6541 - protein, 435 aa, Homo sapiens
MNFSEVFKLSSLLCKFSPDGKYLASCVQYRLVVRDVNTLQILQLYTCLDQIQHIEWSADSLFILCAMYKRGLVQVWSLEQPEWHCKIDEGSAGLVASCWSPDGRHILNTTEFHLRITVWSLCTKSVSYIKYPKACLQGITFTRDGRYMALAERRDCKDYVSIFVCSDWQLLRHFDTDTQDLTGIEWAPNGCVLAVWDTCLEYKILLYSLDGRLLSTYSAYEWSLGIKSVAWSPSSQFLAVGSYDGKVRILNHVTWKMITEFGHPAAINDPKIVVYKEAEKSPQLGLGCLSFPPPRAGAGPLPSSESKYEIASVPVSLQTLKPVTDRANPKIGIGMLAFSPDSYFLATRNDNIPNAVWVWDIQKLRLFAVLEQLSPVRAFQWDPQQPRLAICTGGSRLYLWSPAGCMSVQVPGEGKHIPEATDVAALLCAVWHHTG

SEQ ID NO: 6542 - protein, 272 aa, Homo sapiens
MLQLRDSVDSAGTSPTAVLAAGEEVGAGGGPGGGRPGAGTPLRQTLWPLSIHDPTRRARVKEYFVFRPGSIEQAVEEIRVVVRPVEDGEIQGVWLLTEVDHWNNEKERLVLVTEQSLLICKYDFISLQCQQVVRIALNAVDTISYGEFQFPPKSLNKREGFGIRIQWDKQSRPSFINRWNPWSTNVPYATFTEHPMAGADEKTASLCQLESFKALLIQAVKKAQKESPLPGQANGVLILERPLLIETYVGLMSFINNEAKLGYSMTRGKIGF

SEQ ID NO: 6543 - protein, 289 aa, Homo sapiens
MWPFPSRSLFPPPTQAWLQTVSSDPEAQGWGAWNETKEILGPEGGEGKEEKEEEEDAEEDQDGDAGFLLSLLEQENLAECPLPDQELEAIKMKVCAMEQAEGTPRPPGVQQQAEEEEGTAAGQLLSPETVGCPLSGTPEEKVEADHRSVYVGNVDYGGSAEELEAHFSRCGEVHRVTILCDKFSGHPKGYAYIEFATKGSVQAAVELDQSLFRGRVIKVLPKRTNFPGISSTDRGGLRGHPGSRGAPFPHSGLQGRPRLRPQGQNRTPAALTPLWARPLPWVVVSHVIK

SEQ ID NO: 6544 - protein, 421 aa, Homo sapiens
MFEILTSEFSYQHSLSILVEEFLQSKELRATVTQMEHHHLFSNILDVLGASQRFFEDLEQRHKAQVLVEDISDILEEHAEKHFHPYIAYCSNEVYQQRTLQKLISSNAAFREALREIERRPACGGLPMLSFLILPMQRVTRLPLLMDTLCLKTQGHSERYKAASRALKAISKLVRQCNEGAHRMERMEQMYTLHTQLDFSKVKSLPLISASRWLLKRGELFLVEETGLFRKIASRPTCYLFLFNDVLVVTKKKSEESYMVQDYAQMNHIQVEKIEPSELPLPGGGNRSSSVPHPFQVTLLRNSEGRQEQLLLSSDSASDRARWIVALTHSERQWQGLSSKGDLPQVEITKAFFAKQADEVTLQQADVVLVLQQEDGWLYGERLRDGETGWFPEDFARFITSRVAVEGNVRRMERLRVETDV

SEQ ID NO: 6545 - protein, 421 aa, Homo sapiens; identical to SEQ ID NO: 6544

SEQ ID NO: 6546 - protein, 709 aa, Homo sapiens
MAQRHSDSSLEEKLLGHRFHSELRLDAGGNPASGLPMVRGSPRVRDDAAFQPQVPAPPQPRPPGHEEPWPIVLSTESPAALKLGTQQLIPKSLAVASKAKTPARHQSFGAAVLSREAARRDPKLLPAPSFSLDDMDVDKDPGGMLRRNLRNQSYRAAMKGLGKPGGQGDAIQLSPKLQALAEEPSQPHTRSPAKNKKTLGRKRGHKGSFKDDPQLYQEIQERGLNTSQESDDDILDESSSPEGTQKVDATIVVKSYRPAQVTWSQLPEVVELGILDQLSTEERKRQEAMFEILTSEFSYQHSLSILVEEFLQSKELRATVTQMEHHHLFSNILDVLGASQRFFEDLEQRHKAQVLVEDISDILEEHAEKHFHPYIAYCSNEVYQQRTLQKLISSNAAFREALREIERRPACGGLPMLSFLILPMQRVTRLPLLMDTLCLKTQGHSERYKAASRALKAISKLVRQCNEGAHRMERMEQMYTLHTQLDFSKVKSLPLISASRWLLKRGELFLVEETGLFRKIASRPTCYLFLFNDVLVVTKKKSEESYMVQDYAQMNHIQVEKIEPSELPLPGGGNRSSSVPHPFQVTLLRNSEGRQEQLLLSSDSASDRARWIVALTHSERQWQGLSSKGDLPQVEITKAFFAKQADEVTLQQADVVLVLQQEDGWLYGERLRDGETGWFPEDFARFITSRVAVEGNVRRMERLRVETDV

SEQ ID NO: 6547 - protein, 428 aa, Homo sapiens
MVWQVLEGLSQDSAKRLRFVAGVIFVDEGAACGQSLEERSKTLAEVKPILQATGFPWHVVALEEVFSLPPSVLWCSAQELVGSEGAYKAAVDSFLQQQHVLGAGGGPGPTQGEEQPPQPPLDPQNLARPPAPAQTEALSQLFCSVRTLTAKEELLQTLRTHLILHMARAHGYSKVMTGDSCTRLAIKLMTNLALGRGAFLAWDTGFSDERHGDVVVVRPMRDHTLKEVAFYNRLFSVPSVFTPAVDTKAPEKASIHRLMEAFILRLQTQFPSTVSTVYRTSEKLVKGPRDGPAAGDSGPRCLLCMCALDVDAADSATAFGAQTSSRLSQMQSPIPLTETRTPPGPCCSPGVGWAQRCGQGACRREDPQACIEEQLCYSCRVNMKDLPSLDPLPPYILAEAQLRTQRAWGLQEIRDCLIEDSDDEAGQS

SEQ ID NO: 6548 - protein, 138 aa, Homo sapiens
MGEQADGKDSIARQVAPESHWPELRVLILVVSAEKKLTGSTVGMRASVETSPLLRFRAESVVPAHGGDGPLHPGARLPQLRPADHEGQQPVPRHLPRHLPPSLTSMPSPGASSTWCTASTPTTGTPRWRTPLTRAPMP

SEQ ID NO: 6549 - protein, 198 aa, Homo sapiens
MSTVDLARVGACILKHAVTGEAVELRSLWREHACVVAGLRRFGCVVCRWIAQDLSSLAGLLDQHGVRLVGVGPEALGLQEFLDGDYFAGELYLDESKQLYKELGFKRYNSLSILPAALGKPVRDVAAKAKAVGIQGNLSGDLLQSGGLLVVSKGGDKVLLHFVQKSPGDYVPKEHILQVLGISAEVCASDPPQCDREV

SEQ ID NO: 6550 - protein, 213 aa, Homo sapiens
  VARIANT 1: note = X can be any amino acid
XSRERGSRSEEPGAGNRESGSREPGLAAAAMSTVDLARVGACILKHAVTGEAVELRSLWREHACVVAGLRRFGCVVCRWIAQDLSSLAGLLDQHGVRLVGVGPEALGLQEFLDGDYFAGELYLDESKQLYKELGFKRYNSLSILPAALGKPVRDVAAKAKAVGIQGNLSGDLLQSGGLLVVSKEVPRRLRPQGAHPAGPGHLCGGLCQRPASV

SEQ ID NO: 6551 - protein, 850 aa, Homo sapiens
MAEVEAVQLKEEGNRHFQLQDYKAATNSYSQALKLTKDKALLATLYRNRAACGLKTESYVQAASDASRAIDINSSDIKALYRRCQALEHLGKLDQAFKDVQRCATLEPRNQNFQEMLRRLNTSIQEKLRVQFSTDSRVQKMFEILLDENSEADKREKAANNLIVLGREEAGAEKIFQNNGVALLLQLLDTKKPELVLAAVRTLSGMCSGHQARATVILHAVRIDRICSLMAVENEEMSLAVCNLLQAIIDSLSGEDKREHRGKEEALVLDTKKDLKQITSHLLDMLVSKKVSGQGRDQALNLLNKNVPRKDLAIHDNSRTIYVVDNGLRKILKVVGQVPDLPSCLPLTDNTRMLASILINKLYDDLRCDPERDHFRKICEEYITGKFDPQDMDKNLNAIQTVSGILQGPFDLGNQLLGLKGVMEMMVALCGSERETDQLVAVEALIHASTKLSRATFIITNGVSLLKQIYKTTKNEKIKIRTLVTSDKTILYSVATTLVNCTNSYDVKEVIPELVQLAKFSKQHVPEEHPKDKKDFIDMRVKRLLKAGVISALACMVKADSAILTDQTKELLARVFLALCDNPKDRGTIVAQGGGKALIPLALEGTDVGKVKAAHALAKIAAVSNPDIAFPGERVYEVVRPLVRLLDTQRDGLQNYEALLGLTNLSGRSDKLRQKIFKERALPDIENYMFENHDQLRQAATECMCNMVLHKEVQERFLADGNDRLKLVVLLCGEDDDKVQNAAAGALAMLTAAHKKLCLKMTQVTTQWLEILQRLCLHDQLSVQHRGLVIAYNLLAADAELAKKLVESELLEILTVVGKQEPDEKKAEVVQTARECLIKCMDYGFIKPVS

SEQ ID NO: 6552 - protein, 183 aa, Homo sapiens; identical to SEQ ID NO: 5652

SEQ ID NO: 6553 - protein, 121 aa, Homo sapiens
MFNKCSFHSSIYRPAADNSASSLCAIICFLNLVIECDLETNSEINKLIIYLFSQNNRIRFSKLLLKILFYISIFSYPELMCEQYVTFIKPGIHYGQVSKKHIIYSTFLSKNFKFQLLRVCW

SEQ ID NO: 6554 - protein, 323 aa, Homo sapiens [sequence omitted]

SEQ ID NO: 6555 - protein, 1038 aa, Homo sapiens; identical to SEQ ID NO: 5934

SEQ ID NO: 6556 - protein, 129 aa, Homo sapiens
MYRQRFLYSLYRHTHWVRCAKFSPDGRLIVSCSEDKTIKIWDTTNKQCVNNFSDSVGDLSLLFHFQKVESYLHQEVQTHRSYYGGLTLMNCIVKVLPKEISKDYILIHHHIFLISTQEHHIPMRKKLRL

SEQ ID NO: 6557 - protein, 725 aa, Homo sapiens
MHPEPSEPATGGAAELDCAQEPGVEESAGDHGSAGRGGCKEEINDPKEICVGSSDTSYHSQQKQSGDNGSGGHFAHPREDREDRGPRMTKSSLQKLCKQHKLYITPALNDTLYLHFKGFDRIENLEEYTGLRCLWLQSNGIQKIENLEAQTELRCLFLQMNLLRKIENLEPLQKLDALNLSNNYIKTIENLSCLPVLNTLQMAHNHLETVEDIQHLQECLRLCVLDLSHNKLSDPEILSILESMPDLRVLNLMGNPVIRQIPNYRRTVTVRLKHLTYLDDRPVFPKDRACAEAWARGGYAAEKEERQQWESRERKKITDSIEALAMIKQRAEERKRQRESQERGEMTSSDDGENVPASAEGKEEPPGDRETRQKMELFVKESFEAKDELCPEKPSGEEPPVEAKREDGGPEPEGTLPAETLLLSSPVEVKGEDGDGEPEGTLPAEAPPPPPPVEVKGEDGDQEPEGTLPAETLLLSPPVKVKGEDGDREPEGTLPAEAPPPPPLGAAREEPTPQAVATEGVFVTELDGTRTEDLETIRLETKETFCIDDLPDLEDDDETGKSLEDQNMCFPKIEVISSLSDDSDPELDYTSLPVLENLPTDTLSNIFAVSKDTSKAARVPFTDIFKKEAKRDLEIRKQDTKSPRPLIQELSDEDPSGQLLMPPTCQRDAAPLTSSGDRDSDFLAASSPVPTESAATPPETCVGVAQPSQALPTWDLTAFPAPKAS

SEQ ID NO: 6558 - protein, 318 aa, Homo sapiens
  VARIANT 1: note = X can be any amino acid
XGINGSEGDGAEIAEKFVFFIGSKNGGKTTIILRCLDRDEPPKPTLALEYTYGRRAKGHNTPKDIAHFWELGGGTSLLDLISIPITGDTLRTFSLVLVLDLSKPNDLWPTMENLLQATKSHVDKVIMKLGKTNAKAVSEMRQKIWNNMPKDHPDHELIDPFPVPLVIIGSKYDVFQDFESEKRKVICKTLRFVAHYYGASLMFTSKSEALLLKIRGVINQLAFGIDKSKSICVDQNKPLFITAGLDSFGQIGSPPVPENDIGKLHAHSPMELWKKVYEKLFPPKSINTLKDIKDPARDPQYAENEVDEMRIQKDLVLS

SEQ ID NO: 6559 - protein, 851 aa, Homo sapiens
MEALGPGGDRASPASSTSSLDLWHLSMRADSAYSSFSAASGGPEAAQSPGTDLLPYLDWDYVRVVWGGPGPAPPDAALCTSPRPRPAVAARSGPQPTEVPGTPGPLNRQATPLLYALAAEAEAAAQAAEPPSPPASRAAYRQRLQGAQRRVLRETSFQRKELRMSLPARLRPTVPARPPATHPRSASLSHPGGEGEPARSRAPAPGTAGRGPLANQQRKWCFSEPGKLDRVGRGGGPARECLGEACSSSGLPGPEPLEFQHPALAKFEDHEVGWLPETQPQGSMNLDSGSLKLGDAFRPASRSRSASGEVLGSWGGSGGTIPIVQAVPQGAETPRPLFQTKLSRFLPQKEAAVMYPAELPQSSPADSEQRVSETCIVPAWLPSLPDEVFLEEAPLVRMRSPPDPHASQGPPASVHASDQPYGTGLGQRTGQVTVPTEYPLHECPGTAGADDCWQGVNGSVGISRPTSHTPTGTANDNIPTIDPTGLTTNPPTAAESDLLKPVPADALGLSGNDTPGPSHNTALARGTGQPGSRPTWPSQCLEELVQELARLDPSLCDPLASQPSPEPPLGLLDGLIPLAEVRAAMRPACGEAGEEAASTFEPGSYQFSFTQLLPAPREETRLENPATHPVLDQPCGQGLPAPNNSIQGKKVELAARLQKMLQDLHTEQERLQGEAQAWARRQAALEAAVRQACAPQELERFSRFMADLERVLGLLLLLGSRLARVRRALARAASDSDPDEQASLLQRLRLLQRQEEDAKELKEHVARRERAVREVLVRALPVEELRVYCALLAGKAAVLAQQRNLDERIRLLQDQLDAIRDDLGHHAPSPSPARPPGTCPPVQPPFPLLLT

SEQ ID NO: 6560 - protein, 591 aa, Homo sapiens
MAQGSVSFNDVTVDFTQEEWQHLDHAQKTLYMDVMLENYCHLISVGCHMTKPDVILKLERGEEPWTSFAGHTCLEENWKAEDFLVKFKEHQEKYSRSVVSINHKKLVKEKSKIYEKTFTLGKNPVNSKNLPPEYDTHGRILKNVSELIISNLNPARKRLSEYNGYGKSLLSTKQETTHPEVKSHNQSARAFSHNEVLMQYQKTETPAQSFGYNDCEKSFLQRGGLITHSRPYKGENPSVYNKKRRATNIEKKHTCNECGKSFCRKSVLILHQGIHSEEKPYQCHQCGNAFRRKSYLIDHQRTHTGEKPYECNDCGKSFRQKTTLSLHQRIHTGEKPYICKECGKSFHQKANLTVHQRTHTGEKPYICNECGKSFSQKTTLALHEKTHNEEKPYICSECGKSFRQKTTLVAHQRTHTGEKSYECPHCGKAFRMKSYLIDHHRTHTGEKPYECNECGKSFSQKTNLNLHQRIHTGEKPYVCNECGKSFRQKATLTVHQKIHTGQKSYECPQCGKAFSRKSYLIHHQRTHTGEKPYKCSECGKCFRQKTNLIVHQRTHTGEKPYVCNECGKSFSYKRNLIVHQRTHKGENIEMQ

SEQ ID NO: 6561 - protein, 977 aa, Homo sapiens
MGWKPSEARGQSQSFQASGLQPRSLKAARRATGRPDRSRAARPTMDPSAHRSRAAPPNMDPDPQAGVQVGMRVVRGVDWKWGQQDGGEGGVGTVVELGRHGSPSTPDRTVVVQWDQGTRTNYRAGYQGAHDLLLYDNAQIGVRHPNIICDCCKKHGLRGMRWKCRVCLDYDLCTQCYMHNKHELAHAFDRYETAHSRPVTLSPRQGLPRIPLRGIFQGAKVVRGPDWEWGSQDGGEGKPGRVVDIRGWDVETGRSVASVTWADGTTNVYRVGHKGKVDLKCVGEAAGGFYYKDHLPRLGKPAELQRRVSADSQPFQHGDKVKCLLDTDVLREMQEGHGGWNPRMAEHHSFWVGDVVRVIGDLDTVKRLQAGHGEWTDDMAPALGRVGKVVKVFGDGNLRVAVAGQRWTFSPSCLVAYRPEEDANLDVAERARENKSSLSVALDKLRAQKSDPEHPGRLVVEVALGNAARALDLLRRRPEQVDTKNQGRTALQVAAYLGQVELIRLLLQARAGVDLPDDEGNTALHYAALGNQPEATRVLLSAGCRADAINSTQSTALHVAVQRGFLEVVRALCERGCDVNLPDAHSDTPLHSAISAGTGASGIVEVLTEVPNIDVTATNSQGFTLLHHASLKGHALAVRKILARARQLVDAKKEDGFTALHLAALNNHREVAQILIREGRCDVNVRNRKLQSPLHLAVQQAHVGLVPLLVDAGCSVNAEDEEGDTALHVALQRHQLLPLVADGAGGDPGPLQLLSRLQASGLPGSAELTVGAAVACFLALEGADVSYTNHRGRSPLDLAAEGRVLKALQGCAQRFRERQAGGGAAPGPRQTLGTPNTVTNLHVGAAPGPEAAECLVCSELALLVLFSPCQHRTVCEECARRMKKCIRCQVVVSKKLRPDGSEVASAAPAPGPPRQLVEELQSRYRQMEERITCPICIDSHIRLVFQCGHGACAPCGSALSACPICRQPIRDRIQIFV

SEQ ID NO: 6562 - protein, 753 aa, Homo sapiens
MDPDPQAGVQVGMRVVRGVDWKWGQQDGGEGGVGTVVELGRHGSPSTPDRTVVVQWDQGTRTNYRAGYQGAHDLLLYDNAQIGVRHPNIICDCCKKHGLRGMRWKCRVCLDYDLCTQCYMHNKHELAHAFDRYETAHSRPVTLSPRQGLPRIPLRGIFQGAKVVRGPDWEWGSQDGKPAELQRRVSADSQPFQHGDKVKCLLDTDVLREMQEGHGGWNPRMAEFIGQTGTVHRITDRGDVRVQFNHETRWTFHPGALTKHHSFWVGDVVRVIGDLDTVKRLQAGHGEWTDDMAPALGRVGKVVKVFGDGNLRVAVAGQRWTFSPSCLVAYRPEEDANLDVAERARENKSSLSVALDKLRAQKSDPEHPGRLVVEVALGNAARALDLLRRRPEQVDTKNQGRTALQVAAYLGQVELIRLLLQARAGVDLPDDEGNTALHYAALGNQPEATRVLLSAGCRADAINSTQSTALHVAVQRGFLEVVRALCERGCDVNLPDAHSDTPLHSAISAGTGASGIVEVLTEVPNIDVTATNSQGFTLLHHASLKGHALAVRKILARARQLVDAKKEDGFTALHLAALNNHREVAQILIREGRCDVNVRNRKLQSPLHLAVQQAHVGLVPLLVDAGCSVNAEDEEGDTALHVALQRHQLLPLVADGAGGDPGPLQLLSRLQASGLPGSAELTVGAAVACFLALEGADVSYTNHRGRSPLDLAAEGRVLKALQGCAQRFRVRAQDEEVHQVPGGRQQETAPRRL

SEQ ID NO: 6563 - protein, 386 aa, Homo sapiens
MGKDYYKILGIPSGANEDEIKKAYRKMALKYHPDKNKEPNAEEKFKEIAEAYDVLSDPKKRGLYDQYGEEGLKTGGGTSGGSSGSFHYTFHGDPHATFASFFGGSNPFDIFFASSRSTRPFSGFDPDDMDVDEDEDPFGAFGRFGFNGLSRGPRRAPEPLYPRRKVQDPPVVHELRVSLEEIYHGSTKRMKITRRRLNPDGRTVRTEDKILHIVIKRGWKEGTKITFPKEGDATPDNIPADIVFVLKDKPHAHFRRDGTNVLYSALISLKEALCGCTVNIPTIDGRVIPLPCNDVIKPGTVKRLRGEGLPFPKVPTQRGDLIVEFKVRFPDRLTPQTRQILKQQYPQHSLHSMCTQLDVHWTLATFSKMQKKATGFQENVPVPDPF

SEQ ID NO: 6564 - protein, 335 aa, Homo sapiens
MLGSGFKAERLRVNLRLVINRLKLLEKKKTELAQKARKEIADYLAAGKDERARIRVEHIIREDYLVEAMEILELYCDLLLARFGLIQSMKELDSGLAESVSTLIWAAPRLQSEVAELKIVADQLCAKYSKEYGKLCRTNQIGTVNDRLMHKLSVEAPPKILVERYLIEIAKNYNVPYEPDSVVMAEAPPGVETDLIDVGFTDDVKKGGPGRGGSGGFTAPVGGPDGTVPMPMPMPMPMPSANTPFSYPLPKGPVDDINADKNISSAQIVGPGPKPEASAKLPSRPADNYDNFVLPELPSVPDTLPTASAGASTSASEDIDFDDLSRRFEELKKKT

SEQ ID NO: 6565 - protein, 366 aa, Homo sapiens
MLGSGFKAERLRVNLRLVINRLKLLEKKKTELAQKARKEIADYLAAGKDERARIRVEHIIREDYLVEAMEILELYCDLLLARFGLIQSMKELDSGLAESVSTLIWAAPRLQSEVAELKIVADQLCAKYSKEYGKLCRTNQIGTVNDRLMHKLSVEAPPKILVERYLIEIAKNYNVPYEPDSVVMAEAPPGVETDLIDVGFTDDVKKGGPGRGGSGGFTAPVGGPDGTVPMPMPMPMPMPSANTPFSYPLPKGPSDFNGLPMGTYQAFPNIHPPQIPATPPSYESVDDINADKNISSAQIVGPGPKPEASAKLPSRPADNYDNFVLPELPSVPDTLPTASAGASTSASEDIDFDDLSRRFEELKKKT

SEQ ID NO: 6566 - protein, 315 aa, Homo sapiens
MEKYEKLAKTGEGSYGVVFKCRNKTSGQVVAVKKFVESEDDPVVKKIALREIRMLKQLKHPNLVNLIEVFRRKRKMHLVFEYCDHTLLNELERNPNGVADGVIKSVLWQTLQALNFCHIHNCIHRDIKPENILITKQGIIKICDFGFAQILIPGDAYTDYVATRWYRAPELLVGDTQYGSSVDIWAIGCVFAELLTGQPLWPGKSDVDQLYLIIRTLGKLIPRHQSIFKSNGFFHGISIPEPEDMETLEEKFSDVHPVALNFMKGCLKMNPDDRLTCSQLLESSYFDSFQEAQIKRKARNEGRNRRRQQVLPLKS

SEQ ID NO: 6567 - protein, 315 aa, Homo sapiens
MANDPLEGFHEVNLASPTSPDLLGVYESGTQEQTTSPSVIYRPHPSALSSVPIQANALDVSELPTQPVYSSPRRLNCAEISSISFHVTDPAPCSTSGVTAGLTKLTTRKDNYNAEREFLQGATITEACDGSDDIFGLSTDSLSRLRSPSVLEVREKGYERLKEELAKAQRELKLKDEECERLSKVRDQLGQELEELTASLFEEAHKMVREANIKQATAEKQLKEAQGKIDVLQAEVAALKTLVLSSSPTSPTQEPLPGGKTPFKKGHTRNKSTSSAMSGSHQDLSVIQPIVKDCKEVTHQGLSPLTLLILVSSHH

SEQ ID NO: 6568 - protein, 357 aa, Homo sapiens
MARENGESSSSWKKQAEDIKKIFEFKETLGTGAFSEVVLAEEKATGKLFAVKCIPKKALKGKESSIENEIAVLRKIKHENIVALEDIYESPNHLYLVMQLVSGGELFDRIVEKGFYTEKDASTLIRQVLDAVYYLHRMGIVHRDLKPENLLYYSQDEESKIMISDFGLSKMEGKGDVMSTACGTPGYVAPEVLAQKPYSKAVDCWSIGVIAYILLCGYPPFYDENDSKLFEQILKAEYEFDSPYWDDISDSAKDFIRNLMEKDPNKRYTCEQAARHPWIAGDTALNKNIHESVSAQIRKNFAKSKWRQAFNATAVVRHMRKLHLGSSLDSSNASVSSSLSLASQKDCAYVAKPESLS

SEQ ID NO: 6569 - protein, 385 aa, Homo sapiens
MARENGESSSSWKKQAEDIKKIFEFKETLGTGAFSEVVLAEEKATGKLFAVKCIPKKALKGKESSIENEIAVLRKIKHENIVALEDIYESPNHLYLVMQLVSGGELFDRIVEKGFYTEKDASTLIRQVLDAVYYLHRMGIVHRDLKPENLLYYSQDEESKIMISDFGLSKMEGKGDVMSTACGTPGYVAPEVLAQKPYSKAVDCWSIGVIAYILLCGYPPFYDENDSKLFEQILKAEYEFDSPYWDDISDSAKDFIRNLMEKDPNKRYTCEQAARHPWIAGDTALNKNIHESVSAQIRKNFAKSKWRQAFNATAVVRHMRKLHLGSSLDSSNASVSSSLSLASQKDCLAPSTLCSFISSSSGVSGVGAERRPRPTTVTAVHSGSK

SEQ ID NO: 6570 - protein, 295 aa, Homo sapiens
MKKEHVLHCQFSAWYPFFRGVTIKSVILPLPQNVKDYLLDDGTLVVSGRDDPPTHSQPDSDDEAEEIQWSDDENTATLTAPEFPEFATKVQEAINSLGGSVFPKLNWSAPRDAYWIAMNSSLKCKTLSDIFLLFKSSDFITRDFTQPFIHCTDDSPDPCIEYELVLRKWCELIPGAEFRCFVKENKLIVVFDIYRDSRGKVWLIDFNPFGEVTDSLLFTWEELISENNLNGDFSEVDAQEQDSPAFRCTNSEVTVQPSPYLSYRLPKDFVDLSTGEDAHKLIDFLKLKRNQQEDD

SEQ ID NO: 6571 - protein, 1090 aa, Homo sapiens
MEQPKGVDWTVIILTCQYKDSVQVFQRELEVRQKREQIPAGTLLLAVEDPEKRVGSGGATLNALLVAAEHLSARAGFTWICVGVSLWIRGCHPPGRLPEASVHRAFPLLQVVTSDVLHSAWILILHMGRDFPFDDCGRAFTCLPVENPEAPVEALVCNLDCLLDIMTYRLGPGSPPGVWVCSTDMLLSVPANPGISWDSFRGARVIALPGSPAYAQNHGVYLTDPQGLVLDIYYQGTEAEIQRCVRPDGRVPLVSGVVFFSVETAERLLATHVSPPLDACTYLGLDSGARPVQLSLFFDILHCMAENVTREDFLVGRPPELGQGDADVAGYLQSARAQLWRELRDQPLTMAYVSSGSYSYMTSSASEFLLSLTLPGAPGAQIVHSQVEEQQLLAAGSSVVSCLLEGPVQLGPGSVLQHCHLQGPIHIGAGCLVTGLDTAHSKALHGRELRDLVLQGHHTRLHGSPGHAFTLVGRLDSWERQGAGTYLNVPWSEFFKRTGVRAWDLWDPETLPAEYCLPSARLFPVLHPSRELGPQDLLWMLDHQEDGGEALRAWRASWRLSWEQLQPCLDRAATLASRRDLFFRQALHKARHVLEARQDLSLRPLIWAAVREGCPGPLLATLDQVAAGAGDPGVAARALACVADVLGCMAEGRGGLRSGPAANPEWMRPFSYLECGDLAAGVEALAQERDKWLSRPALLVRAARHYEGAGQILIRQAVMSAQHFVSTEQVELPGPGQWVVAECPARVDFSGGWSDTPPLAYELGGAVLGLAVRVDGRRPIGARARRIPEPELWLAVGPRQDEMTVKIVCRCLADLRDYCQPHAPGALLKAAFICAGIVHVHSELQLSTSSILAGTALAALQRAAGRVVGTEALIHAVLHLEQVLTTGGGWQDQVGGLMPGIKVGRSRAQLPLKVEVEEVTVPEGFVQKLNDHLLLVYTGKTRLARNLLQDVLRSWYARLPAVVQNAHSLVRQTEECAEGFRQGSLPLLGQCLTSYWEQKKLMAPGCEPLTVRRMMDVLAPHVHGQSLAGAGGGGFLYLLTKEPQQKEALEAVLAKTEGLGNYSIHLVEVDTQGLSLKLLGTEASTCCPFP

SEQ ID NO: 6572 - protein, 105 aa, Homo sapiens
MLELAQDRLQFETVEVSEPSMLQKILTTRRRETGGNEPLPVPTLQHHLAPPAEARKVPSASQVQAIKCFLSKCWSLNISTKEYAYLKGTVLFNPGKGKENDCNHH

SEQ ID NO: 6573 - protein, 470 aa, Homo sapiens
MAGENHQWQGSILYNMLMSAKQTRAAPEAPETRLVDQCWGCSCGDEPGVGREGLLGGRNVALLYRCCFCGKDHPRQGSILYSMLTSAKQTYAAPKAPEATLGPCWGCSCGSDPGVGRAGLPGGRPVALLYRCCFCGEDHPRQGSILYSLLTSSKQTHVAPAAPEARPGGAWWDRSYFAQRPGGKEALPGGRATALLYRCCFCGEDHPQQGSTLYCVPTSTNQAQAAPEERPRAPWWDTSSGALRPVALKSPQVVCEAASAGLLKTLRFVKYLPCFQVLPLDQQLVLVRNCWASLLMLELAQDRLQFETVEVSEPSMLQKILTTRRRETGGNEPLPVPTLQHHLAPPAEARKVPSASQVQAIKCFLSKCWSLNISTKEYAYLKGTVLFNPDVPGLQCVKYIQGLQWGTQQILSEHTRMTHQGPHDRFIELNSTLFLLRFINANVIAELFFRPIIGTVSMDDMMLEMLCTKI

SEQ ID NO: 6574 - protein, 675 aa, Homo sapiens
MLRATAPCWFPPGYPEAKKVAEEAALEASRHLGGEQSQAGAPEGSKMLRATAPCWFRPGYPEAKKVAKEAAPEASRHLGAEQSPAGAPEGSKMLRATAPCWFPPGYPEAKKVAEEAALEAPEFPLPSHQPAQSFGLWVPQMHKQASAFVDIQAEPQNRGPAVPPAWPKMVTESCYFPAQRGSACRLPAAPRLTERPSGVRISAPRKRKTIAHSSSPCLVTGYTDAKRTRVASSSQRSRGSKVGRQPGKTRNRSGMACKTTATTSSKRIVRRASLPSLSLKKPIILRSSGCQVPTVLRRGYLQLFTEECLKFCASKQEAEEKALNEEKVAYDCSPNKNRYLNVVLNTLKRLKGLTPSSMPGLSRAALYSRLQEFLLTQDQLKENGYPFPHPERPGGAVLFTGQGKGPGDSSCRVCCRCGTEYLVSSSGRCVRDQLCYYHWGRVRSSQVAGGRVSQYTCCAAAPGSVGCQVAKQHVRDGRKESLDGFVETFKKELSRDAYPGIYALDCEMCYTTHGLELTRVTVVDADMRVVYDTFVKPDNEIVDYNTRFSGVTEADVAKTSITLPQVQAILLSFFSAQTILIGHSLESDLLALKLIHSTVVDTAVLFPHYLGFPYKRSLRNLAADYLAQIIQDSQDGHNSSEDASACLQLVMWKVRQRAQIQPRHRSASPAALACP

SEQ ID NO: 6575 - protein, 236 aa, Homo sapiens
MHTTQKDTTYTKIFVGGLPYHTTDASLRKYFEVFGEIEEAVVITDRQTGKSRGYGFVTMADRAAAERACKDPNPIIDGRKANVNLAYLGAKPRIMQPGFAFGVQQLHPALIQRPFGIPAHYVYPQAFVQPGVVIPHVQPTAAAASTTPYIDYTGAAYAQYSAAAAAAAAAAAYDQYPYAASPAAAGYVTAGGYGYAVQQPITAAAPGTAAAAAAAAAAAAAFGQYQPQQLQTDRMQ

SEQ ID NO: 6576 - protein, 1462 aa, Homo sapiens
MAPVHGDDSLSDSGSFVSSRARREKKSKKGRQEALERLKKAKAGEKYKYEVEDFTGVYEEVDEEQYSKLVQARQDDDWIVDDDGIGYVEDGREIFDDDLEDDALDADEKGKDGKARNKDKRNVKKLAVTKPNNIKSMFIACAGKKTADKAVDLSKDGLLGDILQDLNTETPQITPPPVMILKKKRSIGASPNPFSVHTATAVPSGKIASPVSRKEPPLTPVPLKRAEFAGDDVQVESTEEEQESGAMEFEDGDFDEPMEVEEVDLEPMAAKAWDKESEPAEEVKQEADSGKGTVSYLGSFLPDVSCWDIDQEGDSSFSVQEVQVDSSHLPLVKGADEEQVFHFYWLDAYEDQYNQPGVVFLFGKVWIESAETHVSCCVMVKNIERTLYFLPREMKIDLNTGKETGTPISMKDVYEEFDEKIATKYKIMKFKSKPVEKNYAFEIPDVPEKSEYLEVKYSAEMPQLPQDLKGETFSHVFGTNTSSLELFLMNRKIKGPCWLEVKSPQLLNQPVSWCKVEAMALKPDLVNVIKDVSPPPLVVMAFSMKTMQNAKNHQNEIIAMAALVHHSFALDKAAPKPPFQSHFCVVSKPKDCIFPYAFKEVIEKKNVKVEVAATERTLLGFFLAKVHKIDPDIIVGHNIYGFELEVLLQRINVCKAPHWSKIGRLKRSNMPKLGGRSGFGERNATCGRMICDVEISAKELIRCKSYHLSELVQQILKTERVVIPMENIQNMYSESSQLLYLLEHTWKDAKFILQIMCELNVLPLALQITNIAGNIMSRTLMGGRSERNEFLLLHAFYENNYIVPDKQIFRKPQQKLGDEDEEIDGDTNKYKKGRKKAAYAGGLVLDPKVGFYDKFILLLDFNSLYPSIIQEFNICFTTVQRVASEAQKVTEDGEQEQIPELPDPSLEMGILPREIRKLVERRKQVKQLMKQQDLNPDLILQYDIRQKALKLTANSMYGCLGFSYSRFYAKPLAALVTYKGREILMHTKEMVQKMNLEVIYGDTDSIMINTNSTNLEEVFKLGNKVKSEVNKLYKLLEIDIDGVFKSLLLLKKKKYAALVVEPTSDGNYVTKQELKGLDIVRRDWCDLAKDTGNFVIGQILSDQSRDTIVENIQKRLIEIGENVLNGSVPVSQFEINKALTKDPQDYPDKKSLPHVHVALWINSQGGRKVKAGDTVSYVICQDGSNLTASQRAYAPEQLQKQDNLTIDTQYYLAQQIHPVVARICEPIDGIDAVLIATWLGLDPTQFRVHHYHKDEENDALLGGPAQLTDEEKYRDCERFKCPCPTCGTENIYDNVFDGSGTDMEPSLYRCSNIDCKASPLTFTVQLSNKLIMDIRRFIKKYYDGWLICEEPTCRNRTRHLPLQFSRTGPLCPACMKATLQPEYSDKSLYTQLCFYRYIFDAECALEKLTTDHEKDKLKKQFFTPKVLQDYRKLKNTAEQFLSRSGYSEVNLSKLFAGCAVKS

SEQ ID NO: 6577 - protein, 890 aa, Homo sapiens; identical to SEQ ID NO: 4762

SEQ ID NO: 6578 - protein, 1468 aa, Homo sapiens
MAPVHGDDCEIGASALSDSGSFVSSRARREKKSKKGRQEALERLKKAKAGEKYKYEVEDFTGVYEEVDEEQYSKLVQARQDDDWIVDDDGIGYVEDGREIFDDDLEDDALDADEKGKDGKARNKDKRNVKKLAVTKPNNIKSMFIACAGKKTADKAVDLSKDGLLGDILQDLNTETPQITPPPVMILKKKRSIGASPNPFSVHTATAVPSGKIASPVSRKEPPLTPVPLKRAEFAGDDVQVESTEEEQESGAMEFEDGDFDEPMEVEEVDLEPMAAKAWDKESEPAEEVKQEADSGKGTVSYLGSFLPDVSCWDIDQEGDSSFSVQEVQVDSSHLPLVKGADEEQVFHFYWLDAYEDQYNQPGVVFLFGKVWIESAETHVSCCVMVKNIERTLYFLPREMKIDLNTGKETGTPISMKDVYEEFDEKIATKYKIMKFKSKPVEKNYAFEIPDVPEKSEYLEVKYSAEMPQLPQDLKGETFSHVFGTNTSSLELFLMNRKIKGPCWLEVKSPQLLNQPVSWCKVEAMALKPDLVNVIKDVSPPPLVVMAFSMKTMQNAKNHQNEIIAMAALVHHSFALDKAAPKPPFQSHFCVVSKPKDCIFPYAFKEVIEKKNVKVEVAATERTLLGFFLAKVHKIDPDIIVGHNIYGFELEVLLQRINVCKAPHWSKIGRLKRSNMPKLGGRSGFGERNATCGRMICDVEISAKELIRCKSYHLSELVQQILKTERVVIPMENIQNMYSESSQLLYLLEHTWKDAKFILQIMCELNVLPLALQITNIAGNIMSRTLMGGRSERNEFLLLHAFYENNYIVPDKQIFRKPQQKLGDEDEEIDGDTNKYKKGRKKAAYAGGLVLDPKVGFYDKFILLLDFNSLYPSIIQEFNICFTTVQRVASEAQKVTEDGEQEQIPELPDPSLEMGILPREIRKLVERRKQVKQLMKQQDLNPDLILQYDIRQKALKLTANSMYGCLGFSYSRFYAKPLAALVTYKGREILMHTKEMVQKMNLEVIYGDTDSIMINTNSTNLEEVFKLGNKVKSEVNKLYKLLEIDIDGVFKSLLLLKKKKYAALVVEPTSDGNYVTKQELKGLDIVRRDWCDLAKDTGNFVIGQILSDQSRDTIVENIQKRLIEIGENVLNGSVPVSQFEINKALTKDPQDYPDKKSLPHVHVALWINSQGGRKVKAGDTVSYVICQDGSNLTASQRAYAPEQLQKQDNLTIDTQYYLAQQIHPVVARICEPIDGIDAVLIATWLGLDPTQFRVHHYHKDEENDALLGGPAQLTDEEKYRDCERFKCPCPTCGTENIYDNVFDGSGTDMEPSLYRCSNIDCKASPLTFTVQLSNKLIMDIRRFIKKYYDGWLICEEPTCRNRTRHLPLQFSRTGPLCPACMKATLQPEYSDKSLYTQLCFYRYIFDAECALEKLTTDHEKDKLKKQFFTPKVLQDYRKLKNTAEQFLSRSGYSEVNLSKLFAGCAVKS

SEQ ID NO: 6579 - protein, 132 aa, Homo sapiens
MVEPFLGTWKLVSSENFEDYMKELGVNFAARNMAGLVKPTVTISVDGKMMTIRTESSFQDTKISFKLGEEFDETTADNRKVKSTITLENGSMIHVQKWLGKETTIKRKIVDEKMVVECKMNNIVSTRIYEKV

SEQ ID NO: 6580 - protein, 184 aa, Homo sapiens
MDRGEQGLLRTDPVPEEGEDVAATISATETLSEEEQEELRRELAKVEEEIQTLSQVLAAKEKHLAEIKRKLGINSLQELKQNIAKGWQDVTATSAYKKTSETLSQAGQKASAAFSSVGSVITKKLEDVKNSPTFKSFEEKVENLKSKVGGTKPAGGDFGEVLNSAANASATTTEPLPEKTQESL

SEQ ID NO: 6581 - protein, 224 aa, Homo sapiens
MDCREMDLYEDYQSPFDFDAGVNKSYLYLSPSGNSSPPGSPTLQKFGLLRTDPVPEEGEDVAATISATETLSEEEQEELRRELAKVEEEIQTLSQVLAAKEKHLAEIKRKLGINSLQELKQNIAKGWQDVTATSAYKKTSETLSQAGQKASAAFSSVGSVITKKLEDVKNSPTFKSFEEKVENLKSKVGGTKPAGGDFGEVLNSAANASATTTEPLPEKTQESL

SEQ ID NO: 6582 - protein, 94 aa, Homo sapiens
PRAARSRGPAVSRPRAPRPELTTEAGEPARRCVPPYEHRPGMQCAVTTPPPSYYPYPNLRWDTSHFKKSGGPQRNNYVIHPEFVSETYPDYRCW

SEQ ID NO: 6583 - protein, 369 aa, Homo sapiens
MPVVTTDAESETGIPKSLSNEPPSETMEEIEHTCPQPRLTLTAPAPFADETNCQCQAPHEKLTIAQARLGTPADRPVRVYADGIFDLFHSGHARALMQAKTLFPNSYLLVGVCSDDLTHKFKGFTVMNEAERYEALRHCRYVDEVIRDAPWTLTPEFLEKHKIDFVAHDDIPYSSAGSDDVYKHIKEAGMFVPTQRTEGISTSDIITRIVRDYDVYARRNLQRGYTAKELNVSFINEKRYRFQNQVDKMKEKVKNVEERSKEFVNRVEEKSHDLIQKWEEKSREFIGNFLELFGPDGAWKQMFQERSSRMLQALSPKQSPVSSPTRSRSPSRSPSPTFSWLPLKTSPPSSPKAASASISSMSEGDEDEK

SEQ ID NO: 6584 - protein, 351 aa, Homo sapiens
MVGHQECIMEEDNRAPQLWRKTLTAPAPFADETNCQCQAPHEKLTIAQARLGTPADRPVRVYADGIFDLFHSGHARALMQAKTLFPNSYLLVGVCSDDLTHKFKGFTVMNEAERYEALRHCRYVDEVIRDAPWTLTPEFLEKHKIDFVAHDDIPYSSAGSDDVYKHIKEAGMFVPTQRTEGISTSDIITRIVRDYDVYARRNLQRGYTAKELNVSFINEKRYRFQNQVDKMKEKVKNVEERSKEFVNRVEEKSHDLIQKWEEKSREFIGNFLELFGPDGAWKQMFQERSSRMLQALSPKQSPVSSPTRSRSPSRSPSPTFSWLPLKTSPPSSPKAASASISSMSEGDEDEK

SEQ ID NO: 6585 - protein, 199 aa, Homo sapiens
MADKSKFIEYIDEALEKSKETALSHLFFTYQGIPYPITMCTSETFQALDTFEARHDDIVLASYPKCGSNWILHIVSELIYAVSKKKYKYPEFPVLECGDSEKYQNLAAGIKQIAEFLGFFLTGEQIQTISVQSTFQAMRAKSQDTHGAVGPFLFRKGEVGDWKNLFSEIQNQEMDEKFKECLAGTSLGAKLKYESYCQG

SEQ ID NO: 6586 - protein, 508 aa, Homo sapiens
MRCPKSAVTMRNEELLLSNGTANKMNGALDHSDQPDPDAIKMFVGQIPRSWSEKELKELFEPYGAVYQINVLRDRSQNPPQSKGCCFVTFYTRKAALEAQNALHNIKTLPGMHHPIQMKPADSEKSNAVEDRKLFIGMVSKKCNENDIRVMFSPFGQIEECRILRGPDGLSRGCAFVTFSTRAMAQNAIKAMHQSQTMEGCSSPIVVKFADTQKDKEQRRLQQQLAQQMQQLNTATWGNLTGLGGLTPQYLALLQQATSSSNLGAFSGIQQMAGMNALQLQNLATLAAAAAAAQTSATSTNANPLSTTSSALGALTSPVAASTPNSTAGAAMNSLTSLGTLQGLAGATVGLNNINALAGMAALNGGLGATGLTNGTAGTMDALTQAYSGIQQYAAAALPTLYSQSLLQQQSAAGSQKEGPEGANLFIYHLPQEFGDQDILQMFMPFGNVISAKVFIDKQTNLSKCFGFVSYDNPVSAQAAIQAMNGFQIGMKRLKVQLKRSKNDSKPY

SEQ ID NO: 6587 - protein, 404 aa, Homo sapiens
MGSSQEEGLRCQPSQPDHDADGHCGPDLEGAERASATPGPPGLLNSHRPADSDDTNAAGPSAALLEGLLLGGGKPSPHSTRPGPFFYIGGSNGATIISSYCKSKGWQRIHDSRRDDYTLKWCEVKSRDSYGSFREGEQLLYQLPNNKLLTTKIGLLSTLRGRARAMSKASKVPGGVQARLEKDAAAPALEDLPWTSPGYLRPQRVLRMEEFFPETYRLDLKHEREAFFTLFDETQIWICKPTASNQGKGIFLLRNQEEVAALQAKTRSMEDDPIHHKTPFRGPQARVVQRYIQNPLLVDGRKFDVRSYLLIACTTPYMIFFGHGYARLTLSLYDPHSSDLGGHLTNQFMQKKSPLYMLLKEHTVWSMEHLNRYISDTFWKARGLAKDWVFTTLKVRPLCPPVWE

SEQ ID NO: 6588 - protein, 673 aa, Homo sapiens
MDHSCTRFIHRRGPPTRTRAGFKRGKRPRIQQRPRARVSGTIPASRLHPAPASQPGPCPAPGHCPVGPAHERPMGSSQEEGLRCQPSQPDHDADGHCGPDLEGAERASATPGPPGLLNSHRPADSDDTNAAGPSAALLEGLLLGGGKPSPHSTRPGPFFYIGGSNGATIISSYCKSKGWQRIHDSRRDDYTLKWCEVKSRDSYGSFREGEQLLYQLPNNKLLTTKIGLLSTLRGRARAMSKASKVPGGVQARLEKDAAAPALEDLPWTSPGYLRPQRVLRMEEFFPETYRLDLKHEREAFFTLFDETQIWICKPTASNQGKGIFLLRNQEEVAALQAKTRSMEDDPIHHKTPFRGPQARVVQRYIQNPLLVDGRKFDVRSYLLIACTTPYMIFFGHGYARLTLSLYDPHSSDLGGHLTNQFMQKKSPLYMLLKEHTVWSMEHLNRYISDTFWKARGLAKDWVFTTLKKRMQQIMAHCFLAAKPKLDCKLGYFDLIGCDFLIDDNFKVWLLEMNSNPALHTNCEVLKEVIPGVVIETLDLVLETFRKSLRGQKMLPLLSQRRFVLLHNGEADPRPHLGGSCSLRRWPPLPTRQAKSSGPPMPHAPDQPGARRPAPPPLVPQRPRPPGPDLDSAHDGEPQAPGTEQSGTGNRHPAQEPSPGTAKEEREEPENARP

SEQ ID NO: 6589 - protein, 673 aa, Homo sapiens; identical to SEQ ID NO: 6588

SEQ ID NO: 6590 - protein, 130 aa, Homo sapiens
MTEDSQRNFRSVYYEKVGFRGVEEKKSLEILLKDDRLDTEKLCTFSQRFPLPSMYRALVWKVLLGILPPHHESHAKVMMYRKEQYLDVLHALKVVRFVSDATPQAEVYLRMYQLESGKLPRSPSFPLEPD

SEQ ID NO: 6591 - protein, 293 aa, Homo sapiens; identical to SEQ ID NO: 5899

SEQ ID NO: 6592 - protein, 266 aa, Homo sapiens
MTEDSQRNFRSVYYEKVGFRGVEEKKSLEILLKDDRLGILPPHHESHAKVMMYRKEQYLDVLHALKVVRFVSDATPQAEVYLRMYQLESGKLPRSPSFPLEPDDEVFLAIAKAMEEMVEDSVDCYWITRRFVNQLNTKYRDSLPQLPKAFEQYLNLEDGRLLTHLRMCSAAPKLPYDLWFKRCFAGCLPESSLQRVWDKVVSGSCKILVFVAVEILLTFKIKVMALNSAEKITKFLENIPQDSSDAIVSKAIDLWHKHCGTPVHSS

SEQ ID NO: 6593 - protein, 1222 aa, Homo sapiens
MMSLSVRPQRRLLSARVNRSQSFAGVLGSHERGPSLSFRSFPVFSPPGPPRKPPALSRVSRMFSVAHPAAKVPQPERLDLVYTALKRGLTAYLEVHQQEQEKLQGQIRESKRNSRLGFLYDLDKQVKSIERFLRRLEFHASKIDELYEAYCVQRRLRDGAYNMVRAYTTGSPGSREARDSLAEATRGHREYTESMCLLESELEAQLGEFHLRMKGLAGFARLCVGDQYEICMKYGRQRWKLRGRIEGSGKQVWDSEETIFLPLLTEFLSIKVTELKGLANHVVVGSVSCETKDLFAALPQVVAVDINDLGTIKLSLEVTWSPFDKDDQPSAASSVNKASTVTKRFSTYSQSPPDTPSLREQAFYNMLRRQEELENGTAWSLSSESSDDSSSPQLSGTARHSPAPRPLVQQPEPLPIQVAFRRPETPSSGPLDEEGAVAPVLANGHAPYSRTLSHISEASVDAALAEASVEAVGPESLAWGPSPPTHPAPTHGEHPSPVPPALDPGHSATSSTLGTTGSVPTSTDPAPSAHLDSVHKSTDSGPSELPGPTHTTTGSTYSAITTTHSAPSPLTHTTTGSTHKPIISTLTTTGPTLNIIGPVQTTTSPTHTMPSPTHTTASPTHTSTSPTHTPTSPTHKTSMSPPTTTSPTPSGMGLVQTATSPTHPTTSPTHPTTSPILINVSPSTSLELATLSSPSKHSDPTLPGTDSLPCSPPVSNSYTQADPMAAAPHPSPAHSSRKPLTSPAPDPSESTVQSLSPTPSPPTPAPQHSDLCLAMAVQTPVPTAAGGSGDRSLEEALGALMAALDDYRGQFPELQGLEQEVTRLESLLMQRQGLTRSRASSLSITVEHALESFSFLNEDEDEDNDVPGDRPPSSPEAGAEDSIDSPSARPLSTGCPALDAALVRHLYHCSRLLLKLGTFGPLRCQEAWALERLLREARVLEAVCEFSRRWEIPASSAQEVVQFSASRPGFLTFWDQCTERLSCFLCPVERVLLTFCNQYGARLSLRQPGLAEAVCVKFLEDALGQKLPRRPQPGPGEQLTVFQFWSFVETLDSPTMEAYVTETAEEVLLVRNLNSDDQAVVLKALRLAPEGRLRRDGLRALSSLLVHGNNKVMAAVSTQLRSLSLGPTFRERALLCFLDQLEDEDVQTRVAGCLALGCIKAPEGIEPLVYLCQTDTEAVREAARQSLQQCGEEGQSAHRRLEESLDALPRIFGPGSMASTAF

SEQ ID NO: 6594 - protein, 40 aa, Homo sapiens
MADEELEALRRQRLAELQAKHGDPGDAAQQEAKHSSTEEK

SEQ ID NO: 6595 - protein, 137 aa, Homo sapiens
MKPPAAQGSPAAAAAAAPALDSAAAEDLSDALCEFDAVLADFASPFHERHFHYEEHLERMKRRSSASVSDSSGFSDSESADSLYRNSFSFSDEKLNSPTDSTPALLSATVTPQKAKLGDTKELEAFIADLDKTLASM

SEQ ID NO: 6596 - protein, 530 aa, Homo sapiens
MPNVLLPPKESNLFKRILKCYEQKQYKNGLKFCKMILSNPKFAEHGETLAMKGLTLNCLGKKEEAYEFVRKGLRNDVKSHVCWHVYGLLQRSDKKYDEAIKCYRNALKLDKDNLQILRDLSLLQIQMRDLEGYRETRYQLLQLRPTQRASWIGYAIAYHLLKDYDMALKLLEEFRQTQQVPPNKIDYEYSELILYQNQVMREADLLQESLEHIEMYEKQICDKLLVEEIKGEILLKLGRLKEASEVFKNLIDRNAENWCYYEGLEKALQISTLEERLQIYEEISKQHPKAITPRRLPLTLVPGERFRELMDKFLRVNFSKGCPPLFTTLKSLYYNTEKVSIIQELVTNYEASLKTCDFFSPYENGEKEPPTTLLWVQYFLAQHFDKLGQYSLALDYINAAIASTPTLIELFYMKAKIYKHIGNLKEAAKWMDEAQSLDTADRFINSKCAKYMLRANMIKEAEEMCSKFTREGTSAMENLNEMQCMWFQTECISAYQRLGRYGDALKKCHEVERHSPSTWTTGGKEPQMHP

SEQ ID NO: 6597 - protein, 864 aa, Homo sapiens
MPNVLLPPKESNLFKRILKCYEQKQYKNGLKFCKMILSNPKFAEHGETLAMKGLTLNCLGKKEEAYEFVRKGLRNDVKSHVCWHVYGLLQRSDKKYDEAIKCYRNALKLDKDNLQILRDLSLLQIQMRDLEGYRETRYQLLQLRPTQRASWIGYAIAYHLLKDYDMALKLLEEFRQTQQVPPNKIDYEYSELILYQNQVMREADLLQESLEHIEMYEKQICDKLLVEEIKGEILLKLGRLKEASEVFKNLIDRNAENWCYYEGLEKALQISTLEERLQIYEEISKQHPKAITPRRLPLTLVPGERFRELMDKFLRVNFSKGCPPLFTTLKSLYYNTEKVSIIQELVTNYEASLKTCDFFSPYENGEKEPPTTLLWVQYFLAQHFDKLGQYSLALDYINAAIASTPTLIELFYMKAKIYKHIGNLKEAAKWMDEAQSLDTADRFINSKCAKYMLRANMIKEAEEMCSKFTREGTSAMENLNEMQCMWFQTECISAYQRLGRYGDALKKCHEVERHFFEITDDQFDFHTYCMRKMTLRAYVDLLRLEDILRRHAFYFKAARSAIEIYLKLYDNPLTNESKQQEINSENLSAKELKKMLSKQRRAQKKAKLEEERKHAERERQQKNQKKKRDEEEEEASGLKEELIPEKLERVENPLEEAVKFLIPLKNLVADNIDTHLLAFEIYFRKGKFLLMLQSVKRAFAINSNNPWLHECLIRFSKSVSNHSNLPDIVSKVLSQEMQKIFVKKDLESFNEDFLKRNATSLQHLLSGAKMMYFLDKSRQEKAIAIATRLDETIKDKDVKTLIKVSEALLDGSFGNCSSQYEEYRMACHNLLPFTSAFLPAVNEVDNPNVALNHTANYDVLANEI

SEQ ID NO: 6598 - protein, 555 aa, Homo sapiens; identical to SEQ ID NO: 5259

SEQ ID NO: 6599 - protein, 209 aa, Homo sapiens
MAPVGVEKKLLLGPNGPAVAAAGDLTSEEEEGQSLWSSILSEVSTRARSKLPSGKNILVFGEDGSGKTTLMTKLQGAEHGKKGRGLEYLYLSVHDEDRDDHTRCNVWILDGDLYHKGLLKFAVSAESLPETLVIFVADMSRPWTVMESLQKWASVLREHIDKMKIPPEKMRELERKFVKDFQDYMEPEEGCQEGPLSNRVEQMRPRNHW

SEQ ID NO: 6600 - protein, 285 aa, Homo sapiens
NWNLASWNPSNPECLLLVVKELVQQYHQFQCSRLRESSRLMFEYQTLLEEPQYGENMEIYAGKKNNWTGEFSARFLLKLPVDFSNIPTYLLKDVNEDPGEDVALLSVSFEDTEATQVYPKLYLSPRIEHALGGSSALHIPAFPGGGCLIDYVPQVCHLLTNKVQYVIQGYHKRREYIAAFLSHFGTGVVEYDAEGFTKLTLLLMWKDFCFLVHIDLPLFFPRDQPTLTFQSVYHFTNSGQLYSQAQKNYPYSPRWDGNEMAKRAKAYFKTFVPQFQEAAFANGKL

SEQ ID NO: 6601 - protein, 383 aa, Homo sapiens; identical to SEQ ID NO: 5734

SEQ ID NO: 6602 - protein, 376 aa, Homo sapiens; identical to SEQ ID NO: 6053

SEQ ID NO: 6603 - protein, 103 aa, Homo sapiens
MIRAFPTTTPRSLHLFTSSTFLARALPGAFPTGACEERLSVPESTPFTAVLKFAAEEFKVPAATSAIITNDGIGINPAQTAGNVFLKHGSELRIIPRDRVGSC

SEQ ID NO: 6604 - protein, 655 aa, Homo sapiens
MATPVVTKTAWKLQEIVAHASNVSSLVLGKASGRLLATGGDDCRVNLWSINKPNCIMSLTGHTSPVESVRLNTPEELIVAGSQSGSIRVWDLEAAKILRTLMGHKANICSLDFHPYGEFVASGSQDTNIKLWDIRRKGCVFRYRGHSQAVRCLRFSPDGKWLASAADDHTVKLWDLTAGKMMSEFPGHTGPVNVVEFHPNEYLLASGSSDRTIRFWDLEKFQVVSCIEGEPGPVRSVLFNPDGCCLYSGCQDSLRVYGWEPERCFDVVLVNWGKVADLAICNDQLIGVAFSQSNVSSYVVDLTRVTRTGTVARDPVQDHRPLAQPLPNPSAPLRRIYERPSTTCSKPQRVKQNSESERRSPSSEDDRDERESRAEIQNAEDYNEIFQPKNSISRTPPRRSEPFPAPPEDDAATAKEAAKPSPAMDVQFPVPNLEVLPRPPVVASTPAPKAEPAIIPATRNEPIGLKASDFLPAVKIPQQAELVDEDAMSQIRKGHDTMCVVLTSRHKNLDTVRAVWTMGDIKTSVDSAVAINDLSVVVDLLNIVNQKASLWKLDLCTTVLPQIEKLLQSKYESYVQTGCTSLKLILQRFLPLITDMLAAPPSVGVDISREERLHKCRLCYKQLKSISGLVKSKSGLSGRHGSTFRELHLLMASLD

SEQ ID NO: 6605 - protein, 54 aa, Homo sapiens
MFLSAVFFAKSKSNETKSPLRGKEKNTLPLNGGLKMTLIYKEKTEGGDTDSEIL

SEQ ID NO: 6606 - protein, 818 aa, Homo sapiens
MKKQFNRMRQLANQTVGRAEKTEVLSEDLLQVEKRLELVKQVSHSTHKKLTACLQGQQGAEADKRSKKLPLTTLAQCLMEGSAILGDDTLLGKMLKLCGETEDKLAQELIHFELQVERDVIEPLFLLAEVEIPNIQKQRKHLAKLVLDMDSSRTRWQQTSKSSGLSSSLQPAGAKADALREEMEEAANRVEICRDQLSADMYSFVAKEIDYANYFQTLIEVQAEYHRKSLTLLQAVLPQIKAQQEAWVEKPSFGKPLEEHLTISGREIAFPIEACVTMLLECGMQEEGLFRVAPSASKLKKLKAALDCCVVDVQEYSADPHAIAGALKSYLRELPEPLMTFELYDEWIQASNVQEQDKKLQALWNACEKLPKANHNNIRYLIKFLSKLSEYQDVNKMTPSNMAIVLGPNLLWPQAEGNITEMMTTVSLQIVGIIEPIIQHADWFFPGEIEFNITGNYGSPVHVNHNANYSSMPSPDMDPADRRQPEQARRPLSVATDNMMLEFYKKDGLRKIQSMGVRVMDTNWVARRGSSAGRKVSCAPPSMQPPAPPAELAAPLPSPLPEQPLDSPAAPALSPSGLGLQPGPERTSTTKSKELSPGSAQKGSPGSSQGTACAGTQPGAQPGAQPGASPSPSQPPADQSPHTLRKVSKKLAPIPPKVPFGQPGAMADQSAGQPSPVSLSPTPPSTPSPYGLSYPQGYSLASGQLSPAAAPPLASPSVFTSTLSKSRPTPKPRQRPTLPPPQPPTVNLSASSPQSTEAPMLDGMSPGESMSTDLVHFDIPSIHIELGSTLRLSPLEHMRRHSVTDKRDSEEESESTAL

SEQ ID NO: 6607 - protein, 337 aa, Homo sapiens
MTNNSGSKAELVVGGKYKLVRKIGSGSFGDVYLGITTTNGEDVAVKLESQKVKHPQLLYESKLYTILQGGVGIPHMHWYGQEKDNNVLVMDLLGPSLEDLFNFCSRRFTMKTVLMLADQMISRIEYVHTKNFLHRDIKPDNFLMGTGRHCNKLFLIDFGLAKKYRDNRTRQHIPYREDKHLIGTVRYASINAHLGIEQSRRDDMESLGYVFMYFNRTSLPWQGLRAMTKKQKYEKISEKKMSTPVEVLCKGFPAEFAMYLNYCRGLRFEEVPDYMYLRQLFRILFRTLNHQYDYTFDWTMLKQKAAQQAASSSGQGQQAQTQTGKQTEKNKNNVKDN

SEQ ID NO: 6608 - protein, 535 aa, Homo sapiens; identical to SEQ ID NO: 4760

SEQ ID NO: 6609 - protein, 722 aa, Homo sapiens
METSDIQIFYQEDPECQNLSENSCPPSEVSDTNLYSPFKPRNYQLELALPAMKGKNTIICAPTGCGKTFVSLLICEHHLKKFPQGQKGKVVFFANQIPVYEQQKSVFSKYFERHGYRVTGISGATAENVPVEQIVENNDIIILTPQILVNNLKKGTIPSLSIFTLMIFDECHNTSKQHPYNMIMFNYLDQKLGGSSGPLPQVIGLTASVGVGDAKNTDEALDYICKLCASLDASVIATVKHNLEELEQVVYKPQKFFRKVESRISDKFKYIIAQLMRDTESLAKRICKDLENLSQIQNREFGTQKYEQWIVTVQKACMVFQMPDKDEESRICKALFLYTSHLRKYNDALIISEHARMKDALDYLKDFFSNVRAAGFDEIEQDLTQRFEEKLQELESVSRDPSNENPKLEDLCFILQEEYHLNPETITILFVKTRALVDALKNWIEGNPKLSFLKPGILTGRGKTNQNTGMTLPAQKCILDAFKASGDHNILIATSVADEGIDIAQCNLVILYEYVGNVIKMIQTRGRGRARGSKCFLLTSNAGVIEKEQINMYKEKMMNDSILRLQTWDEAVFREKILHIQTHEKFIRDSQEKPKPVPDKENKKLLCRKCKALACYTADVRVIEECHYTVLGDAFKECFVSRPHPKPKQFSSFEKRAKIFCARQNCSHDWGIHVKYKTFEIPVIKIESFVVEDIATGVQTLYSKWKDFHFEKIPFDPAEMSK

SEQ ID NO: 6610 - protein, 880 aa, Homo sapiens
MTTEQRRSLQAFQDYIRKTLDPTYILSYMAPWFREGYSGLYEAIESWDFKKIEKLEEYRLLLKRLQPEFKTRIIPTDIISDLSECLINQECEEILQICSTKGMMAGAEKLVECLLRSDKENWPKTLKLALEKERNKFSELWIVEKGIKDVETEDLEDKMETSDIQIFYQEDPECQNLSENSCPPSEVSDTNLYSPFKPRNYQLELALPAMKGKNTIICAPTGCGKTFVSLLICEHHLKKFPQGQKGKVVFFANQIPVYEQQKSVFSKYFERHGYRVTGISGATAENVPVEQIVENNDIIILTPQILVNNLKKGTIPSLSIFTLMIFDECHNTSKQHPYNMIMFNYLDQKLGGSSGPLPQVIGLTASVGVGDAKNTDEALDYICKLCASLDASVIATVKHNLEELEQVVYKPQKFFRKVESRISDKFKYIIAQLMRDTESLAKRICKDLENLSQIQNREFGTQKYEQWIVTVQKACMVFQMPDKDEESRICKALFLYTSHLRKYNDALIISEHARMKDALDYLKDFFSNVRAAGFDEIEQDLTQRFEEKLQELESVSRDPSNENPKLEDLCFILQEEYHLNPETITILFVKTRALVDALKNWIEGNPKLSFLKPGILTGRGKTNQNTGMTLPAQKCILDAFKASGDHNILIATSVADEGIDIAQCNLVILYEYVGNVIKMIQTRGRGRARGSKCFLLTSNAGVIEKEQINMYKEKMMNDSILRLQTWDEAVFREKILHIQTHEKFIRDSQEKPKPVPDKENKKLLCRKCKALACYTADVRVIEECHYTVLGDAFKECFVSRPHPKPKQFSSFEKRAKIFCARQNCSHDWGIHVKYKTFEIPVIKIESFVVEDIATGVQTLYSKWKDFHFEKIPFDPAEMSK

SEQ ID NO: 6611 - protein, 925 aa, Homo sapiens
MTTEQRRSLQAFQDYIRKTLDPTYILSYMAPWFREEEVQYIQAEKNNKGPMEAATLFLKFLLELQEEGWFRGFLDALDHAGYSGLYEAIESWDFKKIEKLEEYRLLLKRLQPEFKTRIIPTDIISDLSECLINQECEEILQICSTKGMMAGAEKLVECLLRSDKENWPKTLKLALEKERNKFSELWIVEKGIKDVETEDLEDKMETSDIQIFYQEDPECQNLSENSCPPSEVSDTNLYSPFKPRNYQLELALPAMKGKNTIICAPTGCGKTFVSLLICEHHLKKFPQGQKGKVVFFANQIPVYEQQKSVFSKYFERHGYRVTGISGATAENVPVEQIVENNDIIILTPQILVNNLKKGTIPSLSIFTLMIFDECHNTSKQHPYNMIMFNYLDQKLGGSSGPLPQVIGLTASVGVGDAKNTDEALDYICKLCASLDASVIATVKHNLEELEQVVYKPQKFFRKVESRISDKFKYIIAQLMRDTESLAKRICKDLENLSQIQNREFGTQKYEQWIVTVQKACMVFQMPDKDEESRICKALFLYTSHLRKYNDALIISEHARMKDALDYLKDFFSNVRAAGFDEIEQDLTQRFEEKLQELESVSRDPSNENPKLEDLCFILQEEYHLNPETITILFVKTRALVDALKNWIEGNPKLSFLKPGILTGRGKTNQNTGMTLPAQKCILDAFKASGDHNILIATSVADEGIDIAQCNLVILYEYVGNVIKMIQTRGRGRARGSKCFLLTSNAGVIEKEQINMYKEKMMNDSILRLQTWDEAVFREKILHIQTHEKFIRDSQEKPKPVPDKENKKLLCRKCKALACYTADVRVIEECHYTVLGDAFKECFVSRPHPKPKQFSSFEKRAKIFCARQNCSHDWGIHVKYKTFEIPVIKIESFVVEDIATGVQTLYSKWKDFHFEKIPFDPAEMSK

SEQ ID NO: 6612 - protein, 328 aa, Homo sapiens
MDGEDIPDFSSLKEETAYWKELSLKYKQSFQEARDELVEFQEGSRELEAELEAQLVQAEQRNRDLQADNQRLKYEVEALKEKLEHQYAQSYKQVSVLEDDLSQTRAIKEQLHKYVRELEQANDDLERAKRATIVSLEDFEQRLNQAIERNAFLESELDEKESLLVSVQRLKDEARDLRQELAVRERQQEVTRKSAPSSPTLDCEKMDSAVQASLSLPATPVGKGTENTFPSPKAIPNGFGTSPLTPSARISALNIVGDLLRKVGALESKLAACRNFAKDQASRKSYISGNVNCGVLNGNGTKFSRSGHTSFFDKGQEKVIFPTLFMGQ

SEQ ID NO: 6613 - protein, 965 aa, Homo sapiens
MALLCGLGQVTLRIWVSLPSQSENGIGFLAARAFLRSGGMEALTTQLGPGREGSSSPNSKQELQPYSGSSALKPNQVGETSLYGVPIVSLVIDGQERLCLAQISNTLLKNYSYNEIHNRRVALGITCVQCTPVQLEILRRAGAMPISSRRCGMITKREAERLCKSFLGEHKPPKLPENFAFDVVHECAWGSRGSFIPARYNSSRAKCIKCGYCSMYFSPNKFIFHSHRTPDAKYTQPDAANFNSWRRHLKLSDKSATDELSHAWEDVKAMFNGGTRKRTFSLQGGGGGGANGGSGGQGKGGAGGGGGGGPGCGAEMAPGPPPHKSLRCGEDEAAGPPGPPPPHPQRGLGLATGASGPAGPGGPGGGAGVRSYPVIPVPSKGFGLLQKLPPPLFPHPYGFPTAFGLCPKKDDPVLGAGEPKGGPGTGSGGGGAGTGGGAGGPGASHLPPGAGAGPGGGAMFWGHQPSGAAKDAAAVAAAAAAATVYPTFPMFWPAAGSLPVPSYPAAQSQAKAVAAAVAAAAAAAAAAAGSGAPEPLDGAEPAKESGLGAEERCPSALSRGPLDEDGTDEALPPPLAPLPPPPPPPARKGSYVSAFRPVVKDTESIAKLYGSAREAYGAGPARGPGPGAGSGGYVSPDFLSEGSSSYNSASPDVDTADEPEVDVESNRFPDDEDAQEETEPSAPSAGGGPDGEQPTGPPSATSSGADGPANSPDGGSPRPRRRLGPPPAGRPAFGDLAAEDLVRRPERSPPSGGGGYELREPCGPLGGPAPAKVFAPERDEHVKSAAVALGPAASYVCTPEAHEPDKEDNHSPADDLETRKSYPDQRSISQPSPANTDRGEDGLTLDVTGTHLVEKDIENLAREELQKLLLEQMELRKKLEREFQSLKDNFQDQMKRELAYREEMVQQLQIVRDTLCNELDQERKARYAIQQKLKEAHDALHHFSCKMLTPRHCTGNCSFKPPLLP

SEQ ID NO: 6614 - protein, 600 aa, Homo sapiens
MASNHKSSAARPVSRGGVGLTGRPPSGIRPLSGNIRVATAMPPGTARPGSRGCPIGTGGVLSSQIKVAHRPVTQQGLTGMKTGTKGPQRQILDKSYYLGLLRSKISELTTEVNKLQKGIEMYNQENSVYLSYEKRAETLAVEIKELQGQLADYNMLVDKLNTNTEMEEVMNDYNMLKAQNDRETQSLDVIFTERQAKEKQIRSVEEEIEQEKQATDDIIKNMSFENQVKYLEMKTTNEKLLQELDTLQQQLDSQNMKKESLEAEIAHSQVKQEAVLLHEKLYELESHRDQMIAEDKSIGSPMEEREKLLKQIKDDNQEIASMERQLTDTKEKINQFIEEIRQLDMDLEEHQGEMNQKYKELKKREEHMDTFIETFEETKNQELKRKAQIEANIVALLEHCSRNINRIEQISSITNQELKMMQDDLNFKSTEVQKSQSTAQNLTSDIQRLQLDLQKMELLESKMTEEQHSLKSKIKQMTTDLEIYNDLPALKSSGEEKIKKLHQERMILSTHRNAFKKIMEKQNIEYEALKTQLQENETHSQLTNLERKWQHLEQNNFAMKEFIATKSQESDYQPIKKNVTKQIAEYNKTIVDALHSTSGN

SEQ ID NO: 6615 - protein, 193 aa, Homo sapiens
MLVAGNDRVQAVITQMEEVCQTIEDNSRRQKQLLNQRFESLCAVLEERKGELLQALAREQEEKLQRVRGLIRQYGDHLEASSKLVESAIQSMEEPQMALYLQQAKELINKVGAMSKVELAGRPEPGYESMEQFTVRVEHVAEMLRTIDFQPGASGEEEEVAPDGEEGSAGPEEERPDGPLGPYSAYVSLCGAP

SEQ ID NO: 6616 - protein, 358 aa, Homo sapiens
MNFTVGFKPLLGDAHSMDNLEKQLICPICLEMFSKPVVILPCQHNLCRKCANDVFQASNPLWQSRGSTTVSSGGRFRCPSCRHEVVLDRHGVYGLQRNLLVENIIDIYKQESSRPLHSKAEQHLMCEEHEEEKINIYCLSCEVPTCSLCKVFGAHKDCEVAPLPTIYKRQKSELSDGIAMLVAGNDRVQAVITQMEEVCQTIEDNSRRQKQLLNQRFESLCAVLEERKGELLQALAREQEEKLQRVRGLIRQYGDHLEASSKLVESAIQSMEEPQMALYLQQAKELINKVGAMSKVELAGRPEPGYESMEQFTVRVEHVAEMLRTIDFQPGASGEEEEVAPDGEEGSAGPEEERPDGP

SEQ ID NO: 6617 - protein, 251 aa, Homo sapiens
MAASTMSICSSACTDSWRVVDCPESCCEPCCCAPAPSLTLVCTPVSCVSSPCCQTACEPSACQSGYTSSCTTPCYQQSSCQPDCCTSSPCQQACCVPVCCVPVCCVPVCNKPVCFVPTCSESSPSCCQQSSCQPTCCTSSPCQQACCVPVCSKSVCYVPVCSGASTSCCQQSSCQPACCTASCCRPSSSVSLLCHPVCKSTCCVPVPSCGASASSCQPSCCRTASCVSLLCRPVCSRPACYSLCSGQKSSC

SEQ ID NO: 6618 - protein, 375 aa, Homo sapiens
MAASTMSVCSSDLSYGSRVCLPGSCDSCSDSWQVDDCPESCCEPPCCAPSCCAPAPCLSLVCTPVSRVSSPCCPVTCEPSPCQSGCTSSCTPSCCQQSSCQLACCASSPCQQACCMPVCCKTVCCKPVYCVPVCSGDSSCCQQSSCQSACCTSSPCQQACCVPICCKPVCSGISSSCCQQSSCVSCVSSPCCQAVCEPSPCQSGCISSCTPSCCQQSSCQPACCTSSPCQQACCVPVCCKPVCCVPTCSDDSGSCCQPACCTSSQSQQGCCVPVCCKPVCCVPVCSGASSSCCQQSSCQPACCTTSCCRPSSSVSLLCRPVCRPTCCVPVPSCCAPTSSCQASCCRPASCVSLLCRPACSRPACCGPTSTQKSSC

SEQ ID NO: 6619 - protein, 528 aa, Homo sapiens
MATRVEEAARGRGGGAEEATEAGRGGRRRSPRQKFEIGTMEEAGICGLGVKADMLCNSQSNDILQHQGSNCGGTSNKHSLEEDEGSDFITENRNLVSPAYCTQESREEIPGGEARTDPPDGQQDSECNRNKEKTLGKEVLLLMQALNTLSTPEEKLAALCKKYADLLEESRSVQKQMKILQKKQAQIVKEKVHLQSEHSKAILARSKLESLCRELQRHNKTLKEENMQQAREEEERRKEATAHFQITLNEIQAQLEQHDIHNAKLRQENIELGEKLKKLIEQYALREEHIDKVFKHKELQQQLVDAKLQQTTQLIKEADEKHQREREFLLKEATESRHKYEQMKQQEVQLKQQLSLYMDKFEEFQTTMAKSNELFTTFRQEMEKMTKKIKKLEKETIIWRTKWENNNKALLQMAEEKTVRDKEYKALQIKLERLEKLCRALQTERNELNEKVEVLKEQVSIKAAIKAANRDLATPVMQPCTALDSHKELNTSSKRALGAHLEAEPKSQRSAVQKPPSTGSAPAIESVD

SEQ ID NO: 6620 - protein, 132 aa, Homo sapiens
MRASPCISQPAASWHPRPSALRPTAGSGPDTRTPGTVEDGSAPCPAFRSPAVSPCGEEPCCFQISPAEETLELGRLVSPGNCDTLSPRAAGFYACHVRSLIPCRSTKGRWPLTASAAGLSRHAQCGPSLGLG

SEQ ID NO: 6621 - protein, 647 aa, Homo sapiens
MAEFRVRVSTGEAFGAGTWDKVSVSIVGTRGESPPLPLDNLGKEFTAGAEEDFQVTLPEDVGRVLLLRVHKAPPVLPLLGPLAPDAWFCRWFQLTPPRGGHLLFPCYQWLEGAGTLVLQEGTAKVSWADHHPVLQQQRQEELQARQEMYQWKAYNPGWPHCLDEKTVEDLELNIKYSTAKNANFYLQAGSAFAEMKIKGLLDRKGLWRSLNEMKRIFNFRRTPAAEHAFEHWQEDAFFASQFLNGLNPVLIRRCHYLPKNFPVTDAMVASVLGPGTSLQAELEKGSLFLVDHGILSGIQTNVINGKPQFSAAPMTLLYQSPGCGPLLPLAIQLSQTPGPNSPIFLPTDDKWDWLLAKTWVRNAEFSFHEALTHLLHSHLLPEVFTLATLRQLPHCHPLFKSTGIGIEGFSELIQRNMKQLNYSLLCLPEDIRTRGVEDIPGYYYRDDGMQIWGAVERFVSEIIGIYYPSDESVQDDRELQAWVREIFSKGFLNQESSGIPSSLETREALVQYVTMVIFTCSAKHAAVSAGQFDSCAWMPNLPPSMQLPPPTSKGLATCEGFIATLPPVNATCDVILALWLLSKEPGDQRPLGTYPDEHFTEEAPRRSIATFQSRLAQISRGIQERNQGLVLPYTYLDPPLIENSVSI

SEQ ID NO: 6622 - protein, 676 aa, Homo sapiens
MAEFRVRVSTGEAFGAGTWDKVSVSIVGTRGESPPLPLDNLGKEFTAGAEEDFQVTLPEDVGRVLLLRVHKAPPVLPLLGPLAPDAWFCRWFQLTPPRGGHLLFPCYQWLEGAGTLVLQEGTAKVSWADHHPVLQQQRQEELQARQEMYQWKAYNPGWPHCLDEKTVEDLELNIKYSTAKNANFYLQAGSAFAEMKIKGLLDRKGLWRSLNEMKRIFNFRRTPAAEHAFEHWQEDAFFASQFLNGLNPVLIRRCHYLPKNFPVTDAMVASVLGPGTSLQAELEKGSLFLVDHGILSGIQTNVINGKPQFSAAPMTLLYQSPGCGPLLPLAIQLSQTPGPNSPIFLPTDDKWDWLLAKTWVRNAEFSFHEALTHLLHSHLLPEVFTLATLRQLPHCHPLFKLLIPHTRYTLHINTLARELLIVPGQVVDRSTGIGIEGFSELIQRNMKQLNYSLLCLPEDIRTRGVEDIPGYYYRDDGMQIWGAVERFVSEIIGIYYPSDESVQDDRELQAWVREIFSKGFLNQESSGIPSSLETREALVQYVTMVIFTCSAKHAAVSAGQFDSCAWMPNLPPSMQLPPPTSKGLATCEGFIATLPPVNATCDVILALWLLSKEPGDQRPLGTYPDEHFTEEAPRRSIATFQSRLAQISRGIQERNQGLVLPYTYLDPPLIENSVSI

SEQ ID NO: 6623 - protein, 554 aa, Homo sapiens
MATSADSPSSPLGAEDLLSDSSEPPGLNQVSSEVTSQLYASLRLSRQAEATARAQLYLPSTSPPHEGLDGFAQELSRSLSVGLEKNLKKKDGSKHIFEMESVRGQLQTMLQTSRDTAYRDPLIPGAGSERREEDSFDSDSTATLLNTRPLQDLSPSSSAQALEELFPRYTSLRPGPPLNPPDFQGLRDALDSEHTRRKHCERHIQSLQTRVLELQQQLAVAVAADRKKDTMIEQLDKTLARVVEGWNRHEAERTEVLRGLQEEHQAAELTRSKQQETVTRLEQSLSEAMEALNREQESARLQQRERETLEEERQALTLRLEAEQQRCCVLQEERDAARAGQLSEHRELETLRAALEEERQTWAQQEHQLKEHYQALQEESQAQLEREKEKSQREAQAAWETQHQLALVQSEVRRLEGELDTARRERDALQLEMSLVQARYESQRIQLESELAVQLEQRVTERLAQAQESSLRQAASLREHHRKQLQDLSGQHQQELASQLAQFKVEMAEREERQQQVAEDYELRLLLLDPPAPGLRSPRRRRGGSGLCLPWPWP

SEQ ID NO: 6624 - protein, 925 aa, Homo sapiens
MATSADSPSSPLGAEDLLSDSSEPPGLNQVSSEVTSQLYASLRLSRQAEATARAQLYLPSTSPPHEGLDGFAQELSRSLSVGLEKNLKKKDGSKHIFEMESVRGQLQTMLQTSRDTAYRDPLIPGAGSERREEDSFDSDSTATLLNTRPLQDLSPSSSAQALEELFPRYTSLRPGPPLNPPDFQGLRDALDSEHTRRKHCERHIQSLQTRVLELQQQLAVAVAADRKKDTMIEQLDKTLARVVEGWNRHEAERTEVLRGLQEEHQAAELTRSKQQETVTRLEQSLSEAMEALNREQESARLQQRERETLEEERQALTLRLEAEQQRCCVLQEERDAARAGQLSEHRELETLRAALEEERQTWAQQEHQLKEHYQALQEESQAQLEREKEKSQREAQAAWETQHQLALVQSEVRRLEGELDTARRERDALQLEMSLVQARYESQRIQLESELAVQLEQRVTERLAQAQESSLRQAASLREHHRKQLQDLSGQHQQELASQLAQFKVEMAEREERQQQVAEDYELRLAREQARVCELQSGNQQLEEQRVELVERLQAMLQAHWDEANQLLSTTLPPPNPPAPPAGPSSPGPQEPEKEERRVWTMPPMAVALKPVLQQSREARDELPGAPPVLCSSSSDLSLLLGPSFQSQHSFQPLEPKPDLTSSTAGAFSALGAFHPDHRAERPFPEEDPGPDGEGLLKQGLPPAQLEGLKNFLHQLLETVPQNNENPSVDLLPPKSGPLTVPSWEEAPQVPRIPPPVHKTKVPLAMASSLFRVPEPPSSHSQGSGPSSGSPERGGDGLTFPRQLMEVSQLLRLYQARGWGALPAEDLLLYLKRLEHSGYKPGRKEEGFSGWKLDYGEWSGTDGRGDNVPRRNTDSRLGEIPRKEIPSQAVPRRLATAPKTEKPPARKKSGHPAPSSMRSRGGVWR

SEQ ID NO: 6625 - protein, 986 aa, Homo sapiens
MYFCWGADSRELQRRRTAGSPGAELLQAASGERHSLLLLTNHRVLSCGDNSRGQLGRRGAQRGELPEPIQALETLIVDLVSCGKEHSLAVCHKGRVFAWGAGSEGQLGIGEFKEISFTPKKIMTLNDIKIIQVSCGHYHSLALSKDSQVFSWGKNSHGQLGLGKEFPSQASPQRVRSLEGIPLAQVAAGGAHSFALSLCGTSFGWGSNSAGQLALSGRNVPVQSNKPLSVGALKNLGVVYISCGDAHTAVLTQDGKVFTFGDNRSGQLGYSPTPEKRGPQLVERIDGLVSQIDCGSYHTLAYVHTTGQVVSFGHGPSDTSKPTHPEALTENFDISCLISAEDFVDVQVKHIFAGTYANFVTTHQDTSSTRAPGKTLPEISRISQSMAEKWIAVKRRSTEHEMAKSEIRMIFSSPACLTASFLKKRGTGETTSIDVDLEMARDTFKKLTKKEWISSMITTCLEDDLLRALPCHSPHQEALSVFLLLPECPVMHDSKNWKNLVVPFAKAVCEMSKQSLQVLKKCWAFLQESSLNPLIQMLKAAIISQLLHQTKTEQDHCNVKALLGMMKELHKVNKANCRLPENTFNINELSNLLNFYIDRGRQLFRDNHLMSEKKAYMLMHETILQKKDEFPPSPRFILRVRRSRLVKDALRQLSQAEATDFCKVLVVEFINEICPESGGVSSEFFHCMFEEMTKPEYGMFMYPEMGSCMWFPAKPKPEKKRYFLFGMLCGLSLFNLNVANLPFPLALYKKLLDQKPSLEDLKELSPRLGKSLQEVLDDAADDIGDALCIRFSIHWDQNDVDLIPNGISIPVDQTNKRDYVSKYIDYIFNVSVKAVYEEFQRGFYRVCEKEILRHFYPEELMTAIIGNTDYDWKQFEQNSKYEQGYQKSHPTIQLFWKAFHKLTLDEKKKFLFFLTGRDRLHARGIQKMEIVFRCPETFSERDHPTSITCHNILSLPKYSTMERMEEALQVAINNNRGFVSPMLTQS

SEQ ID NO: 6626 - protein, 144 aa, Homo sapiens
MTTRQATKDPLLRGVSPTPSKIPVRSQKRTPFPTVTSCAVDQENQDPRRWVQKPPLNIQRPLVDSAGPRPKARHQAETSQRLVGISQPRNPLEELRPSPRGQNVGPGPPAQTVLVPAPGKLFALRRSPFPPAKCHLARCHGLYL

SEQ ID NO: 6627 - protein, 108 aa, Homo sapiens
MADPRVRQIKIKTGVVKRLVKEKVMYEKEAKQQEEKIEKMRAEDGENYDIKKQAEILQESRMMIPDCQRRLEAAYLDLQRILENEKDLEEAEEYKEARLVLDSVKLEA

SEQ ID NO: 6628 - protein, 446 aa, Homo sapiens
MRECLSIHIGQAGIQIGDACWELYCLEHGIQPNGVVLDTQQDQLENAKMEHTNASFDTFFCETRAGKHVPRALFVDLEPTVIDGIRTGQHRSLFHPEQLLSGKEDAANNYARGRYSVGSEVIDLVLERTRKLAEQCGGLQGFLIFRSFGGGTGSGFTSLLMERLTGEYSRKTKLEFSVYPAPRISTAVVEPYNSVLTTHSTTEHTDCTFMVDNEAVYDICHRKLGVECPSHASINRLVVQVVSSITASLRFEGPLNVDLIEFQTNLVPYPRIHFPMTAFAPIVSADKAYHEQFSVSDITTACFESSNQLVKCDPRLGKYMACCLLYRGDVVPKEVNAAIAATKSRHSVQFVDWCPTGFKVGINNRPPTVMPGGDLAKVHRSICMLSNTTAIVEAWARLDHKFDLMYAKRAFLHWYLREGMEEAEFLEAREDLAALERDYEEVAQSF

SEQ ID NO: 6629 - protein, 290 aa, Homo sapiens
MGSSKKVTLSVLSREQSEGVGARVRRSIGRPELKNLDPFLLFDEFKGGRPGGFPDHPHRGFETVSYLLEGGSMAHEDFCGHTGKMNPGDLQWMTAGRGILHAEMPCSEEPAHGLQLWVNLRSSEKMVEPQYQELKSEEIPKPSKDGVTVAVISGEALGIKSKVYTRTPTLYLDFKLDPGAKHSQPIPKGWTSFIYTISGDVYIGPDDAQQKIEPHHTAVLGEGDSVQVENKDPKRSHFVLIAGEPLREPVIQHGPFVMNTNEEISQAILDFRNAKNGFERAKTWKSKIGN

SEQ ID NO: 6630 - protein, 290 aa, Homo sapiens; identical to SEQ ID NO: 6629

SEQ ID NO: 6631 - protein, 398 aa, Homo sapiens
MDFFSSHLLADSSSPATNSSHTDAHEILVSDFLVSDENLQKMENVLDLWSSGLKTNIISELSKWRLNFIDWHRMEMRKEKEKHAAHLKQLCNQINELKELQKTFEISIGRKDEVISSLSHAIGKQKEKIELMRTFFHWRIGHVRARQDVYEGKLADQYYQRTLLKKVWKVWRSVVQKQWKDVVERACQARAEEVCIQISNDYEAKVAMLSGALENAKAEIQRMQHEKEHFEDSMKKAFMRGVCALNLEAMTIFQNRNDAGIDSTNNKKEEYGPGVQGKEHSAHLDPSAPPMPLPVTSPLLPSPPAAVGGASATAVPSAASMTSTRAASASSVHVPVSALGAGSAATAASEEMQTIPQATAAKYAAIHPESSTSASRSLGTRSAHTQSLTSVHSIKVVD

SEQ ID NO: 6632 - protein, 242 aa, Homo sapiens
MAAVKASTSKATRPWYSHPVYARYWQHYHQAMAWMQSHHNAYRKAVESCFNLPWYLPSALLPQSSYDNEAAYPQSFYDHHVAWQDYPCSSSHFRRSGQHPRYSSRIQASTKEDQALSKEEEMETESDAEVECDLSNMEITEELRQYFAETERHREERRRQQQLDAERLDSYVNADHDLYCNTRRSVEAPTERPGERRQAEMKRLYGDSAAKIQAMEAAVQLSFDKHCDRKQPKYWPVIPLKF

SEQ ID NO: 6633 - protein, 493 aa, Homo sapiens
MERSPDVSPGPSRSFKEELLCAVCYDPFRDAVTLRCGHNFCRGCVSRCWEVQVSPTCPVCKDRASPADLRTNHTLNNLVEKLLREEAEGARWTSYRFSRVCRLHRGQLSLFCLEDKELLCCSCQADPRHQGHRVQPVKDTAHDFRVRSLIAEERRNFLPTHQWIVTKTRLQTSSPNLQSRRQGQVQEHGACTAGEGQGLLGHAALLDAMAEETRQKQLLADEKMKQLTEETEVLAHEIERLQMEMKEDDVSFLMKHKSRKRRLFCTMEPEPVQPGMLIDVCKYLGSLQYRVWKKMLASVESVPFSFDPNTAAGWLSVSDDLTSVTNHGYRVQVENPERFSSAPCLLGSRVFSQGSHAWEVALGGLQSWRVGVVRVRQDSGAEGHSHSCYHDTRSGFWYVCRTQGVEGDHCVTSDPATSPLVLAIPRRLRVELECEEGELSFYDAERHCHLYTFHARFGEVRPYFYLGGARGAGPPEPLRICPLHISVKEELDG

SEQ ID NO: 6634 - protein, 490 aa, Homo sapiens
MNLAEICDNAKKGREYALLGNYDSSMVYYQGVMQQIQRHCQSVRDPAIKGKWQQVRQELLEEYEQVKSIVSTLESFKIDKPPDFPVSCQDEPFRDPAVWPPPVPAEHRAPPQIRRPNREVRPLRKEMAGVGARGPVGRAHPISKSEKPSTSRDKDYRARGRDDKGRKNMQDGASDGEMPKFDGAGYDKDLVEALERDIVSRNPSIHWDDIADLEEAKKLLREAVVLPMWMPDFFKGIRRPWKGVLMVGPPGTGKTMLAKAVATECGTTFFNVSSSTLTSKYRGESEKLVRLLFEMARFYAPTTIFIDEIDSICSRRGTSDEHEASRRVKSELLIQMDGVGGALENDDPSKMVMVLAATNFPWDIDEALRRRLEKRIYIPLPTAKGRAELLKINLREVELDPDIQLEDIAEKIEGYSGADITNVCRDASLMAMRRRINGLSPEEIRALSKEELQMPVTKGDFELALKKIAKSVSAADLEKYEKWMVEFGSA

SEQ ID NO: 6635 - protein, 490 aa, Homo sapiens; identical to SEQ ID NO: 6634

SEQ ID NO: 6636 - protein, 355 aa, Homo sapiens
MDFIFHEKQEGFLCAQHCLNNLLQGEYFSPVELASIAHQLDEEERMRMAEGGVTSEEYLAFLQQPSENMDDTGFFSIQVISNALKFWGLEIIHFNNPEYQKLGIDPINERSFICNYKQHWFTIRKFGKHWFNLNSLLAGPELISDTCLANFLARLQQQAYSVFVVKGDLPDCEADQLLQIISVEEMDTPKLNGKKLVKQKEHRVYKTVLEKVSEESDESGTSDQDEEDFQRALELSRQETNREDEHLRSTIELSMQGSSGNTSQDLPKTSCVTPASEQPKKIKEDYFEKHQQEQKQQQQQSDLPGHSSYLHERPTTSSRAIESDLSDDISEGTVQAAVDTILEIMRKNLKIKGEK

SEQ ID NO: 6637 - protein, 1969 aa, Homo sapiens
MAARSAPSCHLRLEWVYGYRGHQCRNNLYYTAAKEIVYFVAGVGVVYSPREHRQKFYRGHSDDIISLALHPERVLVATGQVGKEPYICIWDSYTVQTISVLKDVHTHGIACLAFDLDGQRLVSVGLDSKNAVCVWDWKRGKMLSMAPGHTDRIFDISWDLYQPNKLVSCGVKHIKFWSLCGNALTPKRGVFGKTGDLQTILCLACARDELTYSGALNGDIYVWKGINLIRTIQGAHAAGIFSMNACEEGFATGGRDGCIRLWDLTFKPITVIDLRETDQGYKGLSVRSVCWRGDHILVGTQDSEIFEIVVQERNKPFLIMQGHCEGELWALAVHPTKPLAVTGSDDRSVRIWSLVDHALIARCNMEEPIRCAAVNADGIHLALGMKDGSFTVLRVRDMTEVVHIKDRKEAIHELKYSPDGTYLAVGCNDSSVDIYGVAQRYKKVGECLGSLSFITHLDWSSDSRYLQTNDGNGKRLFYRMPGGKEVTSTEEIKGVHWASWTCVSGLEVNGIWPKYSDINDINSVDGNYIGQVLVTADDYGIIKLFRYPCLRKGAKFRKYIGHSAHVTNVRWSHDYQWVISIGGADHSVFQWKFIPERKLKDAVHIAPQESLADSHSDESDSDLSDVPELDSEIEQETQLTYRRQVYKEDLPQLKEQCKEKQKSATSKRRERAPGNSIRLHFVHGYRGYDCRSNLFYTQIGEIVYHVAAVGVIYNRQQNTQRFYLGHDDDILCLTIHPLKDYVATGQVGRDPSIHIWDTETIKPLSILKGHHQYGVSAVDFSADGKRLASVGIDDSHTVVLWDWKKGEKLSIARGSKDKIFVVKMNPYVPDKLITAGIKHMKFWRKAGGGLIGRKGYIGTLGKNDTMMCAVYGWTEEMAFSGTSTGDVCIWRDIFLVKTVKAHDGPVFSMHALEKGFVTGGKDGIVALWDDSFERCLKTYAIKRAALAPGSKGLLLEDNPSIRAISLGHGHILVGTKNGEILEVDKSGPITLLVQGHMEGEVWGLATHPYLPICATVSDDKTLRIWDLSPSHCMLAVRKLKKGGRCCCFSPDGKALAVGLNDGSFLMANADTLEDLVSFHHRKDMISDIRFSPGSGKYLAVASHDSFIDIYNVMSSKRVGICKGATSYITHIDWDIRGKLLQVNTGAKEQLFFEAPRGKKQTIPSVEVEKIAWASWTSVLGLCCEGIWPVIGEVTDVTASCLTSDKMVLATGDDLGFVKLFRYPTKGKFGKFKRYVAHSTHVTNVRWTYDDSMLVTLGGTDMSLMVWTNEMEGYREKRPCDSEESDIDSEEDGGYDSDVTRENEISYTIRALSTNIRPMLGIKPHLQQKEPSIDERPPVSRAPPQPEKLQTNNVGKKKRPIEDLVLELIFGYRGRDCRNNVHYLNDGDDIIYHTASVGILHNVATGSQSFYQEHNDDILCLTVNQHPKFINIVATGQVGDSADMSATAPSIHIWDAMNKQTLSILRCYHSKGVCSVSFSATGKLLLSVGLDPEHTITIWRWQEGAKIASRAGHNQRIFVAEFRPDSDTQFVSVGVKHVKFWTLAGRALLSKKGLLSTLEDARMQTMLAIAFGANNLTFTGTISGDVCVWKDHILCRIVARAHNGPVFAMYTTLRDGLIVTGGKERPSKEGGAVKLWDQELRRCRAFRLETGQATDCVRSVCRGKGKILVGTRNAEIIEVGEKNAACNILVNGHVDGPIWGLATHPSRDFFLSAAEDGTVRLWDIADKKMLNKVNLGHAARTVCYSPEGDMVAIGMKNGEFIILLVSSLKIWGKKRDRRCAIHDIRFSPDSRYLAVGSSENSVDFYDLTLGPTLNRISYCKDIPSFVIQMDFSADSSYLQVSSGCYKRHVYEVPSGKHLMDHAAIDRITWATWTSILGDEVLGIWSRHAEKADVNCACVSHSGISLVTGDDFGMVKLFDFPCPEKFAKHKRFLGHSPHVTNIRFTSGDRHVVSAGGDDCSLFVWKCVHTPH

SEQ ID NO: 6638 - protein, 381 aa, Homo sapiens
MPLQVSDYSWQQTKTAVFLSLPLKGVCVRDTDVFCTENYLKVNFPPFLFEAFLYAPIDDESSKAKIGNDTIVFTLYKKEAAMWETLSVTGVDKEMMQRIREKSILQAQERAKEATEAKAAAKREDQKYALSVMMKIEEEERKKIEDMKENERIKATKALEAWKEYQRKAEEQKKIQREEKLCQKEKQIKEERKKIKYKSLTRNLASRNLAPKGRNSENIFTEKLKEDSIPAPRSVGSIKINFTPRVFPTALRESQVAEEEEWLHKQAEARRAMNTDIAELCDLKEEEKNPEWLKDKGNKLFATENYLAAINAYNLAIRLNNKMPLLYLNRAACHLKLKNLHKAIEDSSKEFCSLEGIECQASEPKLSHHIPSDLHVYIQMA

SEQ ID NO: 6639 - protein, 446 aa, Homo sapiens
MAGAGGGNDIQWCFSQVKGAVDDDVAEADIISTVEFNHSGELLATGDKGGRVVIFQQEQENKIQSHSRGEYNVYSTFQSHEPEFDYLKSLEIEEKINKIRWLPQKNAAQFLLSTNDKTIKLWKISERDKRPEGYNLKEEDGRYRDPTTVTTLRVPVFRPMDLMVEASPRRIFANAHTYHINSISINSDYETYLSADDLRINLWHLEITDRSFNIVDIKPANMEELTEVITAAEFHPNSCNTFVYSSSKGTIRLCDMRASALCDRHSKLFEEPEDPSNRSFFSEIISSISDVKFSHSGRYMMTRDYLSVKIWDLNMENRPVETYQVHEYLRSKLCSLYENDCIFDKFECCWNGSDSVVMTGSYNNFFRMFDRNTKRDITLEASRENNKAAVLKPRKVCASGKRKKDEISVDSLDFNKKILHTAWHPKENIIAVATTNNLYIFQDKVN

SEQ ID NO: 6640 - protein, 470 aa, Homo sapiens
MDLRDQELVKIVGIRYEVGPPTLCCLKLAFIDPATGKLMDKSFSIRYHDMPDVIDFLVLRQFYDEARQRNWQSCDRFRSIIDDAWWFGTVLSQEPYQPQYPDSHFQCYIVRWDNTEIEKLSPWDMEPIPDNVDPPEELGASISVTTDELEKLLYKPQAGEWGQKSRDEECDRIISGIDQLLNLDIAAAFAGPVDLCTYPKYCTVVAYPTDLYTIRMRLVNRFYRRLSALVWEVRYIEHNARTFNEPESVIARSAKKITDQLLKFIKNQHCTNISELSNTSENDEQNAEDLDDSDLPKTSSGRRRDYRDIIDTPMDFGTVRETLDAGNYDSPLEFCKDIRLIFSNAKAYTPNKRSKIYSMTLRLSALFEEKMKKISSDFKIGQKFNEKLRRSQRFKQRQNCKGDSQPNKSIRNLKPKRLKSQTKIIPELVGSPTQSTSSRTAYLGTHKTSAGISSGVTSGLFRFSRIIRKE

SEQ ID NO: 6641 - protein, 171 aa, Homo sapiens
MCGRAPPPEITGREPGYHLVEQSCWLKPLPRNLGHSLFWTVWKPRPVSQLVAQQVTQQFVPPTQSKKEKKDKVEKEKSEKETTSKKNSHKKTRPRLKNVDRSSAQHLEVTVGDLTVIITDFKEKTKSPPASSAASADQHSQSGSSSDNTERGMSRSSSPRGEASSLNGESH

SEQ ID NO: 6642 - protein, 138 aa, Homo sapiens
MGDKKSPTRKPRPVSQLVAQQVTQQFVPPTQSKKEKKDKVEKEKSEKETTSKKNSHKKTRPRLKNVDRSSAQHLEVTVGDLTVIITDFKEKTKSPPASSAASADQHSQSGSSSDNTERGMSRSSSPRGEASSLNGESH

SEQ ID NO: 6643 - protein, 348 aa, Homo sapiens
MGHCCCKPYNCLQCLDKTNESALVKEKELSIELANIRDEVAFHTAKCEKLQKEKEELERRFEDEVKRLGWQQQAELQELEERLQLQFEAEMARLQEEHGDQLLSIRCQHQEQVEDLTASHDAALLEMENNHTVAITILQDDHDHKVQELMSTHELEKKELEENFEKLRLSLQDQVDTLTFQSQSLRDRARRFEEALRKNTEEQLEIALAPYQHLEEDMKSLKQVLEMKNQQIHEQEKKILELEKLAEKNIILEEKIQVLQQQNEDLKARIDQNTVVTRQLSEENANLQEYVEKETQEKKRLSRTNEELLWKLQTGDPTSPIKLSPTSPVYRGSSSGPSSPARVSTTPR

SEQ ID NO: 6644 - protein, 887 aa, Homo sapiens
MNSGGGLPPPSAAASPSSSSLAAAVAVVAPPGVGGVPGGAAVGVKLKYCRYYAKDKTCFYGEECQFLHEDPAAGAAPGLGLHSNSVPLALAGAPVAGFPPGAVAGGGAGPPPGPKKPDLGDPGTGAAAGGGGSSGGLDGPRLAIPGMDGGALTDTSLTDSYFSTSFIGVNGFGSPVETKYPLMQRMTNSSSSPSLLNDSAKPYSAHDPLTSPASSLFNDFGALNISQRRKPRKYRLGMLEERLVPMGSKARKAKNPIGCLADRCKSGVPINMVWWNRVTENNLQTPNPTASEFIPKGGSTSRLSNVSQSNMSAFSQVFSHPSMGSPATAGLAPGMSLSAGSSPLHSPKITPHTSPAPRRRSHTPNPASYMVPSSASTSVNNPVSQTPSSGQVIQKETVGGTTYFYTDTTPAPLTGMVFPNYHIYPPTAPHVAYMQPKANAPSFFMADELRQELINRHLITMAQIDQADMPAVPTEVDSYHSLFPLEPLPPPNRIQKSSNFGYITSCYKAVNSKDDLPYCLRRIHGFRLVNTKCMVLVDMWKKIQHSNIVTLREVFTTKAFAEPSLVFAYDFHAGGETMMSRHFNDPNADAYFTKRKWGQHEGPLPRQHAGLLPESLIWAYIVQLSSALRTIHTAGLACRVMDPTKILITGKTRLRVNCVGVFDVLTFDNSQNNNPLALMAQYQQADLISLGKVVLALACNSLAGIQRENLQKAMELVTINYSSDLKNLILYLLTDQNRMRSVNDIMPMIGARFYTQLDAAQMRNDVIEEDLAKEVQNGRLFRLLAKLGTINERPEFQKDPTWSETGDRYLLKLFRDHLFHQVTEAGAPWIDLSHIISCLNKLDAGVPEKISLISRDEKSVLVVTYSDLKRCFENTFQELIAAANGQL

SEQ ID NO: 6645 - protein, 569 aa, Homo sapiens
MATLVVNKLGAGVDSGRQGSRGTAVVKVLECGVCEDVFSLQGDKVPRLLLCGHTVCHDCLTRLPLHGRAIRCPFDRQVTDLGDSGVWGLKKNFALLELLERLQNGPIGQYGAAEESIGISGESIIRCDEDEAHLASVYCTVCATHLCSECSQVTHSTKTLAKHRRVPLADKPHEKTMCSQHQVHAIEFVCLEEGCQTSPLMCCVCKEYGKHQGHKHSVLEPEANQIRASILDMAHCIRTFTEEISDYSRKLVGIVQHIEGGEQIVEDGIGMAHTEHVPGTAENARSCIRAYFYDLHETLCRQEEMALSVVDAHVREKLIWLRQQQEDMTILLSEVSAACLHCEKTLQQDDCRVVLAKQEITRLLETLQKQQQQFTEVADHIQLDASIPVTFTKDNRVHIGPKMEIRVVTLGLDGAGKTTILFKLKQDEFMQPIPTIGFNVETVEYKNLKFTIWDVGGKHKLRPLWKHYYLNTQAVVFVVDSSHRDRISEAHSELAKLLTEKELRDALLLIFANKQDVAGALSVEEITELLSLHKLCCGRSWYIQGCDARSVFQIICDQYTGKEVVTEKG

SEQ ID NO: 6646 - protein, 686 aa, Homo sapiens
MGRIHQAMVTSLNEDNESVTVEWIENGDTKGKEIDLESIFSLNPDLVPDEEIEPSPETPPPPASSAKVNKIVKNRRTVASIKNDPPSRDNRVVGSARARPSQFPEQSSSAQQNGSVSDISPVQAAKKEFGPPSRRKSNCVKEVEKLQEKREKRRLQQQELREKRAQDVDATNPNYEIMCMIRDFRGSLDYRPLTTADPIDEHRICVCVRKRPLNKKETQMKDLDVITIPSKDVVMVHEPKQKVDLTRYLENQTFRFDYAFDDSAPNEMVYRFTARPLVETIFERGMATCFAYGQTGSGKTHTMGGDFSGKNQDCSKGIYALAARDVFLMLKKPNYKKLELQVYATFFEIYSGKVFDLLNRKTKLRVLEDGKQQVQVVGLQEREVKCVEDVLKLIDIGNSCRTSGQTSANAHSSRSHAVFQIILRRKGKLHGKFSLIDLAGNERGADTSSADRQTRLEGAEINKSLLALKECIRALGRNKPHTPFRASKLTQVLRDSFIGENSRTCMIATISPGMASCENTLNTLRYANRVKELTVDPTAAGDVRPIMHHPPNQIDDLETQWGVGSSPQRDDLKLLCEQNEEEVSPQLFTFHEAVSQMVEMEEQVVEDHRAVFQESIRWLEDEKALLEMTEEVDYDVDSYATQLEAILEQKIDILTELRDKVKSFRAALQEEEQASKQINPKRPRAL

SEQ ID NO: 6647 - protein, 205 aa, Homo sapiens
MSVDPMTYEAQFFGFTPQTCMLRIYIAFQDYLFEVMQAVEQVILKKLDGIPDCDISPVQIRKCTEKFLCFMKGHFDNLFSKMEQLFLQLILRIPSNILLPEDKCKETPYSEEDFQHLQKEIEQLQEKYKTELCTKQALLAELEEQKIVQAKLKQTLTFFDELHNVGRDHGTSDFRESLVSLVQNSRKLQNIRDNVEKESKRLKIS

SEQ ID NO: 6648 - protein, 621 aa, Homo sapiens
MVLCPVIGKLLHKRVVLASASPRRQEILSNAGLRFEVVPSKFKEKLDKASFATPYGYAMETAKQKALEVANRLYQKDLRAPDVVIGADTIVTVGGLILEKPVDKQDAYRMLSRLSGREHSVFTGVAIVHCSSKDHQLDTRVSEFYEETKVKFSELSEELLWEYVHSGEPMDKAGGYGIQALGGMLVESVHGDFLNVVGFPLNHFCKQLVKLYYPPRPEDLRRSVKHDSIPAADTFEDLSDVEGGGSEPTQRDAGSRDEKAEAGEAGQATAEAECHRTRETLPPFPTRLLELIEGFMLSKGLLTACKLKVFDLLKDEAPQKAADIASKVDASACGMERLLDICAAMGLLEKTEQGYSNTETANVYLASDGEYSLHGFIMHNNDLTWNLFTYLEFAIREGTNQHHRALGKKAEDLFQDAYYQSPETRLRFMRAMHGMTKLTACQVATAFNLSRFSSACDVGGCTGALARELAREYPRMQVTVFDLPDIIELAAHFQPPGPQAVQIHFAAGDFFRDPLPSAELYVLCRILHDWPDDKVHKLLSRVAESCKPGAGLLLVETLLDEEKRVAQRALMQSLNMLVQTEGKERSLGEYQCLLELHGFHQVQVVHLGGVLDAILATKVAP

SEQ ID NO: 6649 - protein, 846 aa, Homo sapiens; identical to SEQ ID NO: 5306

SEQ ID NO: 6650 - protein, 605 aa, Homo sapiens
MVLCPVIGKLLHKRVVLASASPRRQEILSNAGLRFEVVPSKFKEKLDKASFATPYGYAMETAKQKALEVANRLYQTVGGLILEKPVDKQDAYRMLSRLSGREHSVFTGVAIVHCSSKDHQLDTRVSEFYEETKVKFSELSEELLWEYVHSGEPMDKAGGYGIQALGGMLVESVHGDFLNVVGFPLNHFCKQLVKLYYPPRPEDLRRSVKHDSIPAADTFEDLSDVEGGGSEPTQRDAGSRDEKAEAGEAGQATAEAECHRTRETLPPFPTRLLELIEGFMLSKGLLTACKLKVFDLLKDEAPQKAADIASKVDASACGMERLLDICAAMGLLEKTEQGYSNTETANVYLASDGEYSLHGFIMHNNDLTWNLFTYLEFAIREGTNQHHRALGKKAEDLFQDAYYQSPETRLRFMRAMHGMTKLTACQVATAFNLSRFSSACDVGGCTGALARELAREYPRMQVTVFDLPDIIELAAHFQPPGPQAVQIHFAAGDFFRDPLPSAELYVLCRILHDWPDDKVHKLLSRVAESCKPGAGLLLVETLLDEEKRVAQRALMQSLNMLVQTEGKERSLGEYQCLLELHGFHQVQVVHLGGVLDAILATKVAP

SEQ ID NO: 6651 - protein, 231 aa, Homo sapiens
MTVGKSSKMLQHIDYRMRCILQDGRIFIGTFKAFDKHMNLILCDCDEFRKIKPKNSKQAEREEKRVLGLVLLRGENLVSMTVEGPPPKDTGIARVPLAGAAGGPGIGRAAGRGIPAGVPMPQAPAGLAGPVRGVGGPSQQVMTPQGRGTVAAAAAAATASIAGAPTQYPPGRGGPPPPMGRGAPPPGMMGPPPGMRPPMGPPMGIPPGRGTPMGMPPPGMRPPPPGMRGLL

SEQ ID NO: 6652 - protein, 284 aa, Homo sapiens
MWRGLALARAIGCAARGRGQWAVRAADCAQSGRHPGPAVVCGRRLISVLEQIRHFVMMPEINTNHLDKQQVQLLAEMCILIDENDNKIGAETKKNCHLNENIEKGLLHRAFSVFLFNTENKLLLQQRSDAKITFPGCFTNTCCSHPLSNPAELEESDALGVRRAAQRRLKAELGIPLEEVPPEEINYLTRIHYKAQSDGIWGEHEIDYILLVRKNVTLNPDPNEIKSYCYVSKEELKELLKKAASGEIKITPWFKIIAATFLFKWWDNLNHLNQFVDHEKIYRM

SEQ ID NO: 6653 - protein, 59 aa, Homo sapiens; identical to SEQ ID NO: 4813

SEQ ID NO: 6654 - protein, 1012 aa, Homo sapiens
MEEYEKFCEKSLARIQEASLSTESFLPAQSESISLIRFHGVAILSPLLNIEKRKEMQQEKQKALDVEARKQVNRKKALLTRVQEILDNVQVRKAPNASDFDQWEMETVYSNSEVRNLNVPATFPNSFPSHTEHSTAAKLDKIAGILPLDNEDQCKTDGIDLARDSEGFNSPKQCDSSNISHVENEAFPKTSSATPQETLISDGPFSVNEQQDLPLLAEVIPDPYVMSLQNLMKKSKEYIEREQSRRSLRGSINRIVNESHLDKEHDAVEVADCVKEKGQLTGKHCVSVIPDKPSLNKSNVLLQGASTQASSMSMPVLASFSKVDIPIRTGHPTVLESNSDFKVIPTFVTENNVIKSLTGSYAKLPSPEPSMSPKMHRRRSRTSSACHILINNPINACELSPKGKEQAMDLIIQDTDENTNVPEIMPKLPTDLAGVCSSKVYVGKNTSEVKEDVVLGKSNQVCQSSGNHLENKVTHGLVTVEGQLTSDERGAHIMNSTCAAMPKLHEPYASSQCIASPNFGTVSGLKPASMLEKNCSLQTELNKSYDVKNPSPLLMQNQNTRQQMDTPMVSCGNEQFLDNSFEKVKRRLDLDIDGLQKENCPYVITSGITEQERQHLPEKRYPKGSGFVNKNKMLGTSSKESEELLKSKMLAFEEMRKRLEEQHAQQLSLLIAEQEREQERLQKEIEEQEKMLKEKKAMTAEASELDINNAVELEWRKISDSSLLETMLSQADSLHTSNSNSSGFTNSAMQYSFVSANEAPFYLWGSSTSGLTKLSVTRPFGRAKTRWSQVFSLEIQAKFNKITAVAKGFLTRRLMQTDKLKQLRQTVKDTMEFIRSFQSEAPLKRGIVSAQDASLQERVLAQLRAALYGIHDIFFVMDAAERMSILHHDREVRKEKMLRQMDKMKSPRVALSAATQKSLDRKKYMKAAEMGMPNKKFLVKQNPSETRVLQPNQGQNAPVHRLLSRQGTPKTSVKGVVQNRQKPSQSRVPNRVPVSGVYAGKIQRKRPNVATI

SEQ ID NO: 6655 - protein, 88 aa, Homo sapiens
MASASARGNQDKDAHFPPPSKQSLLFCPKSKLHIHRAEISKIMRECQEESFWKRALPFSLVSMLVTQGLVYQGYLAANSRFGSLPKVA

SEQ ID NO: 6656 - protein, 245 aa, Homo sapiens; identical to SEQ ID NO: 4951

SEQ ID NO: 6657 - protein, 516 aa, Homo sapiens
MSYPADDYESEAAYDPYAYPSDYDMHTGDPKQDLAYERQYEQQTYQVIPEVIKNFIQYFHKTVSDLIDQKVYELQASRVSSDVIDQKVYEIQDIYENSWTKLTERFFKNTPWPEAEAIAPQVGNDAVFLILYKELYYRHIYAKVSFQSFSQYRCKTAKKSEEEIDFLRSNPKIWNVHSVLNVLHSLVDKSNINRQLEVYTSGGDPESVAGEYGRHSLYKMLGYFSLVGLLRLHSLLGDYYQAIKVLENIELNKKSMYSRVPECQVTTYYYVGFAYLMMRRYQDAIRVFANILLYIQRTKSMFQRTTYKYEMINKQNEQMHALLAIALTMYPMRIDESIHLQLREKYGDKMLRMQKGDPQVYEELFSYSCPKFLSPVVPNYDNVHPNYHKEPFLQQLKVFSDEVQQQAQLSTIRSFLKLYTTMPVAKLAGFLDLTEQEFRIQLLVFKHKMKNLVWTSGISALDGEFQSASEVDFYIDKDMIHIADTKVARRYGDFFIRQIHKFEELNRTLKKMGQRP

SEQ ID NO: 6658 - protein, 832 aa, Homo sapiens
LSRRVPCVRRGCRPPLPPLPGSQSRAWSRDREAPLDPGRPAQSGRRPTSRSVSHACSWNGGSLDPLEGTPALLRSAERLMRKVKKLRLDKENTGSWRSFSLNSEGAERITSYDFHSESGLFLFQASNSLFHCRDGGKNGFMVSPMKPLEIKTQCSGPRMDPKICPADPAFFSFINNSDLWVANIETGEERRLTFCHQGLSNVLDDPKSAGVATFVIQEEFDRFTGYWWCPTASWEGSEGLKTLRILYEEVDESEVEVIHVPSPALEERKTDSYRYAAGSKNPKIALKLAEFQTDSQGKIVSTQEKELVQPFSSLFPKVEYIARAGWTRDGKYAWAMFLDRPQQWLQLVLLPPALFIPSTENEEQRLASARAVPRNVQPYVVYEEVTNVWINVHDIFYPFPQSEGEDELCFLRANECKTGFCHLYKVTAVLKSQGYDWSEPFSPGEDEFKCPIKEEIALTSGEWEVLARHGSKIWVNEETKLVYFQGTKDTPLEHHLYVVSYEAAGEIVRLTTPGFSHSCSMSQNFDMFVSHYSSVSTPPCVHVYKLSGPDDDPLHKQPRFWASMMEAASCPPDYVPPEIFHFHTRSDVRLYGMIYKPHALQPGKKHPTVLFVYGGPQVQLVNNSFKGIKYLRLNTLASLGYAVVVIDGRGSCQRGLRFEGALKNQMGQVEIEDQVEGLQFVAEKYGFIDLSRVAIHGWSYGGFLSLMGLIHKPQVFKVAIAGAPVTVWMAYDTGYTERYMDVPENNQHGYEAGSVALHVEKLPNEPNRLLILHGFLDENVHFFHTNFLVSQLIRAGKPYQLQIYPNERHSIRCPESGEHYEVTLLHFLQEYL

SEQ ID NO: 6659 - protein, 1690 aa, Homo sapiens
MDCLLELSATDTKIEESSSQSFVASENQVGAAESKIMEKRPEEESEDSKMDSFLDMQLTEDLDSLIQNAFEKLNSSPDDQVYSFLPSQDVNSFNDSSEFINPDSSNMTPIFSTQNMNLNGENLENSGSTLSLNPLPSHSVLNESKCFIKDNTLALESNYPEDSLLSSSLNVASDSIAGCSSLNQKQKELLESECVEAQFSEAPVDLDASEPQACLNLPGLDLPGTGGDQKSTRVSDVFLPSEGFNFKPHKHPELPTKGKDVSYCPVLAPLPLLLPPPPPPPMWNPMIPAFDLFQGNHGFVAPVVTTAAHWRSVNYTFPPSVISHTSPTKVWRNKDGTSAYQVQETPVSQVVRKKTSYVGLVLVLLRGLPGSGKSFLARTLQEDNPSGVILSTDDYFYINGQYQFDVKYLGEAHEWNQNRAKEAFEKKISPIIIDNTNLQAWEMKPYVALSQKHKYKVLFREPDTWWKFKPKELARRNIHGVSKEKITRMLEHYQRFVSVPIIMSSSVPEKIERIELCAYSCEDRSTSPRDDEDIISEKEENILSLSLKHLEFTEEKNLDVTKETMLPENVAYLSNADLNKRRKEISDMNPSIQSALILETPHMYFSDSESKLQATDKSENEQIEMVAVKGYSKTDTDSSMERVSPSTCCSENNQEDCDLANSGPLQNEKSSPGEIVEERATVTKKAFGKQKSKSTLEKFPRHELSNFVGDWPVDKTIGQRTKRNRKTEKTSSVQSDKKYNYPQSHKLVNSVSVNTDCVQQRGSPHESVEDGRKSQCDDASEPLNSYKYDAYKNIDKNSFNIMGDWPSSDSLAQREHRSRMPKTGLSEPNLEIGTNDKMNEISLSTAHEACWGTSSQKLKTLGSSNLGSSEMLLSEMTCESQTCLSKKSHGQHTSLPLTFTNSAPTVSGVVEPQTLAECQEQMPKRDPGKEVGMCTQTEPQDFALLWKIEKNKISISDSIKVLTGRLDGFKPKVFNINTKSDVQEAIPYRVMYDKSTFVEESELTSADESENLNILCKLFGSFSLEALKDLYERCNKDIIWATSLLLDSETKLCEDTEFENFQKSCDGSQIGPFSLGLNLKEIISQRGTLENSNSPVPEFSHGIGISNADSQSTCDAERGNSEQAEMRAVTPENHESMTSIFPSAAVGLKNNNDILPNSQEELLYSSKQSFPGILKATTPKDMSETEKNLVVTETGDNIHSPSHFSDIFNFVSSTSNLELNEEIYFTDSLEIKRNENFPKDYVKFSDEEEFMNEDEKEMKEILMAGSSLSAGVSGEDKTEILNPTPAMAKSLTIDCLELALPPELAFQLNELFGPVGIDSGSLTVEDCVVHIDLNLAKVIHEKWKESVMERQRQEEVSCGKFMQDPSLVGHTGLDNPEQKSSQRTGKKLLKTLTASEMLPLLDHWNTQTKKVSLREIMSEEIALQEKHNLKRETLMFEKDCATKLKEKQLFKIFPAINQNFLVDIFKDHNYSLEHTVQFLNCVLEGDPVKTVVAQEFVHQNENVTSHTGQKSKEKKPKKLKETEETPSELSFQDFEYPDYDDYRAEAFLHQQKRMECYSKAKEAYRIGKKNVATFYAQQGTLHEQKMKEANHLAAIEIFEKVNASLLPQNVLDLHGLHVDEALEHLMRVLEKKTEEFKQNGGKPYLSVITGRGNHSQGGVARIKPAVIKYLISHSFRFSEIKPGCLKVMLK

SEQ ID NO: 6660 - protein, 158 aa, Homo sapiens
MGSGSSRSSRTLRRRRSPESLPAGPGAAALEGGTRRRVPVAAAEVPGAAAEEAPGRDPSPVAPPDGRDETLRLLDELLAESAAWGPPEPAPRRPARLRPTAVAGSAVCAEQSTEGHPGSGNVSEAPGSGRKKPERPAAISYDHSEEGLMASIEREYCR

SEQ ID NO: 6661 - protein, 245 aa, Homo sapiens; identical to SEQ ID NO: 4767

SEQ ID NO: 6662 - protein, 337 aa, Homo sapiens
MEQPWPPPGPWSLPRAEGEAEEESDFDVFPSSPRCPQLPGGGAQMYSHGIELACQKQKEFVKSSVACKWNLAEAQQKLGSLALHNSESLDQEHAKAQTAVSELRQREEEWRQKEEALVQREKMCLWSTDAISKDVFNKSFINQDKRKDTEDEDKSESFMQKYEQKIRHFGMLSRWDDSQRFLSDHPYLVCEETAKYLILWCFHLEAEKKGALMEQIAHQAVVMQFIMEMAKNCNVDPRGCFRLFFQKAKAEEEGYFEAFKNELEAFKSRVRLYSQSQSFQPMTVQNHVPHSGVGSIGLLESLPQNPDYLQYSISTALCSLNSVVHKEDDEPKMMDTV

SEQ ID NO: 6663 - protein, 308 aa, Homo sapiens
MEQPWPPPGPWSLPRAEGEAEEESDFDVFPSSPRCPQLPGGGAQMYSHGIELACQKQKEFVKSSVACKWNLAEAQQKLGSLALHNSESLDQEHAKAQTAVSELRQREEEWRQKEEALVQREKMCLWSTDAISKDVFNKSFINQDKRKDTEDEDKSESFMQKYEQKIRHFGMLSRWDDSQRFLSDHPYLVCEETAKYLILWCFHLEAEKKGALMEQIAHQAVVMQFIMEMAKNCNVDPRGCFRLFFQKAKAEEEGYFEAFKNELEAFKSRVRLYSQSQSFQPMTVQNHVPHSGVGSIGLLESLPQAPRF

SEQ ID NO: 6664 - protein, 1407 aa, Homo sapiens; identical to SEQ ID NO: 5616

SEQ ID NO: 6665 - protein, 175 aa, Homo sapiens
MILNVLEYGSQQVADLTLNLDDYIDAEHLGDFHRTYKNSEELRSRIVSGIITPIHEQWEKANVSSPHREFPPATAREVDPLRIPPHHPHTSRQPPWCDPLGPFVVGGEDLDPFGPRRGGMIVDPLRSGFPRALIDPSSGLPNRLPPGAVPPGARFDPFGPIGTSPPGPRPDRRGQ

SEQ ID NO: 6666 - protein, 183 aa, Homo sapiens
MAGLEVLFASAAPAITCRQDALVCFLHWEVVTHGYFGLGVGDQPGPNDKKSELLPAGWNNNKDLYVLRYEYKDGSRKLLVKAITVESSMILNVLEYGSQQVADLTLNLDDYIDAEHLGDFHRTYKNSEELRSRIVSGIITPIHEQWEKANVSSPHREFPPATAREVDPLRIPPHHPHTSRQPP

SEQ ID NO: 6667 - protein, 295 aa, Homo sapiens; identical to SEQ ID NO: 4796

SEQ ID NO: 6668 - protein, 295 aa, Homo sapiens; identical to SEQ ID NO: 4796

SEQ ID NO: 6669 - protein, 137 aa, Homo sapiens
MGLRAGGTLGRAGAGRGAPEGPGPSGGAQGGSIHSGRIAAVHNVPLSVLIRPLPSVLDPAKVQSLVDTIREDPDSVPPIDVLWIKGAQGGDYFYSFGGCHRYAAYQQLQRETIPAKLVQSTLSDLRVYLGASTPDLQ

SEQ ID NO: 6670 - protein, 576 aa, Homo sapiens
MKCHYEALGVRRDASEEELKKAYRKLALKWHPDKNLDNAAEAAEQFKLIQAAYDVLSDPQERAWYDNHREALLKGGFDGEYQDDSLDLLRYFTVTCYSGYGDDEKGFYTVYRNVFEMIAKEELESVLEEEVDDFPTFGDSQSDYDTVVHPFYAYWQSFCTQKNFAWKEEYDTRQASNRWEKRAMEKENKKIRDKARKEKNELVRQLVAFIRKRDKRVQAHRKLVEEQNAEKARKAEEMRRQQKLKQAKLVEQYREQSWMTMANLEKELQEMEARYEKEFGDGSDENEMEEHELKDEEDGKDSDEAEDAELYDDLYCPACDKSFKTEKAMKNHEKSKKHREMVALLKQQLEEEEENFSRPQIDENPLDDNSEEEMEDAPKQKLSKKQKKKKQKPAQDVPGKDSYLPAAHFQMAWGKKCVLGERRDGESEHKCAKMLLENRQNYDDNFNVNGPGEGVKVDPEDTNLNQDSAKELEDSPQENVSVTEIIKPCDDPKSEAKSVPKPKGKKTKDMKKPVRVPAEPQTMSVLISCTTCHSEFPSRNKLFDHLKATGHARAPSSSSLNSATSSQSKKEKRKNR

SEQ ID NO: 6671 - protein, 265 aa, Homo sapiens
MLALTVLETCVKNCGHRFHVLVASQDFVESVLVRTILPKNNPPTIVHDKVLNLIQSWADAFRSSPDLTGVVTIYEDLRRKGLEFPMTDLDMLSPIHTPQRTVFNSETQSGQDSVGTDSSQQEDSGQHAAPLPAPPILSGDTPIAPTPEQIGKLRSELEMVSGNVRVMSEMLTELVPTQAEPADLELLQELNRTCRAMQQRVLELIPQIANEQLTEELLIVNDNLNNVFLRHERDRGLTVLPRLVSNSWPQAVLPPWPPKALVLQA

SEQ ID NO: 6672 - protein, 2090 aa, Homo sapiens
MDEVEQDQHEARLKELFDSFDTTGTGSLGQEELTDLCHMLSLEEVAPVLQQTLLQDNLLGRVHFDQFKEALILILSRTLSNEEHFQEPDCSLEAQPKYVRGGKRYGRRSLPEFQESVEEFPEVTVIEPLDEEARPSHIPAGDCSEHWKTQRSEEYEAEGQLRFWNPDDLNASQSGSSPPQDWIEEKLQEVCEDLGITRDGHLNRKKLVSICEQYGLQNVDGEMLEEVFHNLDPDGTMSVEDFFYGLFKNGKSLTPSASTPYRQLKRHLSMQSFDESGRRTTTSSAMTSTIGFRVFSCLDDGMGHASVERILDTWQEEGIENSQEILKALDFSLDGNINLTELTLALENELLVTKNSIHQAALASFKAEIRHLLERVDQVVREKEKLRSDLDKAEKLKSLMASEVDDHHAAIERRNEYNLRKLDEEYKERIAALKNELRKEREQILQQAGKQRLELEQEIEKAKTEENYIRDRLALSLKENSRLENELLENAEKLAEYENLTNKLQRNLENVLAEKFGDLDPSSAEFFLQEERLTQMRNEYERQCRVLQDQVDELQSELEEYRAQGRVLRLPLKNSPSEEVEANSGGIEPEHGLGSEECNPLNMSIEAELVIEQMKEQHHRDICCLRLELEDKVRHYEKQLDETVVSCKKAQENMKQRHENETHTLEKQISDLKNEIAELQGQAAVLKEAHHEATCRHEEEKKQLQVKLEEEKTHLQEKLRLQHEMELKARLTQAQASFEREREGLQSSAWTEEKVRGLTQELEQFHQEQLTSLVEKHTLEKEELRKELLEKHQRELQEGREKMETECNRRTSQIEAQFQSDCQKVTERCESALQSLEGRYRQELKDLQEQQREEKSQWEFEKDELTQECAEAQELLKETLKREKTTSLVLTQEREMLEKTYKEHLNSMVVERQQLLQDLEDLRNVSETQQSLLSDQILELKSSHKRELREREEVLCQAGASEQLASQRLERLEMEHDQERQEMMSKLLAMENIHKATCETADRERAEMSTEISRLQSKIKEMQQATSPLSMLQSGCQVIGEEEVEGDGALSLLQQGEQLLEENGDVLLSLQRAHEQAVKENVKMATEISRLQQRLQKLEPGLVMSSCLDEPATEFFGNTAEQTEQFLQQNRTKQVEGVTRRHVLSDLEDDEVRDLGSTGTSSVQRQEVKIEESEASVEGFSELENSEETRTESWELKNQISQLQEQLMMLCADCDRASEKKQDLLFDVSVLKKKLKMLERIPEASPKYKLLYEDVSRENDCLQEELRMMETRYDEALENNKELTAEVFRLQDELKKMEEVTETFLSLEKSYDEVKIENEGLNVLVLRLQGKIEKLQESVVQRCDCCLWEASLENLEIEPDGNILQLNQTLEECVPRVRSVHHVIEECKQENQYLEGNTQLLEKVKAHEIAWLHGTIQTHQERPRVQNQVILEENTTLLGFQDKHFQHQATIAELELEKTKLQELTRKLKERVTILVKQKDVLSHGEKEEELKAMMHDLQITCSEMQQKVELLRYESEKLQQENSILRNEITTLNEEDSISNLKLGTLNGSQEEMWQKTETVKQENAAVQKMVENLKKQISELKIKNQQLDLENTELSQKNSQNQEKLQELNQRLTEMLCQKEKEPGNSALEEREQEKFNLKEELERCKVQSSTLVSSLEAELSEVKIQTHIVQQENHLLKDELEKMKQLHRCPDLSDFQQKISSVLSYNEKLLKEKEALSEELNSCVDKLAKSSLLEHRIATMKQEQKSWEHQSASLKSQLVASQEKVQNLEDTVQNVNLQMSRMKSDLRVTQQEKEALKQEVMSLHKQLQNAGGKSWAPEIATHPSGLHNQQKRLSWDKLDHLMNEEQQLLWQENERLQTMVQNTKAELTHSREKVRQLESNLLPKHQKHLNPSGTMNPTEQEKLSLKRECDQFQKEQSPANRKVSQMNSLEQELETIHLENEGLKKKQVKLDEQLMEMQHLRSTATPSPSPHAWDLQLLQQQACPMVPREQFLQLQRQLLQAERINQHLQEELENRTSETNTPQGNQEQLVTVMEERMIEVEQKLKLVKRLLQEKVNQLKEQVSLPGHLCSPTSHSSFNSSFTSLYCH

SEQ ID NO: 6673 - protein, 1377 aa, Homo sapiens
MDEVEQDQHEARLKELFDSFDTTGTGSLGQEELTDLCHMLSLEEVAPVLQQTLLQDNLLGRVHFDQFKEALILILSRTLSNEEHFQEPDCSLEAQPKYVRGGKRYGRRSLPEFQESVEEFPEVTVIEPLDEEARPSHIPAGDCSEHWKTQRSEEYEAEGQLRFWNPDDLNASQSGSSPPQDWIEEKLQEVCEDLGITRDGHLNRKKLVSICEQYGLQNVDGEMLEEVFHNLDPDGTMSVEDFFYGLFKNGKSLTPSASTPYRQLKRHLSMQSFDESGRRTTTSSAMTSTIGFRVFSCLDDGMGHASVERILDTWQEEGIENSQEILKALDFSLDGNINLTELTLALENELLVTKNSIHQAALASFKAEIRHLLERVDQVVREKEKLRSDLDKAEKLKSLMASEVDDHHAAIERRNEYNLRKLDEEYKERIAALKNELRKEREQILQQAGKQRLELEQEIEKAKTEENYIRDRLALSLKENSRLENELLENAEKLAEYENLTNKLQRNLENVLAEKFGDLDPSSAEFFLQEERLTQMRNEYERQCRVLQDQVDELQSELEEYRAQGRVLRLPLKNSPSEEVEANSGGIEPEHGLGSEECNPLNMSIEAELVIEQMKEQHHRDICCLRLELEDKVRHYEKQLDETVVSCKKAQENMKQRHENETHTLEKQISDLKNEIAELQGQAAVLKEAHHEATCRHEEEKKQLQVKLEEEKTHLQEKLRLQHEMELKARLTQAQASFEREREGLQSSAWTEEKVRGLTQELEQFHQEQLTSLVEKHTLEKEELRKELLEKHQRELQEGRYESEKLQQENSILRNEITTLNEEDSISNLKLGTLNGSQEEMWQKTETVKQENAAVQKMVENLKKQISELKIKNQQLDLENTELSQKNSQNQEKLQELNQRLTEMLCQKEKEPGNSALEEREQEKFNLKEELERCKVQSSTLVSSLEAELSEVKIQTHIVQQENHLLKDELEKMKQLHRCPDLSDFQQKISSVLSYNEKLLKEKEALSEELNSCVDKLAKSSLLEHRIATMKQEQKSWEHQSASLKSQLVASQEKVQNLEDTVQNVNLQMSRMKSDLRVTQQEKEALKQEVMSLHKQLQNAGGKSWAPEIATHPSGLHNQQKRLSWDKLDHLMNEEQQLLWQENERLQTMVQNTKAELTHSREKVRQLESNLLPKHQKHLNPSGTMNPTEQEKLSLKRECDQFQKEQSPANRKVSQMNSLEQELETIHLENEGLKKKQVKLDEQLMEMQHLRSTATPSPSPHAWDLQLLQQQACPMVPREQFLQLQRQLLQAERINQHLQEELENRTSETNTPQGNQEQLVTVMEERMIEVEQKLKLVKRLLQEKVNQLKEQVSLPGHLCSPTSHSSFNSSFTSLYCH

SEQ ID NO: 6674 - protein, 1056 aa, Homo sapiens
MATGNYFGFTHSGAAAAAAAAQYSQQPASGVAYSHPTTVASYTVHQAPVAAHTVTAAYAPAAATVAVARPAPVAVAAAATAAAYGGYPTAHTATDYGYTQRQQEAPPPPPPATTQNYQDSYSYVRSTAPAVAYDSKQYYQQPTATAAAVAAAAQPQPSVAETYYQTAPKAGYSQGATQYTQAQQTRQVTAIKPATPSPATTTFSIYPVSSTVQPVAAAATVVPSYTQSATYSTTAVTYSGTSYSGYEAAVYSAASSYYQQQQQQQKQAAAAAAAAAATAAWTGTTFTKKAPFQNKQLKPKQPPKPPQIHYCDVCKISCAGPQTYKEHLEGQKHKKKEAALKASQNTSSSNSSTRGTQNQLRCELCDVSCTGADAYAAHIRGAKHQKVVKLHTKLGKPIPSTEPNVVSQATSSTAVSASKPTASPSSIAANNCTVNTSSVATSSMKGLTTTGNSSLNSTSNTKVSAVPTNMAAKKTSTPKINFVGGNKLQSTGNKAEDIKGTECVKSTPVTSAVQIPEVKQDTVSEPVTPASLAALQSDVQPVGHDYVEEVRNDEGKVIRFHCKLCECSFNDPNAKEMHLKGRRHRLQYKKKVNPDLQVEVKPSIRARKIQEEKMRKQMQKEEYWRRREEEERWRMEMRRYEEDMYWRRMEEEQHHWDDRRRMPDGGYPHGPPGPLGLLGVRPGMPPQPQGPAPLRRPDSSDDRYVMTKHATIYPTEEELQAVQKIVSITERALKLVSDSLSEHEKNKNKEGDDKKEGGKDRALKGVLRVGVLAKGLLLRGDRNVNLVLLCSEKPSKTLLSRIAENLPKQLAVISPEKYDIKCAVSEAAIILNSCVEPKMQVTITLTSPIIREENMREGDVTSGMVKDPPDVLDRQKCLDALAALRHAKWFQQARANGLQSCVIIIRILRDLCQRVPTWSDFPSWAMELLVEKAISSASSPQSPGDALRRVFECISSGIILKGSPGLLDPCEKDPFDTLATMTDQQREDITSSAQFALRLLAFRQIHKVLGMDPLPQMSQRFNIHNNRKRRRDSDGMDLKLRGKKTKKIMITFKKCL

SEQ ID NO: 6675 - protein, 129 aa, Homo sapiens
MGCCGCSGGCGSGCGGCGSGCGGCGSSCCVPICCCKPVCCCVPACSCTSCGSCGGSKGCCGSCGGSKGGCGSCGGSKGGCGSCGCSQCSCCKPCYCSSGCGSSCCQSSCCKPCCSQASCCVPICCQCKI

SEQ ID NO: 6676 - protein, 446 aa, Homo sapiens
MPMPTEGTPPPLSGTPIPVPAYFRHAEPGFSLKRPRGLSRSLPPPPPAKGSIPISRLFPAAPGWHQLQPRRVSFRGEASETLQSPGYDPSRPESFFQQSFQRLSRLGHGSYGEVFKVRSKEDGRLYAVKRSMSPFRGPKDRARKLAEVGSHEKVGQHPCCVRLEQAWEEGGILYLQTELCGPSLQQHCEAWGASLPEAQVWGYLRDTLLALAHLHSQGLVHLDVKPANIFLGPRGRCKLGDFGLLVELGTAGAGEVQEGDPRYMAPELLQGSYGTAADVFSLGLTILEVACNMELPHGGEGWQQLRQGYLPPEFTAGLSSELRSVLVMMLEPDPKLRATAEALLALPVLRQPRAWGVLWCMAAEALSRGWALWQALLALLCWLWHGLAHPASWLQPLGPPATPPGSPPCSLLLDSSLSSNWDDDSLGPCVLKRTEGALECSQMEGL

SEQ ID NO: 6677 - protein, 334 aa, Homo sapiens
MSAANPETPNSTISREASTQSSSAAASQGWVLPEGKIVPNTVFVGGIDARMDETEIGSCFGRYGSVKEVKIITNRTGVSKGYGFVSFVNDVDVQKIVGSQIHFHGKKLKLGPAIRKQKLCARHVQPRPLVVNPPPPPQFQNVWRNPNTETYLQPQITPNPVTQHVQAYSAYPHSPGQVITGCQLLVYNYQEYPTYPDSAFQVTTGYQLPVYNYQPFPAYPRSPFQVTAGYQLPVYNYQAFPAYPNSPFQVATGYQFPVYNYQPFPAYPSSPFQVTAGYQLPVYNYQAFPAYPNSPFQVATGYQFPVYNYQAFPAYPNSPVQVTTGYQLPVYNYQ

SEQ ID NO: 6678 - protein, 390 aa, Homo sapiens
MSAANPETPNSTISREASTQSSSAAASQGWVLPEGKIVPNTVFVGGIDARMDETEIGSCFGRYGSVKEVKIITNRTGVSKGYGFVSFVNDVDVQKIVGSQIHFHGKKLKLGPAIRKQKLCARHVQPRPLVVNPPPPPQFQNVWRNPNTETYLQPQITPNPVTQHVQAYSAYPHSPGQVITGCQLLVYNYQEYPTYPDSAFQVTTGYQLPVYNYQPFPAYPRSPFQVTAGYQLPVYNYQAFPAYPNSPFQVATGYQFPVYNYQPFPAYPSSPFQVTAGYQLPVYNYQAFPAYPNSPVQVTTGYQLPVYNYQAFPAYPSSPFQVTTGYQLPVYNYQAFPAYPNSAVQVTTGYQFHVYNYQMPPQCPVGEQRRNLWTEAYKWWYLVCLIQRRD

SEQ ID NO: 6679 - protein, 390 aa, Homo sapiens; identical to SEQ ID NO: 6678

SEQ ID NO: 6680 - protein, 366 aa, Homo sapiens
MSAANPETPNSTISREASTQSSSAAASQGWVLPEGKIVPNTVFVGGIDARMDETEIGSCFGRYGSVKEVKIITNRTGVSKGYGFVSFVNDVDVQKIVGSQIHFHGKKLKLGPAIRKQKLCARHVQPRPLVVNPPPPPQFQNVWRNPNTETYLQPQITPNPVTQHVQAYSAYPHSPGQVITGCQLLVYNYQEYPTYPDSAFQVTTGYQLPVYNYQPFPAYPRSPFQVTAGYQLPVYNYQAFPAYPNSPFQVATGYQFPVYNYQPFPAYPSSPFQVTAGYQLPVYNYQAFPAYPNSPVQVTTGYQLPVYNYQAFPAYPNSAVQVTTGYQFHVYNYQMPPQCPVGEQRRNLWTEAYKWWYLVCLIQRRD

SEQ ID NO: 6681 - protein, 382 aa, Homo sapiens
MSAANPETPNSTISREASTQSSSAAASQGWVLPEGKIVPNTVFVGGIDARMDETEIGSCFGRYGSVKEVKIITNRTGVSKGYGFVSFVNDVDVQKIVGSQIHFHGKKLKLGPAIRKQKLCARHVQPRPLVVNPPPPPQFQNVWRNPNTETYLQPQITPNPVTQHVQAYSAYPHSPGQVITGCQLLVYNYQEYPTYPDSAFQVTTGYQLPVYNYQPFPAYPRSPFQVTAGYQLPVYNYQAFPAYPNSPFQVATGYQFPVYNYQPFPAYPSSPFQVTAGYQLPVYNYQAFPAYPNSPFQVATGYQFPVYNYQAFPAYPNSPVQVTTGYQLPVYNYQAFPAYPNSPFQVATGYQFPVYNYQAFPAYPNSPVQVTTGYQLPVYNYQ

SEQ ID NO: 6682 - protein, 613 aa, Homo sapiens
MSAANPETPNSTISREASTQSSSAAASQGWVLPEGKIVPNTVFVGGIDARMDETEIGSCFGRYGSVKEVKIITNRTGVSKGYGFVSFVNDVDVQKIVGSQIHFHGKKLKLGPAIRKQKLCARHVQPRPLVVNPPPPPQFQNVWRNPNTETYLQPQITPNPVTQHVQSAANPETPNSTISREASTQSSSAAASQGWVLPEGKIVPNTVFVGGIDARMDETEIGSCFGRYGSVKEVKIITNRTGVSKGYGFVSFVNDVDVQKIVGSQIHFHGKKLKLGPAIRKQKLCARHVQPRPLVVNPPPPPQFQNVWRNPNTETYLQPQITPNPVTQHVQSAANPETPNSTISREASTQSSSAAASQGWVLPEGKIVPNTVFVGGIDARMDETEIGSCFGRYGSVKEVKIITNRTGVSKGYGFVSFVNDVDVQKIVGSQIHFHGKKLKLGPAIRKQKLCARHVQPRPLVVNPPPPPQFQNVWRNPNTETYLQPQITPNPVTQHVQAYSAYPHSPGQVITGCQLLVYNYQEYPTYPDSAFQVTTGYQLPVYNYQPFPAYPRSPFQVTAGYQLPVYNYQAFPAYPNSPFQVATGYQFPVCEICKILVLKNAAAFLCHSKVNRSI

SEQ ID NO: 6683 - protein, 127 aa, Homo sapiens; identical to SEQ ID NO: 5428

SEQ ID NO: 6684 - protein, 178 aa, Homo sapiens
MMRAMKPPGGESSNLFGSPEEATPSSRPNRMASNIFGPTEEPQNIPKRTNPPGGKGSGIFDESTPVQTRQHLNPPGGKTSDIFGSPVTATSRLAHPNKPKDHVFLCEGEEPKSDLKAARSIPAGAEPGEKGSARKAGPAKEQEPMPTVDSHEPRLGPRPRSHNKVLNPPGGKSSISFY

SEQ ID NO: 6685 - protein, 218 aa, Homo sapiens
MFQVPDSEGGRAGSRKWQLLTGSLASTSPSLLSGQGPWAPLQRAMKPPGGESSNLFGSPEEATPSSRPNRMASNIFGPTEEPQNIPKRTNPPGGKGSGIFDESTPVQTRQHLNPPGGKTSDIFGSPVTATSRLAHPNKPKDHVFLCEGEEPKSDLKAARSIPAGAEPGEKGSARKAGPAKEQEPMPTVDSHEPRLGPRPRSHNKVLNPPGGKSSISFY

SEQ ID NO: 6686 - protein, 1621 aa, Homo sapiens
MAGGRGAPGRGRDEPPESYPQRQDHELQALEAIYGADFQDLRPDACGPVKEPPEINLVLYPQGLTGEEVYVKVDLRVKCPPTYPDVVPEIELKNAKGLSNESVNLLKSRLEELAKKHCGEVMIFELAYHVQSFLSEHNKPPPKSFHEEMLERRAQEEQQRLLEAKRKEEQEQREILHEIQRRKEEIKEEKKRKEMAKQERLEIASLSNQDHTSKKDPGGHRTAAILHGGSPDFVGNGKHRANSSGRSRRERQYSVCNSEDSPGSCEILYFNMGSPDQLMVHKGKCIGSDEQLGKLVYNALETATGGFVLLYEWVLQWQKKMGPFLTSQEKEKIDKCKKQIQGTETEFNSLVKLSHPNVVRYLAMNLKEQDDSIVVDILVEHISGVSLAAHLSHSGPIPVHQLRRYTAQLLSGLDYLHSNSVVHKVLSASNVLVDAEGTVKITDYSISKRLADICKEDVFEQTRVRFSDNALPYKTGKKGDVWRLGLLLLSLSQGQECGEYPVTIPSDLPADFQDFLKKCVCLDDKERWSPQQLLKHSFINPQPKMPLVEQSPEDSEGQDYVETVIPSNRLPSAAFFSETQRQFSRYFIEFEELQLLGKGAFGAVIKVQNKLDGCCYAVKRIPINPASRQFRRIKGEVTLLSRLHHENIVRYYNAWIERHERPAGPGTPPPDSGPLAKDDRAARGQPASDTDGLDSVEAAAPPPILSSSVEWSTSGERSASARFPATGPGSSDDEDDDEDEHGGVFSQSFLPASDSESDIIFDNEDENSKSQNQMEYCEKSTLRDTIDQGLYRDTVRLWRLFREILDGLAYIHEKGMIHRDLKPVNIFLDSDDHVKIGDFGLATDHLAFSADSKQDDQTGDLIKSDPSGHLTGMVGTALYVSPEVQGSTKSAYNQKVDLFSLGIIFFEMSYHPMVTASERIFVLNQLRDPTSPKFPEDFDDGEHAKQKSVISWLLNHDPAKRPTATELLKSELLPPPQMEESELHEVLHHTLTNVDGKAYRTMMAQIFSQRISPAIDYTYDSDILKGNFSIRTAKMQQHVCETIIRIFKRHGAVQLCTPLLLPRNRQIYEHNEAALFMDHSGMLVMLPFDLRIPFARYVARNNILNLKRYCIERVFRPRKLDRFHPKELLECAFDIVTSTTNSFLPTAEIIYTIYEIIQEFPALQERNYSIYLNHTMLLKAILLHCGIPEDKLSQVYIILYDAVTEKLTRREVEAKFCNLSLSSNSLCRLYKFIEQKGDLQDLMPTINSLIKQKTGIAQLVKYGLKDLEEVVGLLKKLGIKLQVLINLGLVYKVQQHNGIIFQFVAFIKRRQRAVPEILAAGGRYDLLIPQFRGPQALGPVPTAIGVSIAIDKISAAVLNMEESVTISSCDLLVVSVGQMSMSRAINLTQKLWTAGITAEIMYDWSQSQEELQEYCRHHEITYVALVSDKEGSHVKVKSFEKERQTEKRVLETELVDHVLQKLRTKVTDERNGREASDNLAVQNLKGSFSNASGLFEIHGATVVPIVSVLAPEKLSASTRRRYETQVQTRLQTSLANLHQKSSEIEILAVDLPKETILQFLSLEWDADEQAFNTTVKQLLSRLPKQRYLKLVCDEIYNIKVEKKVSVLFLYSYRDDYYRILF

SEQ ID NO: 6687 - protein, 795 aa, Homo sapiens
MKFTNTKVQMMQNVHLAPETDEDDLYSGYNDYNPIYDIEELENDAAFQQAVRTSHGRRPPITAKISSTAVTRPIATGYGSKTSLASSIGRPMTGAIQDGVTRPMTAVRAAGFTKAALRGSAFDPLSQSRGPASPLEAKKKDSPEEKIKQLEKEVNELVEESCIANSCGDLKLALEKAKDAGRKERVLVRQREQVTTPENINLDLTYSVLFNLASQYSVNEMYAEALNTYQVIVKNKMFSNAGILKMNMGNIYLKQRNYSKAIKFYRMALDQVPSVNKQMRIKIMQNIGVTFIQAGQYSDAINSYEHIMSMAPNLKAGYNLTICYFAIGDREKMKKAFQKLITVPLEIDEDKYISPSDDPHTNLVTEAIKNDHLRQMERERKAMAEKYIMTSAKLIAPVIETSFAAGYDWCVEVVKASQYVELANDLEINKAVTYLRQKDYNQAVEILKVLEKKDSRVKSAAATNLSALYYMGKDFAQASSYADIAVNSDRYNPAALTNKGNTVFANGDYEKAAEFYKEALRNDSSCTEALYNIGLTYEKLNRLDEALDCFLKLHAILRNSAEVLYQIANIYELMENPSQAIEWLMQVVSVIPTDPQVLSKLGELYDREGDKSQAFQYYYESYRYFPCNIEVIEWLGAYYIDTQFWEKAIQYFERASLIQPTQVKWQLMVASCFRRSGNYQKALDTYKDTHRKFPENVECSGSVRTGHMERDPLNLLPRKSVLPGPEIAKCNYFSGEKYYLSAFLSSSLHRSWIKRCSRICQKTEEVGKNERNKGTAHKVRQRWQWGLPWQKRRKC

SEQ ID NO: 6688 - protein, 63 aa, Homo sapiens
MSYYRSYYGGLGYGYGGFGGWGYGYGCGYGSFRRLGYGCGYGGYGFSCCRPLYYGGYGFSAFY

SEQ ID NO: 6689 - protein, 44 aa, Homo sapiens
MSYYGNYYGGLGYGYDCKYSYTSGFGAFRILDCGYRCGCGGVWI

SEQ ID NO: 6690 - protein, 44 aa, Homo sapiens
MSYYSHLSGGLGCGLAVAVTMGRTVAVAEYGRCRHGCHSSYSAR

SEQ ID NO: 6691 - protein, 45 aa, Homo sapiens
MCYYHNYYGSLDYGCSYGSEYGNSGYACNFPCSYGRFLLAPRKKF

SEQ ID NO: 6692 - protein, 207 aa, Homo sapiens
MPHSHCHSLRSFHNAPPLSAITHGTNPITFEDRLCLPSSFHSRTCFLDNFQETCNETTSCQMTNCEQDLFTDDSCVQSNCFPGVVQTTYSNSRPCERTACQSESSSAGLACVSQPCQSESTQQMGFVAQSCQPASLKGNSCPPKTSKSKNFETLERASSQCQCQSQNPESSSCRPLVNVAPEPQLLESSPGVEPTCCVTGGSQLPSK

SEQ ID NO: 6693 - protein, 214 aa, Homo sapiens
MAHVSSETQDVSPKDELTASEASTRSPLCEHTFPGDSDLRSMIEEHAFQVLSQGSLLESPSYTVCVSEPDKDDDFLSLNFPRKLWKIVESDQFKSISWDENGTCIVINEELFKKEILETKAPYRIFQTDAIKSFVRQLNLYGFSKIQQNFQRSAFLATFLSEEKESSVLSKLHVFVFHHSLFGATFGEHHFQPCPLPSGNKAPISTWSGDSWLL

SEQ ID NO: 6694 - protein, 214 aa, Homo sapiens; identical to SEQ ID NO: 6693

SEQ ID NO: 6695 - protein, 478 aa, Homo sapiens
MAAALKCLLTLGRWCPGLGVAPQARALAALVPGVTQVDNKSGFLQKRPHRQHPGILKLPHVRLPQALANGAQLLLLGSAGPTMENQVQTLTSYLWSRHLPVEPEELQRRARHLEKKFLENPDLSQTEEKLRGAVLHALRKTTYHWQELSYTEGLSLVYMAARLDGGFAAVSRAFHEIRARNPAFQPQTLMDFGSGTGSVTWAAHSIWGQSLREYMCVDRSAAMLVLAEKLLKGGSESGEPYIPGVFFRQFLPVSPKVQFDVVVSAFSLSELPSKADRTEVVQTLWRKTGHFLVLVENGTKAGHSLLMDARDLVLKGKEKSPLDPRPGFVFAPCPHELPCPQLTNLACSFSQAYHPIPFSWNKKPKEEKFSMVILARGSPEEAHRWPRITQPVLKRPRHVHCHLCCPDGHMQHAVLTARRHGRYGGCDQNQWDVAGSCSPRQHLFPQGFVSLCPCQLLGRSFTCAYSVCVSSIYGSGSL

SEQ ID NO: 6696 - protein, 257 aa, Homo sapiens
MEEEASSPGLGCSKPHLEKLTLGITRILESSPGVTEVTIIEKPPAERHMISSWEQKNNCVMPEDVKNFYLMTNGFHMTWSVKLDASDDQPEKPHFDSRSVIFELDSCNGSGKVCLVYKSGKPALAEDTEIWFLDRALYWHFLTDTFTAYYRLLITHLGLPQWQYAFTSYGISPQAKQWFSMYKPITYNTNLLTEETDSFVNKLDPSKVFKSKNKIVIPKKKGPVQPAGGQKGPSGPSGPSTSSTSKSSSGSGNPTRK

SEQ ID NO: 6697 - protein, 263 aa, Homo sapiens; identical to SEQ ID NO: 5395

SEQ ID NO: 6698 - protein, 129 aa, Homo sapiens; identical to SEQ ID NO: 6440

SEQ ID NO: 6699 - protein, 541 aa, Homo sapiens
MEALLEGIQNRGHGGGFLTSCEAELQELMKQIDIMVAHKKSEWEGRTHALETCLKIREQELKSLRSQLDVTHKEVGMLHQQVEEHEKIKQEMTMEYKQELKKLHEELCILKRSYEKLQKKQMREFRGNTKNHREDRSEIERLTAKIEEFRQKSLDWEKQRLIYQQQVSSLEAQRKALAEQSEIIQAQLVNRKQKLESVELSSQSEIQHLSSKLERANDTICANELEIERLTMRVNDLVGTSMTVLQEQQQKEEKLRESEKLLEALQEEKRELKAALQSQENLIHEARIQKEKLQEKVKATNTQHAVEAIRPREESLAEKKYTSQGQGDLDSVLSQLNFTHTSEDLLQAEVTCLEGSLESVSATCKQLSQELMEKYEELKRMEAHNNEYKAEIKKLKEQILQGEQSYSSALEGMKMEISHLTQELHQRDITIASTKGSSSDMEKRLRAEMQKAEDKAVEHKEILDQLESLKLENRHLSEMVMKLELGLHECSLPVSPLGSIATRFLEEEELRSHHILERLDAHIEELKRESEKTVRQFTALK

SEQ ID NO: 6700 - protein, 160 aa, Homo sapiens; identical to SEQ ID NO: 6461

SEQ ID NO: 6701 - protein, 160 aa, Homo sapiens; identical to SEQ ID NO: 6461

SEQ ID NO: 6702 - protein, 1063 aa, Homo sapiens
MPHLPLASFRPPFWGLRHSRGLPRFHSVSTQSEPHGSPISRRNREAKQKRLREKQATLEAEIAGESKSPAESIKAWRPKELVLYEIPTKPGEKKDVSGPLPPAYSPRYVEAAWYPWWVREGFFKPEYQARLPQATGETFSMCIPPPNVTGSLHIGHALTVAIQDALVRWHRMRGDQVLWVPGSDHAGIATQAVVEKQLWKERGVRRHELSREAFLREVWQWKEAKGGEICEQLRALGASLDWDRECFTMDVGSSVAVTEAFVRLYKAGLLYRNHQLVNWSCALRSAISDIEVENRPLPGHTQLRLPGCPTPVSFGLLFSVAFPVDGEPDAEVVVGTTRPETLPGDVAVAVHPDDSRYTHLHGRQLRHPLMGQPLPLITDYAVQPHVGTGAVKVTPAHSPADAEMGARHGLSPLNVIAEDGTMTSLCGDWLQGLHRFVAREKIMSVLSERGLFRGLQNHPMVLPICSRSGDVIEYLLKNQWFVRCQEMGARAAKAVESGALELSPSFHQKNWQHWFSHIGDWCVSRQLWWGHQIPAYLVVEDHAQGEEDCWVVGRSEAEAREVAAELTGRPGAELTLERDPDVLDTWFSSALFPFSALGWPQETPDLARFYPLSLLETGSDLLLFWVGRMVMLGTQLTGQLPFSKVLLHPMVRDRQGRKMSKSLGNVLDPRDIISGVEMQLLQEKLRSGNLDPAELAIVAAAQKKDFPHGIPECGTDALRFTLCSHGVQAGDLHLSVSEVQSCRHFCNKIWNALRFILNALGEKFVPQPAEELSPSSPMDAWILSRLALAAQECERGFLTRELSLVTHALHHFWLHNLCDVYLEAVKPVLWHSPRPLGPPQVLFSCADLGLRLLAPLMPFLAEELWQRLPPRPGCPPAPSISVAPYPSACSLEHWRQPELERRFSRVQEVVQVLRALRATYQLTKARPRVLLQSSEPGDQGLFEAFLEPLGTLGYCGAVGLLPPGTAAPSGWAQAPLSDTAQVYMELQGLVDPQIQLPLLAARRYKLQKQLDSLTARTPSEGEAGTQRQQKLSSLQLELSKLDKAASHLRQLMDEPPAPGSPEL

SEQ ID NO: 6703 - protein, 539 aa, Homo sapiens; identical to SEQ ID NO: 5502

SEQ ID NO: 6704 - protein, 225 aa, Homo sapiens
MAAGSEATTPVIVAAGAGGEEGEHVKPFKPEKAKEIIMSLQQPAIFCNMVFDWPARHWNAKYLSQVLHGKQIRFRMGMKSMSTVPQFETTCNYVEATLEEFLTWNCDQSSISGPFRDYDHSKFWAYADYKYFVSLFEDKTDLFQDVKWSDFGFPGRNGQESTLWIGSLGAHTPCHLDSYGCNLVFQVQGRLECNGMIIAPGPQAILLPQPLKYLGLQETMASLSS

SEQ ID NO: 6705 - protein, 856 aa, Homo sapiens; identical to SEQ ID NO: 5076

SEQ ID NO: 6706 - protein, 868 aa, Homo sapiens
MASFPETDFQICLLCKEMCGSPAPLSSNSSASSSSSQTSTSSGGGGGGPGAAARRLHVLPCLHAFCRPCLEAHRLPAAGGGAAGEPLKLRCPVCDQKVVLAEAAGMDALPSSAFLLSNLLDAVVATADEPPPKNGRAGAPAGAGGHSNHRHHAHHAHPRASASAPPLPQAPQPPAPSRSAPGGPAASPSALLLRRPHGCSSCDEGNAASSRCLDCQEHLCDNCVRAHQRVRLTKDHYIERGPPGPGAAAAAQQLGLGPPFPGPPFSILSVFPERLGFCQHHDDEVLHLYCDTCSVPICRECTMGRHGGHSFIYLQEALQDSRALTIQLLADAQQGRQAIQLSIEQAQTVAEQVEMKAKVVQSEVKAVTARHKKALEERECELLWKVEKIRQVKAKSLYLQVEKLRQNLNKLESTISAVQQVLEEGRALDILLARDRMLAQVQELKTVRSLLQPQEDDRVMFTPPDQALYLAIKSFGFVSSGAFAPLTKATGDGLKRALQGKVASFTVIGYDHDGEPRLSGGDLMSAVVLGPDGNLFGAEVSDQQNGTYVVSYRPQLEGEHLVSVTLCNQHIENSPFKVVVKSGRSYVGIGLPGLSFGSEGDSDGKLCRPWGVSVDKEGYIIVADRSNNRIQVFKPCGAFHHKFGTLGSRPGQFDRPAGVACDASRRIVVADKDNHRIQIFTFEGQFLLKFGEKGTKNGQFNYPWDVAVNSEGKILVSDTRNHRIQLFGPDGVFLNKYGFEGALWKHFDSPRGVAFNHEGHLVVTDFNNHRLLVIHPDCQSARFLGSEGTGNGQFLRPQGVAVDQEGRIIVADSRNHRVQMFESNGSFLCKFGAQGSGFGQMDRPSGIAITPDGMIVVVDFGNNRILVF

SEQ ID NO: 6707 - protein, 368 aa, Homo sapiens
MREPVLTWCVPLELLCSHPLPLSAFLKSQVKLYTYRACAGKDEMGKMVSVINTVDTSHEDMIHDAQMDYYGTRLATCSSDRSVKIFDVRNGGQILIADLRGHEGPVWQVAWAHPMYGNILASCSYDRKVIIWREENGTWEKSHEHAGHDSSVNSVCWAPHDYGLILACGSSDGAISLLTYTGEGQWEVKKINNAHTIGCNAVSWAPAVVPGSLIDHPSGQKPNYIKRFASGGCDNLIKLWKEEEDGQWKEEQKLEAHSDWVRDVAWAPSIGLPTSTIASCSQDGRVFIWTCDDASSNTWSPKLLHKFNDVVWHVSWSITANILAVSGGDNKVTLWKESVDGQWVCISDVNKGQGSVSASVTEGQQNEQ

SEQ ID NO: 6708 - protein, 352 aa, Homo sapiens
MDIDKDLEAPLYLTPEGWSLFLQRYYQVVHEGAELRHLDTQVQRCEDILQQLQAVVPQIDMEGDRNIWIVKPGAKSRGRGIMCMDHLEEMLKLVNGNPVVMKDGKWVVQKYIERPLLIFGTKFDLRQWFLVTDWNPLTVWFYRDSYIRFSTQPFSLKNLDNSVHLCNNSIQKHLENSCHRHPLLPPDNMWSSQRFQAHLQEMGAPNAWSTIIVPGMKDAVIHALQTSQDTVQCRKASFELYGADFVFGEDFQPWLIEINASPTMAPSTAVTARLCAGVQADTLRVVIDRMLDRNCDTGAFELIYKQPVTTSPASTPRPSCLLPMYSDTRARSSDDSTASWWALRPCRPQARP

SEQ ID NO: 6709 - protein, 192 aa, Homo sapiens
MGKGCKVVVCGLLSVGKTAILEQLLYGNHTIGMEDCETMEDVYMASVETDRGVKEQLHLYDTRGLQEGVELPKHYFSFADGFVLVYSVNNLESFQRVELLKKEIDKFKDKKEVAIVVLGNKIDLSEQRQVDAEVAQQWAKSEKVRLWEVTVTDRKTLIEPFTLLASKLSQPQSKSSFPLPGRKNKGNSNSEN

SEQ ID NO: 6710 - protein, 472 aa, Homo sapiens
MSRRVVRQSKFRHVFGQAAKADQAYEDIRVSKVTWDSSFCAVNPKFLAIIVEAGGGGAFIVLPLAKTGRVDKNYPLVTGHTAPVLDIDWCPHNDNVIASASDDTTIMVWQIPDYTPMRNITEPIITLEGHSKRVGILSWHPTARNVLLSAGGDNVIIIWNVGTGEVLLSLDDMHPDVIHSVCWNSNGSLLATTCKDKTLRIIDPRKGQVVAERFAAHEGMRPMRAVFTRQGHIFTTGFTRMSQRELGLWDPNNFEEPVALQEMDTSNGVLLPFYDPDSSIVYLCGKGDSSIRYFEITDEPPFVHYLNTFSSKEPQRGMGFMPKRGLDVSKCEIARFYKLHERKCEPIIMTVPRKSDLFQDDLYPDTPGPEPALEADEWLSGQDAEPVLISLRDGYVPPKHRELRVTKRNILDVRPPSGPRRSQSASDAPLSQQHTLETLLEEIKALRERVQAQEQRITALENMLCELVDGTD

SEQ ID NO: 6711 - protein, 875 aa, Homo sapiens
MGDSDDEYDRRRRDKFRRERSDYDRSRERDERRRGDDWNDREWDRGRERRSRGEYRDYDRNRRERFSPPRHELSPPQKRMRRDWDEHSSDPYHSGYEMPYAGGGGGPTYGPPQPWGHPDVHIMQHHVLPIQARLGSIAEIDLGVPPPVMKTFKEFLLSLDDSVDETEAVKRYNDYKLDFRRQQMQDFFLAHKDEEWFRSKYHPDEVGKRRQEARGALQNRLRVFLSLMETGWFDNLLLDIDKADAIVKMLDAAVIKMEGGTENDLRILEQEEEEEQAGKPGEPSKKEEGRAGAGLGDGERKTNDKDEKKEDGKQAENDSSNDDKTKKSEGDGDKEEKKEDSEKEAKKSSKKRNRKHSGDDSFDEGSVSESESESESGQAEEEKEEAEALKEKEKPKEEEWEKPKDAAGLECKPRPLHKTCSLFMRNIAPNISRAEIISLCKRYPGFMRVALSEPQPERRFFRRGWVTFDRSVNIKEICWNLQNIRLRECELSPGVNRDLTRRVRNINGITQHKQIVRNDIKLAAKLIHTLDDRTQLWASEPGTPPLPTSLPSQNPILKNITDYLIEEVSAEEEELLGSSGGAPPEEPPKEGNPAEINVERDEKLIKVLDKLLLYLRIVHSLDYYNTCEYPNEDEMPNRCGIIHVRGPMPPNRISHGEVLEWQKTFEEKLTPLLSVRESLSEEEAQKMGRKDPEQEVEKFVTSNTQELGKDKWLCPLSGKKFKGPEFVRKHIFNKHAEKIEEVKKEVAFFNNFLTDAKRPALPEIKPAQPPGPAQILPPGLTPGLPYPHQTPQGLMPYGQPRPPILGYGAGAVRPAVPTGGPPYPHAPYGAGRGNYDAFRGQGGYPGKPRNRMVRGDPRAIVEYRDLDAPDDVDFF

SEQ ID NO: 6712 - protein, 271 aa, Homo sapiens
MAAVEKRRQAVPPPAGFTDSGRQSVSRAAGAAESEEDFLRQVGVTEMLRAALLKVLEARPEEPIAFLAHYFENMGLRSPVNGGAGEPPGQLLLQQQRLGRALWHLRLAHHSQRAAFNNNVSVAYECLSAGGRRKRPGLDGRTYSELLRRICRDGQAPEEVVAPLLRKVQCRDHEAVPLSVFRAGTLTCFVLLEFVARAGALFQLLEDSAAAVADRRVGQAVLDTLEGALQASDAAAPARFLEAGSRLAPMTREEFLERAAALFIAKVKPVG

SEQ ID NO: 6713 - protein, 658 aa, Homo sapiens
MGGHLSPWPTYTSGQTILQNRKPCSDDYRKRVGSCQQHPFRTAKPQYLEELENYLRKELLLLDLGTDSTQELRLQPYREIFEFFIEDFKTYKPLLSSIKNAYEGMLAHQREKIRALEPLKAKLVTVNEDCNERILAMRAEEKYEISLLKKEKMNLLKLIDKKNEEKISLQSEVTKLRKNLAEEYLHYLSERDACKILIADLNELRYQREDMSLAQSPGIWGEDPVKLTLALKMTRQDLTRTQMELNNMKANFGDVVPRRDFEMQEKTNKDLQEQLDTLRASYEEVRKEHEILMQLHMSTLKERDQFFSELQEIQRTSTPRPDWTKCKDVVAGGPERWQMLAEGKNSDQLVDVLLEEIGSGLLREKDFFPGLGYGEAIPAFLRFDGLVENKKPSKKDVVNLLKDAWKERLAEEQKETFPDFFFNFLEHRFGPSDAMAWAYTIFENIKIFHSNEVMSQFYAVLMGKRSENVYVTQKETVAQLLKEMTNADSQNEGLLTMEQFNTVLKSTFPLKTEEQIQELMEAGGWHPSSSNADLLNYRSLFMEDEEGQSEPFVQKLWEQYMDEKDEYLQQLKQELGIELHEEVTLPKLRGGLMTIDPSLDKQTVNTYMSQAFQLPESEMPEEGDEKEEAVVEILQTALERLQVIDIRRVGPREPEPAS

SEQ ID NO: 6714 - protein, 428 aa, Homo sapiens
MEPLKVEKFATAKRGNGLRAVTPLRPGELLFRSDPLAYTVCKGSRGVVCDRCLLGKEKLMRCSQCRVAKYCSAKCQKKAWPDHKRECKCLKSCKPRYPPDSVRLLGRVVFKLMDGAPSESEKLYSFYDLESNINKLTEDKKEGLRQLVMTFQHFMREEIQDASQLPPAFDLFEAFAKVICNSFTICNAEMQEVGVGLYPSISLLNHSCDPNCSIVFNGPHLLLRAVRDIEVGEELTICYLDMLMTSEERRKQLRDQYCFECDCFRCQTQDKDADMLTGDEQVWKEVQESLKKIEELKAHWKWEQVLAMCQAIISSNSERLPDINIYQLKVLDCAMDACINLGLLEEALFYGTRTMEPYRIFFPGSHPVRGVQVMKVGKLQLHQGMFPQAMKNLRLAFDIMRVTHGREHSLIEDLILLLEECDANIRAS

SEQ ID NO: 6715 - protein, 373 aa, Homo sapiens
MSSGNYQQSEALSKPTFSEEQASALVESVFGLKVSKVRPLPSYDDQNFHVYVSKTKDGPTEYVLKISNTKASKNPDLIEVQNHIIMFLKAAGFPTASVCHTKGDNTASLVSVDSGSEIKSYLVRLLTYLPGRPIAELPVSPQLLYEIGKLAAKLDKTLQRFHHPKLSSLHRENFIWNLKNVPLLEKYLYALGQNRNREIVEHVIHLFKEEVMTKLSHFRECINHGDLNDHNILIESSKSASGNAEYQVSGILDFGDMSYGYYVFEVAITIMYMMIESKSPIQVGGHVLAGFESITPLTAVEKGALFLLVCSRFCQSLVMAAYSCQLYPENKDYLMVTAKTGWKHLQQMFDMGQKAVEEIWFETAKSYESGISM

SEQ ID NO: 6716 - protein, 921 aa, Homo sapiens
MALLCGLGQVTLRIWVSLPSQSENGIGSGGMEALTTQLGPGREGSSSPNSKQELQPYSGSSALKPNQVGETSLYGVPIVSLVIDGQERLCLAQISNTLLKNYSYNEIHNRRVALGITCVQCTPVQLEILRRAGAMPISSRRCGMITKREAERLCKSFLGEHKPPKLPENFAFDVVHECAWGSRGSFIPARYNSSRAKCIKCGYCSMYFSPNKFIFHSHRTPDAKYTQPDAANFNSWRRHLKLSDKSATDELSHAWEDVKAMFNGGTRCGAEMAPGPPPHKSLRCGEDEAAGPPGPPPPHPQRGLGLATGASGPAGPGGPGGGAGVRSYPVIPVPSKGFGLLQKLPPPLFPHPYGFPTAFGLCPKKDDPVLGAGEPKGGPGTGSGGGGAGTGGGAGGPGASHLPPGAGAGPGGGAMFWGHQPSGAAKDAAAVAAAAAAATVYPTFPMFWPAAGSLPVPSYPAAQSQAKAVAAAVAAAAAAAAAAAGSGAPEPLDGAEPAKESGLGAEERCPSALSRGPLDEDGTDEALPPPLAPLPPPPPPPARKGSYVSAFRPVVKDTESIAKLYGSAREAYGAGPARGPGPGAGSGGYVSPDFLSEGSSSYNSASPDVDTADEPEVDVESNRFPDDEDAQEETEPSAPSAGGGPDGEQPTGPPSATSSGADGPANSPDGGSPRPRRRLGPPPAGRPAFGDLAAEDLVRRPERSPPSGGGGYELREPCGPLGGPAPAKVFAPERDEHVKSAAVALGPAASYVCTPEAHEPDKEDNHSPADDLETRKSYPDQRSISQPSPANTDRGEDGLTLDVTGTHLVEKDIENLAREELQKLLLEQMELRKKLEREFQSLKDNFQDQMKRELAYREEMVQQLQIVRDTLCNELDQERKARYAIQQKLKEAHDALHHFSCKMLTPRHCTGNCSFKPPLLP

SEQ ID NO: 6717 - protein, 464 aa, Homo sapiens
MAMTAGTTTTFPMSNHTRERVTVAKLTLENFYSNLILQHEERETRQKKLEVAMEEEGLADEEKKLRRSQHARKETEFLRLKRTRLGLDDFESLKVIGRGAFGEVRLVQKKDTGHIYAMKILRKSDMLEKEQVAHIRAERDILVEADGAWVVKMFYSFQDKRNLYLIMEFLPGGDMMTLLMKKDTLTEEETQFYISETVLAIDAIHQLGFIHRDIKPDNLLLDAKGHVKLSDFGLCTGLKKAHRTEFYRNLTHNPPSDFSFQNMNSKRKAETWKKNRRQLAYSTVGTPDYIAPEVFMQTGYNKLCDWWSLGVIMYEMLIGYPPFCSETPQETYRKVMNWKETLVFPPEVPISEKAKDLILRFCIDSENRIGNSGVEEIKGHPFFEGVDWEHIRERPAAIPIEIKSIDDTSNFDDFPESDILQPVPNTTEPDYKSKDWVFLNYTYKRFEGLTQRGSIPTYMKAGKL

SEQ ID NO: 6718 - protein, 1316 aa, Homo sapiens
MASKGAGMSFSRKSYRLTSDAEKSRVTGIVQEKLLNDYLNRIFSSSEHAPPAATSRKPLNFQNLPEHLDQLLQVDNEEEESQGQVEGRLGPSTVVLDHTGGFEGLLLVDDDLLGVIGHSNFGTIRSTTCVYKGKWLYEVLISSQGLMQIGWCTISCRFNQEEGVGDTHNSYAYDGNRVRKWNVTTTNYGKAWAAGDIVSCLIDLDDGTLSFCLNGVSLGTAFENLSRGLGMAYFPAISLSFKESVAFNFGSRPLRYPVAGYRPLQDPPSADLVRAQRLLGCFRAVLSVELDPVEGRLLDKESSKWRLRGQPTVLLTLAHIFHHFAPLLRKVYLVEAVLMSFLLGIVEKGTPTQAQSVVHQVLDLLWLFMEDYEVQDCLKQLMMSLLRLYRFSPIVPDLGLQIHYLRLTIAILRHEKSRKFLLSNVLFDVLRSVVFFYIKSPLRVEEAGLQELIPTTWWPHCSSREGKESTEMKEETAEERLRRRAYERGCQRLRKRIEVVEELQVQILKLLLDNKDDNGGEASRYIFLTKFRKFLQENASGRGNMPMLCPPEYMVCFLHRLISALRYYWDEYKASNPHASFSEEAYIPPQVFYNGKVDYFDLQRLGGLLSHLRKTLKDDLASKANIVIDPLELQSTAMDDLDEDEEPAPAMAQRPMQALAVGGPLPLPRPGWLSSPTLGRANRFLSTAAVSLMTPRRPLSTSEKVKVRTLSVEQRTREDIEGSHWNEGLLLGRPPEEPEQPLTENSLLEVLDGAVMMYNLSVHQQLGKMVGVSDDVNEYAMALRDTEDKLRRCPKRRKDILAELTKSQKVFSEKLDHLSRRLAWVHATVYSQEKMLDIYWLLRVCLRTIEHGDRTGSLFAFMPEFYLSVAINSYSALKNYFGPVHSMEELPGYEETLTRLAAILAKHFADARIVGTDIRDSLMQALASYVCYPHSLRAVERIPEEQRIAMVRNLLAPYEQRPWAQTNWILVRLWRGCGFGYRYTRLPHLLKTKLEDANLPSLQKPCPSTLLQQHMADLLQQGPDVAPSFLNSVLNQLNWAFSEFIGMIQEIQQAAERLERNFVDSRQLKVCATCFDLSVSLLRVLEMTITLVPEIFLDWTRPTSEMLLRRLAQLLNQVLNRVTAERNLFDRVVTLRLPGLESVDHYPILVAVTGILVQLLVRGPASEREQATSVLLADPCFQLRSICYLLGQPEPPAPGTALPAPDRKRFSLQSYADYISADELAQVEQMLAHLTSASAQAAAASLPTSEEDLCPICYAHPISAVFQPCGHKSCKACINQHLMNNKDCFFCKTTTSNLLACLYPHWWEPSHGPNCA

SEQ ID NO: 6719 - protein, 680 aa, Homo sapiens
MPSVSKAAAAALSGSPPQTEKPTHYRYLKEFRTEQCPLFSQHKCAQHRPFTCFHWHFLNQRRRRPLRRRDGTFNYSPDVYCSKYNEATGVCPDGDECPYLHRTTGDTERKYHLRYYKTGTCIHETDARGHCVKNGLHCAFAHGPLDLRPPVCDVRELQAQEALQNGQLGGGEGVPDLQPGVLASQAMIEKILSEDPRWQDANFVLGSYKTEQCPKPPRLCRQGYACPHYHNSRDRRRNPRRFQYRSTPCPSVKHGDEWGEPSRCDGGDGCQYCHSRTEQQFHPESTKCNDMRQTGYCPRGPFCAFAHVEKSLGMVNEWGCHDLHLTSPSSTGSGQPGNAKRRDSPAEGGPRGSEQDSKQNHLAVFAAVHPPAPSVSSSVASSLASSAGSGSSSPTALPAPPARALPLGPASSTVEAVLGSALDLHLSNVNIASLEKDLEEQDGHDLGAAGPRSLAGSAPVAIPGSLPRAPSLHSPSSASTSPLGSLSQPLPGPVGSSAMTPPQQPPPLRSEPGTLGSAASSYSPLGLNGVPGSIWDFVSGSFSPSPSPILSAGPPSSSSASPNGAELARVRRQLDEAKRKIRQWEESWQQVKQVCDAWQREAQEAKERARVADSDRQLALQKKEEVEAQVIFQLRAKQCVACRERAHGAVLRPCQHHILCEPCAATAPECPYCKGQPLQW

SEQ ID NO: 6720 - protein, 153 aa, Homo sapiens
MSSPLASLSKTRKVPLPSEPMNPGRRGIRIYGDVPASHDSELMAFMTRKLWDLEQQVKAQTDEILSKDQKIAALEDLVQTLRPHPAEATLQRQEELETMCVQLQRQVREMERFLSDYGLQWVGEPMDQEDSESKTVSEHGERDWMTAKKFWKP

SEQ ID NO: 6721 - protein, 793 aa, Homo sapiens
MGQCYNLEDDDLETDVNKLSSKPGLDRPEEELMQYEVMCLELSYSFEELQSKLGDDLNSEKTQYANHHHIPAAASSKQHCYSKDQSSCGQEREYAVQTSLLCRVKTGRSTVHLGSKKNPGVNLYQNVQSNSLRRDSSESEIPDIQASPKADAWDVDAIFCPRMSASFSNSTRTREVVKVIDKLLQTHLKRVPFHDPYLYMAKARRTSSVVDFKMMAFPDVWGHCPPPTTQPMLERKCGVQRIRIFEDIRRLIQPSDVINKVVFSLDEPWPLQDNASNCLRFFSKFESGNLRKAIQVREFEYDLLVNADVNSTQHQQWFYFKVSGMQAAIPYHFNIINCEKPNSQFNYGMQPTLYSVKEALLGKPTWIRTGHEICYYKNHYRQSTAVAGGASGKCYYTLTFAVTFPHSEDVCYLAYHYPYTYTALMTHLDILEKSVNLKEVYFRQDVLCQTLGGNPCPLVTITAMPESNSDEHLEQFRHRPYQVITARVHPGESNASWVMKGTLEFLVSSDPVARLLRENFIFKIIPMLNPDGVINGNHRCSLSGEDLNRQWLSPSAHLQPTIYHAKGLLYHLSSIGRSPVVFCDFHGHSQKKNVFLYGCSIKETLWQAACTVGTSTILEEVNYRTLPKILDKLAPAFTMSSCSFLVEKSRASTARVVVWREMGVSRSYTMESSYCGCNQGPYQCTQRLLERTKNERAHPVDGLQGLQFGTRELEEMGAMFCLGLLILELKSASCSHQLLAQAATLLSAEEDALDQHLQRLKSSNFLPKHIWFAYHFFAITNFFKMNLLLHVSP

SEQ ID NO: 6722 - protein, 50 aa, Homo sapiens
MMQNVHLAPETDEDDLYSGYNDYNPIYDIEELENDAAFQQAVRTSHGRRP

SEQ ID NO: 6723 - protein, 432 aa, Homo sapiens
MTAVRAAGFTKAALRGSAFDPLSQSRGPASPLEAKKKDSPEEKIKQLEKEVNELVEESCIANSCGDLKLALEKAKDAGRKERVLVRQREQVTTPENINLDLTYSVLFNLASQYSVNEMYAEALNTYQVIVKNKMFSNAGILKMNMGNIYLKQRNYSKAIKFYRMALDQVPSVNKQMRIKIMQNIGVTFIQADREKMKKAFQKLITVPLEIDEDKYISPSDDPHTNLVTEAIKNDHLRQMERERKAMAEKYIMTSAKLIAPVIETSFAAGYDWCVEVVKASQYVELANDLEINKAVTYLRQKDYNQAVEILKVLEKKDSRVKSAAATNLSALYYMGKDFAQASSYADIAVNSDRYNPAALTNKGNTVFANGDYEKAAEFYKEALRNDSSCTEALYNIGLTYEKLNRLDEALDCFLKLHAILRNSAEVLYQIAN

SEQ ID NO: 6724 - protein, 128 aa, Homo sapiens
MAAAAAEQQQFYLLLGNLLSPDNVVRKQAEARQMAAVLLRRLLSSAFDEVYPALPSDVQTAIKSELLMIIQMETQSSMRKKVCDIAAELARNLIDEDGNNQWPEGLKFLFDSVSSQNVGLREAALHIF

SEQ ID NO: 6725 - protein, 921 aa, Homo sapiens
MRPEGAGMELGGGEERLPEESRREHWQLLGNLKTTVEGLVSTNSPNVWSKYGGLERLCRDMQSILYHGLIRDQACRRQTDYWQFVKDIRWLSPHSALHVEKFISVHENDQSSADGASERAVAELWLQHSLQYHCLSAQLRPLLGDRQYIRKFYTDAAFLLSDAHVTAMLQCLEAVEQNNPRLLAQIDASMFARKHESPLLVTKSQSLTALPSSTYTPPNSYAQHSYFGSFSSLHQSVPNNGSERRSTSFPLSGPPRKPQESRGHVSPAEDQTIQAPPVSVSALARDSPLTPNEMSSSTLTSPIEASWVSSQNDSPGDASEGPEYLAIGNLDPRGRTASCQSHSSNAESSSSNLFSSSSSQKPDSAASSLGDQEGGGESQLSSVLRRSSFSEGQTLTVTSGAKKSHIRSHSDTSIASRGAPESCNDKAKLRGPLPYSGQSSEVSTPSSLYMEYEGGRYLCSGEGMFRRPSEGQSLISYLSEQDFGSCADLEKENAHFSISESLIAAIELMKCNMMSQCLEEEEVEEEDSDREIQELKQKIRLRRQQIRTKNLLPMYQEAEHGSFRVTSSSSQFSSRDSAQLSDSGSADEVDEFEIQDGSEGSNLTHISKNGLSVSLASMFSDADIRRNTASSSKSFVSSQSFSHCFLHSTSAEAVAMGLLKQFEGMQLPAASELEWLVPEHDAPQKLLPIPDSLPISPDDGQHADIYKLRIRVRGNLEWAPPRPQIIFNVHPAPTRKIAVAKQNYRCAGCGIRTDPDYIKRLRYCEYLGKYFCQCCHENAQMAIPSRVLRKWDFSKYYVSNFSKDLLIKIWNDPLFNVQDINSALYRKVKLLNQVRLLRVQLCHMKNMFKTCRLAKELLDSFDTVPGHLTEDLHLYSLNDLTATRKGELGPRLAELTRAGATHVERCMVRKSHCSMQLSPCF

SEQ ID NO: 6726 - protein, 547 aa, Homo sapiens
MRALTVQRVKFAMDLPLLKRAGQDLAEKTKNFVSRSLVIGEVLSMADMATGVKCGIIYWLFGGAIRNLGSPEHVTKWFQPLQEQKYTGMFAMTERGHGSNARGIQTEATFDLSAQEFVIDTPCENAEKMYIGNAMYGNYAAVFAQLIIDGRSQGPHCFIVPVRDENGSLYPGVTAIDMMYKEGLHGVDNGILIFDKVRIPRENLLDKFGSVAPDGQYHSPIRNKSARFNAMLAALTPSRLAVAFQAMGAMKLGLTIAIRYSHSRRQFGPKTKEEVKIIEHQTQTLRLMPHLATALALTFVSRYAGALLDEDVFQGKELVNSRSLQALVAGLKAYSTWENIRCLQDCRECTGGMGYMMENRISGLKCDTDVFATFEGDDVVMLQVVGRELLAQYTKQYEEKPLFGLLQNWAESVGDKLRTSFLAFNMDTVDDLAFLLKAVKFRERVLQRGLVARIYYKVKTKKEDFFHAWNSCLHHVASLSLAHTHRVTLEQFSLAVKSCPDQEDQTLLMKFCLLYGTKLVFQERAWYLEHKYLTPMASTRIRNQERC

SEQ ID NO: 6727 - protein, 2028 aa, Homo sapiens
MDVTVSELLELFLQSPLVTWVKTFGPFGSGSQDNLTMYMDLVDGIFLNQIMLQIDPRPTNQRINKHVNNDVNLRIQNLTILVRNIKTYYQEVLQQLIVMNLPNVLMIGRDPLSGKSMEEIKKVLLLVLGCAVQCERKEEFIERIKQLDIETQAGIVAHIQEVTHNQENVFDLQWLELPDVAPEELEALSRSMVLHLRRLIDQRDECTELIVDLTQERDYLQAQHPPSPIKSSSADSTPSPTSSLSSEDKQHLAVELADTKARLRRVRQELEDKTEQLVDTRHEVDQLVLELQKVKQENIQLAADARSARAYRDELDSLREKANRVERLELELTRCKEKLHDVDFYKARMEELREDNIILIETKAMLEEQLTAARARGDKVHELEKENLQLKSKLHDLELDRDTDKKRIEELLEENMVLEIAQKQSMNESAHLGWELEQLSKNADLSDASRKSFVFELNECASSRILKLEKENQSLQSTIQGLRDASLVLEESGLKCGELEKENHQLSKKIEKLQTQLEREKQSNQDLETLSEELIREKEQLQSDMETLKADKARQIKDLEQEKDHLNRAMWSLRERSQVSSEARMKDVEKENKALHQTVTEANGKLSQLEFEKRQLHRDLEQAKEKGERAEKLERELQRLQEENGRLARKVTSLETATEKVEALEHESQGLQLENRTLRKSLDTLQNVSLQLEGLERDNKQLDAENLELRRLVETMRFTSTKLAQMERENQQLEREKEELRKNVDLLKALGKKSERLELSYQSVSAENLRLQQSLESSSHKTQTLESELGELEAERQALRRDLEALRLANAQLEGAEKDRKALEQEVAQLEKDKKLLEKEAKRLWQQVELKDAVLDDSTAKLSAVEKESRALDKELARCRDAAGKLKELEKDNRDLTKQVTVHARTLTTLREDLVLEKLKSQQLSSELDKLSQELEKVGLNRELLLQEDDSGSDTKYKILEGRNESALKTTLAMKEEKIVLLEAQMEEKASLNRQLESELQMLKKECETLRQNQGEGQHLQNSFKHPAGKTAASHQGKEAWGPGHKEATMELLRVKDRAIELERNNAALQAEKQLLKEQLQHLETQNVTFSSQILTLQKQSAFLQEHNTTLQTQTAKLQVENSTLSSQSAALTAQYTLLQNHHTAKETENESLQRQQEQLTAAYEALLQDHEHLGTLHERQSAEYEALIRQHSCLKTLHRNLELEHKELGERHGDMLKRKAELEEREKVLTTEREALQQEQRTNALAMGENQRLRGELDRVNFLHHQLKGEYEELHAHTKELKTSLNNAQLELNRWQARFDELKEQHQTMDISLTKLDNHCELLSRLKGNLEEENHHLLSQIQLLSQQNQMLLEQNMENKEQYHEEQKQYIDKLNALRRHKEKLEEKIMDQYKFYDPPPKKKNHWIGAKALVKLIKPKKEGSRERLKSTVDSPPWQLESSDPASPAASQPLRSQAENPDTPALGSNCAEERDAHNGSVGKGPGDLKPKRGSPHRGSLDRTDASTDLAMRSWPSELGSRTCSTSATTTAPSNSTPIARHPGRTKGYNSDDNLCEPSLEFEVPNHRQYVSRPSSLESSRNTSSNSSPLNLKGSSEQLHGRSESFSSEDLIPSRDLATLPREASTPGRNALGRHEYPLPRNGPLPQEGAQKRGTAPPYVGVRPCSASPSSEMVTLEEFLEESNRSSPTHDTPSCRDDLLSDYFRKASDPPAIGGQPGPPAKKEGAKMPTNFVAPTVKMAAPTSEGRPLKPGQYVKPNFRLTEAEAPPSVAPRQAQPPQSLSLGRPRQAPVPPASHAPASRSASLSRAFSLASADLLRASGPEACKQESPQKLGAPEALGGRETGSHTLQSPAPPSSHSLARERTPLVGKAGSSCQGPGPRSRPLDTRRFSLAPPKEERLAPLHQSATAPAIATAGAGAAAAGSGSNSQLLHFSPAAAPAARTKPKAPPRSGEVATITPVRAGLSLSEGDGVPGQGCSEGLPAKSPGRSPDLAPHLGRALEDCSRGSVSKSSPASPEPGGDPQTVWYEYGCV

SEQ ID NO: 6728 - protein, 1276 aa, Homo sapiens
MDEVEQDQHEARLKELFDSFDTTGTGSLGQEELTDLCHMLSLEEVAPVLQQTLLQDNLLGRVHFDQFKEALILILSRTLSNEEHFQEPDCSLEAQPKYVRGGKRYGRRSLPEFQESVEEFPEVTVIEPLDEEARPSHIPAGDCSEHWKTQRSEEYEAEGQLRFWNPDDLNASQSGSSPPQDWIEEKLQEVCEDLGITRDGHLNRKKLVSICEQYGLQNVDGEMLEEVFHNLDPDGTMSVEDFFYGLFKNGKSLTPSASTPYRQLKRHLSMQSFDESGRRTTTSSAMTSTIGFRVFSCLDDGMGHASVERILDTWQEEGIENSQEILKALDFSLDGNINLTELTLALENELLVTKNSIHQAALASFKAEIRHLLERVDQVVREKEKLRSDLDKAEKLKSLMASEVDDHHAAIERRNEYNLRKLDEEYKERIAALKNELRKEREQILQQAGKQRLELEQEIEKAKTEENYIRDRLALSLKENSRLENELLENAEKLAEYENLTNKLQRNLENVLAEKFGDLDPSSAEFFLQEERLTQMRNEYERQCRVLQDQVDELQSELEEYRAQGRVLRLPLKNSPSEEVEANSGGIEPEHGLGSEECNPLNMSIEAELVIEQMKEQHHRDICCLRLELEDKVRHYEKQLDETVVSCKKAQENMKQRHENETHTLEKQISDLKNEIAELQGQAAVLKEAHHEATCRHEEEKKQLQVKLEEEKTHLQEKLRLQHEMELKARLTQAQASFEREREGLQSSAWTEEKVRGLTQELEQFHQEQLTSLVEKHTLEKEELRKELLEKHQRELQEGRYESEKLQQENSILRNEITTLNEEDSISNLKLGTLNGSQEEMWQKTETVKQENAAVQKMVENLKKQISELKIKNQQLDLENTELSQKNSQNQEKLQELNQRLTEMLCQKEKEPGNSALEEREQEKFNLKEELERCKVQSSTLVSSLEAELSEVKIQTHIVQQENHLLKDELEKMKQLHRCPDLSDFQQKISSVLSYNEKLLKEKEALSEELNSCVDKLAKSSLLEHRIATMKQEQKSWEHQSASLKSQLVASQEKVQNLEDTVQNVNLQMSRMKSDLRVTQQEKEALKQEVMSLHKQLQNAGGKSWAPEIATHPSGLHNQQKRLSWDKLDHLMNEEQQLLWQENERLQTMVQNTKAELTHSREKVRQLESNLLPKHQKHLNPSGTMNPTEQEKLSLKRECDQFQKEQSPANRKVSQMNSLEQELETIHLENEGLKKKQVKLDEQLMENSVVGSSREGCSSLPEIVCEDAAPEVHCDA

SEQ ID NO: 6729 - protein, 998 aa, Homo sapiens
MKDSGDSKDQQLMVALRVRPISVAELEEGATLIAHKVDEQMVVLMDPMEDPDDILRAHRSREKSYLFDVAFDFTATQEMVYQATTKSLIEGVISGYNATVFAYGPTGCGKTYTMLGTDQEPGIYVQTLNDLFRAIEETSNDMEYEVSMSYLEIYNEMIRDLLNPSLGYLELREDSKGVIQVAGITEVSTINAKEIMQLLMKGNRQRTQEPTAANQTSSRSHAVLQVTVRQRSRVKNILQEVRQGRLFMIDLAGSERASQTQNRGQRMKEGAHINRSLLALGNCINALSDKGSNKYINYRDSKLTRLLKDSLGGNSRTVMIAHISPASSAFEESRNTLTYAGRAKNIKTRVKQNLLNVSYHIAQYTSIIADLRGEIQRLKRKIDEQTGRGQARGRQDRGDIRHIQAEVQLHSGQGEKAGMGQLREQLASAFQEQMDVRRRLLELENRAMEVQIDTSRHLLTIAGWKHEKSRRALKWREEQRKECYAKDDSEKDSDTGDDQPDILEPPEVAAARESIAALVDEQKQLRKQKLALEQRCRELRARGRRLEETLPRRIGSEEQREVLSLLCRVHELEVENTEMQSHALLRDGALRHRHEAVRRLEQHRSLCDEIIQGQRQIIDDYNLAVPQRLEELYEVYLRELEEGSLEQATIMDQVASRALQDSSLPKITPAGTSLTPDSDLESVKTLSSDAQHLQNSALPPLSTESEGHHVFKAGTGAWQAKSSSVPTPPPIQLGSLVTQEAPAQDSLGSWINSSPDSSENLSEIPLSHKERKEILTGTKCIWVKAARRRSRALGTEGRHLLAPATERSSLSLHSLSEGDDARPPGPLACKRPPSPTLQHAASEDNLSSSTGEAPSRAVGHHGDGPRPWLRGQKKSLGKKREESLEAKRRKRRSRSFEVTGQGLSHPKTHLLGPHQAERISDHRMPVCRHPAPGIRHLGKVTLPLAKVKLPPSQNTGPGDSSPLAVPPNPGGGSRRATRGPRLPHGTSTHGKDGCSRHN

SEQ ID NO: 6730 - protein, 397 aa, Homo sapiens
MTAEEGVQLSQQNAKDFFRVLNLNKKCDTSKHKVLVVSVCPQSLPYFAAKFNLSVTDASRRLCGFLKSLGVHYVFDTTIAADFSILESQKEFVRRYRQHSEEERTLPMLTSACPGWVRYAERVLGRPITAHLCTAKSPQQVMGSLVKDYFARQQNLSPEKIFHVIVAPCYDKKLEALQESLPPALHGSRGADCVLTSGEIAQIMEQGDLSVRDAAVDTLFGDLKEDKVTRHDGASSDGHLAHIFRHAAKELFNEDVEEVTYRALRNKDFQEVTLEKNGEVVLRFAAAYGFRNIQNMILKLKKGKFPFHFVEVLACAGGCLNGRGQAQTPDGHADKALLRQMEGIYADIPVRRPESSAHVQELYQEWLEGINSPKAREVLHTTYQSQERGTHSLDIKW

SEQ ID NO: 6731 - protein, 1199 aa, Homo sapiens
MKVAGGLELGAAALLSASPRALVTLSTGPTCSILPKNPLFPQNLSSQPCIKMEGDKSLTFSSYGLQWCLYELDKEEFQTFKELLKKKSSESTTCSIPQFEIENANVECLALLLHEYYGASLAWATSISIFENMNLRTLSEKARDDMKRHSPEDPEATMTDQGPSKEKVPGISQAVQQDSATAAETKEQEISQAMEQEGATAAETEEQEISQAMEQEGATAAETEEQGHGGDTWDYKSHVMTKFAEEEDVRRSFENTAADWPEMQTLAGAFDSDRWGFRAAVVLHGKSGIGKSALARRIVLCWAQGGLYQGMFSYVFFLPVREMQRKKESSVTEFISREWPDSQAPVTEIMSRPERLLFIIDGFDDLGSVLNNDTKLCKDWAEKQPPFTLIRSLLRKVLLPESFLIVTVRDVGTEKLKSEVVSPRYLLVRGISGEQRIHLLLERGIGEHQKTQGLRAIMNNRELLDQCQVPAVGSLICVALQLQDVVGESVAPFNQTLTGLHAAFVFHQLTPRGVVRRCLNLEERVVLKRFCRMAVEGVWNRKSVFDGDDLMVQGLGESELRALFHMNILLPDSHCEEYYTFFHLSLQDFCAALYYVLEGLEIEPALCPLYVEKTKRSMELKQAGFHIHSLWMKRFLFGLVSEDVRRPLEVLLGCPVPLGVKQKLLHWVSLLGQQPNATTPGDTLDAFHCLFETQDKEFVRLALNSFQEVWLPINQNLDLIASSFCLQHCPYLRKIRVDVKGIFPRDESAEACPVVPLWMRDKTLIEEQWEDFCSMLGTHPHLRQLDLGSSILTERAMKTLCAKLRHPTCKIQTLMFRNAQITPGVQHLWRIVMANRNLRSLNLGGTHLKEEDVRMACEALKHPKCLLESLRLDCCGLTHACYLKISQILTTSPSLKSLSLAGNKVTDQGVMPLSDALRVSQCALQKLILEDCGITATGCQSLASALVSNRSLTHLCLSNNSLGNEGVNLLCRSMRLPHCSLQRLMLNQCHLDTAGCGFLALALMGNSWLTHLSLSMNPVEDNGVKLLCEVMREPSCHLQDLELVKCHLTAACCESLSCVISRSRHLKSLDLTDNALGDGGVAALCEGLKQKNSVLARLGLKACGLTSDCCEALSLALSCNRHLTSLNLVQNNFSPKGMMKLCSAFACPTSNLQIIGLWKWQYPVQIRKLLEEVQLLKPRVVIDGSWHSFDEDDRYWWKN

SEQ ID NO: 6732 - protein, 928 aa, Homo sapiens
MNEAMATDSPRRPSRCTGGVVVRPQAVTEQSYMESVVTFLQDVVPQAYSGTPLTEEKEKIVWVRFENADLNDTSRNLEFHEIHSTGNEPPLLIMIGYSDGMQVWSIPISGEAQELFSVRHGPIRAARILPAPQFGAQKCDNFAEKRPLLGVCKSIGSSGTSPPYCCVDLYSLRTGEMVKSIQFKTPIYDLHCNKRILVVVLQEKIAAFDSCTFTKKFFVTSCYPCPGPNMNPIALGSRWLAYAENKLIRCHQSRGGACGDNIQSYTATVISAAKTLKSGLTMVGKVVTQLTGTLPSGVTEDDVAIHSNSRRSPLVPGIITVIDTETVGEGQVLVSEDSDSDGIVAHFPAHEKPVCCMAFNTSGMLLVTTDTLGHDFHVFQILTHPWSSSQCAVHHLYTLHRGETEAKVQDICFSHDCRWVVVSTLRGTSHVFPINPYGGQPCVRTHMSPRVVNRMSRFQKSAGLEEIEQELTSKQGGRCSPVPGLSSSPSGSPLHGKLNSQDSYNNFTNNNPGNPRLSPLPSLMVVMPLAQIKQPMTLGTITKRTGPYLFGAGCFSIKAPCKVKPPPQISPSKSMGGEFCVAAIFGTSRSWFANNAGLKREKDQSKQVVVESLYIISCYGTLVEHMMEPRPLSTAPKISDDTPLEMMTSPRASWTLVRTPQWNELQPPFNANHPLLLAADAVQYYQFLLAGLVPPGSPGPITRHGSYDSLASDHSGQEDEEWLSQVEIVTHTGPHRRLWMGPQFQFKTIHPSGQTTVISSSSSVLQSHGPSDTPQPLLDFDTDDLDLNSLRIQPVRSDPVSMPGSSRPVSDRRGVSTVIDAASGTFDRSVTLLEVCGSWPEGFGLRHMSSMEHTEEGLRERLADAMAESPSRDVVGSGTELQREGSIETLSNSSGSTSGSIPRNFDGYRSPLPTNESQPLSLFPTGFP

SEQ ID NO: 6733 - protein, 166 aa, Homo sapiens
MVNSCCGSVCSDQGCGLENCCRPSYCQTTCCRTTCCRPSCCVSSCCRPQCCQTTCCRTTCCHPSCCVSSCCRPQCCQSVCCQPTCCRPQCCQTTCCRTTCCRPSCCRPQCCQSVCCQPTCCCPSYCVSSCCRPQCCQTTCCRTTCCRPSCCVSRCYRPHCGQSLCC

SEQ ID NO: 6734 - protein, 367 aa, Homo sapiens
MDDAAVLKRRGYLLGINLGEGSYAKVKSAYSERLKFNVAIKIIDRKKAPADFLEKFLPREIEILAMLNHCSIIKTYEIFETSHGKVYIVMELAVQGDLLELIKTRGALHEDEARKKFHQLSLAIKYCHDLDVVHRDLKCDNLLLDKDFNIKLSDFSFSKRCLRDDSGRMALSKTFCGSPAYAAPEVLQGIPYQPKVYDIWSLGVILYIMVCGSMPYDDSNIKKMLRIQKEHRVNFPRSKHLTGECKDLIYHMLQPDVNRRLHIDEILSHCWMQPKARGSPSVAINKEGESSRGTEPLWTPEPGSDKKSATKLEPEGEAQPQAQPETKPEGTAMQMSRQSEILGFPSKPSTMETEEGPPQQPPETRAQ

SEQ ID NO: 6735 - protein, 90 aa, Homo sapiens
MSHYGSYYGGLGYSCGGFGGLGYGYGCGCGSFCRRGSGCGYGGYGYGSGFGSYGYGSGFGGYGYGSGFGGYGYGCCRPSYNGGYGFSGFY

SEQ ID NO: 6736 - protein, 171 aa, Homo sapiens
MSYNCCSRNFSSCSHGGYLHYPGSSCGSSYPSNLVYSTDLCSPSTCQLGSSLYRGCQETCWRPNSCQTLCVESSPCHTSCYYAAHMLCNSCLTMHVGSRGFGSNSCCSLSCGSRSCSSLGCGSNGFRYLNYRIHTSPSQSYRSRFCHPIYFPPRRWFHSSCYQPFCRSGFY

SEQ ID NO: 6737 - protein, 516 aa, Homo sapiens
MSGSCSSRKCFSVPATSLCSTEVSCGGPICLPSSCQSQTWQLVTCQDSCGSSSCGPQCRQPSCPVSSCAQPLCCDPVICEPSCSVSSGCQPVCCEATTCEPSCSVSNCYQPVCFEATICEPSCSVSNCCQPVCFEATVCEPSCSVSSCAQPVCCEPAICEPSCSVSSCCQPVGSEATSCQPVLCVPTSCQPVLCKSSCCQPVVCEPSCCSAVCTLPSSCQPVVCEPSCCQPVCPTPTCSVTSSCQAVCCDPSPCEPSCSESSICQPATCVALVCEPVCLRPVCCVQSSCEPPSVPSTCQEPSCCVSSICQPICSEPSPCSPAVCVSSPCQPTCYVVKRCPSVCPEPVSCPSTSCRPLSCSPGSSASAICRPTCAAFYIPSSSKRPCSATISYRPVSRPICRPICSGLLTYRQPYMTSISYRPACYRPCYSILRRPACVTSYSCRPVYFRPSCTESDSCKRDCKKSTSSQLDCVDTTPCKVDVSEEAPCQPTEAKPISPTTREAAAAQPAASKPANC

SEQ ID NO: 6738 - protein, 341 aa, Homo sapiens
MADGCCPGNTTAIPAVPTITTYPVKGGFRHALCLPSSCHSRMWQLVTCQESCQPSIGAPSGCDPASCQPTRLPATSCVGFVCQPMCSHAACYQSGTGQSPCLVSSCQPSCSESTCCQEKCCDASPCQQSSCQESVCMSGSCQAACGQSVCCDAGSCQPSCSEVTSCPETSCLPTICTASPCQPTWCQGSSCQPVSGEGQPCKSTYYQPICYIFKPCQSALYMPVPCQPSTCVFSSCNTTCCVPSHCQPPHCQLVPSTCFIYQPVANCQAPCSTKNCCKPASCDTVISGQPTCDGPPSYNQSGCKSACCVTGLGTSPSSGSNCLPTSCQPSCESSFCKATLC

SEQ ID NO: 6739 - protein, 195 aa, Homo sapiens
MVSSCCGSVCSDQSCGQGLGQESCCRPSCCQTTCCRTTCCRPSCCISSCCRPSCCISSCCKPSCCRTTCCRPSCCISSCCRPSCCISSCCKPSCCRTTCCRPSCCISSCCRPSCCISSCCKPSCCQTTCCRPSCCISSCYRPQCCQPSCCRPACCISSCCHPSCCVSSCRCPFSCPTTCCRTTCFHPICCGSSCC

SEQ ID NO: 6740 - protein, 195 aa, Homo sapiens
MVNSCCGSVCSHQGCGRDLCQETCCRPSCCETTCCRTTYCRPSCCVSSCCRPQCCQSVCCQPTCCRPRCCISSCCRPSCCVSSCCKPQCCQSMCCQPTCCRPRCCISSCCRPSCCVSSCCRPQCCQSVCCQPTCCHPSCSISSCCRPSCCESSCCRPCCCLRPVCGRVSCHTTCYRPTCVISSCPRPLCCASSCC

SEQ ID NO: 6741 - protein, 210 aa, Homo sapiens
MVSSCCGSVCSDQGCGQDLCQETCCRPSCCETTCCRTTCCRPSCCVSSCCRPQCCQSVCCQPTCSRPSCCQTTCCRTTCYRPSCCVSSCCRPQCCQPACCQPTCCRPSCCETTCCHPRCCISSCCRPSCCVSSCCKPQCCQSVCCQPNCCRPSCSISSCCRPSCCESSCCRPCCCVRPVCGRVSCHTTCYRPTCVISSCPRPLCCASSCC

SEQ ID NO: 6742 - protein, 128 aa, Homo sapiens
MTGSCCGSTLSSLSYGGGCCQPCCCRDPCCCRPVTCQTTVCRPVTCVPRCTRPICEPCRRPVCCDPCSLQEGCCRPITCCPSSCTAVVCRPCCWATTCCQPVSVQSPCCRPPCGQPTPCSTTCRTSSC

SEQ ID NO: 6743 - protein, 128 aa, Homo sapiens
MTGSCCGSTFSSLSYGGGCCQPCCCRDPCCCRPVTCQTTVCRPVTCVPRCTRPICEPCRRPVCCDPCSLQEGCCRPITCCPSSCTAVVCRPCCWATTCCQPVSVQSPCCRPPCGQPTPCSTTCRTSSC

SEQ ID NO: 6744 - protein, 98 aa, Homo sapiens
MDCCASRGCSVPTGPATTICSSDKSCRCGVCLPSTCPHTVWLLEPTCCDNCPPPCHIPQPCVPTCFLLNSCQPTPGLETLNLTTFTQPCCEPCLPRGC

SEQ ID NO: 6745 - protein, 98 aa, Homo sapiens
MDCCASRSCSVPTGPATTICSSDKSCRCGVCLPSTCPHTVWLLEPICCDNCPPPCHIPQPCVPTCFLLNSCQPTPGLETLNLTTFTQPCCEPCLPRGC

SEQ ID NO: 6746 - protein, 98 aa, Homo sapiens
MYCCALRSCSVPTGPATTFCSFDKSCRCGVCLPSTCPHEISLLQPICCDTCPPPCCKPDTYVPTCWLLNNCHPTPGLSGINLTTYVQPGCESPCEPRC

SEQ ID NO: 6747 - protein, 96 aa, Homo sapiens
MCHTSCSSGCQPACCAPSPCQASCYIPVGCQSSVCVPVSFKPAVCVPVRCQSSVCVPVSCRPVVYAAPSCQSSGCCQPSCTSVLCRPISCSTPSCC

SEQ ID NO: 6748 - protein, 112 aa, Homo sapiens
MCHTSHSSGCPMACPGSPCCVPSTCYPPEGYGTSCCCSAPCVALLCRPLCGVSTCCQPACCVPSPCQVACCVPVSCKPVLCVASFCPTSGCCQPFCPTLVYRPVTWSTPTGC

SEQ ID NO: 6749 - protein, 221 aa, Homo sapiens
MATSTMSVCSSAYSDSWQVDACPESCCEPPCCATSCCAPAPCLTLVCTPVSCVSSPCCQAACEPSPCQSGCTSSCTPSCCQQSSCQPACCTSSPCQQACCVPVCCKPVCCVPVCCKPVCCKPICCVPVCSGASSSCCQQSSRQPACCTTSCCRPSSSVSLLCRPVCRSTCCVPIPSCCAPASTCQPSCCRPASCVSLLCRPTCSRLSSACCGLSSGQKSSC

SEQ ID NO: 6750 - protein, 255 aa, Homo sapiens
MAASTMSICSSACTNSWQVDDCPESCCELPCGTPSCCAPAPCLTLVCTPVSCVSSPCCQAACEPSACQSGCTSSCTPSCCQQSSCQPACCTSSPCQQACCVPVCCKPVCCVPVCCGASSCCQQSSCQPACCASSSCQQSCRVPVCCKAVCCVPTCSESSSSCCQQSSCQPACCTSSPCQQSCCVSVCCKPVCCKSICCVPVCSGASSPCCQQSSCQPACCTSSCCRPSSSVSLLCRPVCSRPASCSFSSGQKSSC

SEQ ID NO: 6751 - protein, 103 aa, Homo sapiens
MCGSYYRNYNGGHGYGCCGYGGLGCGYGGCGYGCCGYGGLGFGYGGLDCGYGGLGCGYGSFCGCGYRGLDCGYGCGYGYVSHSFCGCGYRCGSGYGSSFGYYY

SEQ ID NO: 6752 - protein, 1038 aa, Homo sapiens
MVSSAQMGFNLQALLEQLSQDELSKFKYLITTFSLAHELQKIPHKEVDKADGKQLVEILTTHCDSYWVEMASLQVFEKMHRMDLSERAKDEVREAALKSFNKRKPLSLAFTETKGNVICLGKEVFKGKKPDKDNRCRYILKTKFREMWKSWPGDSKEVQVMAERYKMLIPFSNPRVLPGPFSYTVVLYGPAGLGKTTLAQKLMLDWAEDNLIHKFKYAFYLSCRELSRLGPCSFAELVFRDWPELQDDIPHILAQARKILFVIDGFDELGAAPGALIEDICGDWEKKKPVPVLLGSLLNRVMLPKAALLVTTRPRALRDLRILAEEPIYIRVEGFLEEDRRAYFLRHFGDEDQAMRAFELMRSNAALFQLGSAPAVCWIVCTTLKLQMEKGEDPVPTCLTRTGLFLRFLCSRFPQGAQLRGALRTLSLLAAQGLWAQTSVLHREDLERLGVQESDLRLFLDGDILRQDRVSKGCYSFIHLSFQQFLTALFYTLEKEEEEDRDGHTWDIGDVQKLLSGVERLRNPDLIQAGYYSFGLANEKRAKELEATFGCRMSPDIKQELLRCDISCKGGHSTVTDLQELLGCLYESQEEELVKEVMAQFKEISLHLNAVDVVPSSFCVKHCRNLQKMSLQVIKENLPENVTASESDAEVERSQDDQHMLPFWTDLCSIFGSNKDLMGLAINDSFLSASLVRILCEQIASDTCHLQRVVFKNISPADAHRNLCLALRGHKTVTYLTLQGNDQDDMFPALCEVLRHPECNLRYLGLVSCSATTQQWADLSLALEVNQSLTCVNLSDNELLDEGAKLLYTTLRHPKCFLQRLSLENCHLTEANCKDLAAVLVVSRELTHLCLAKNPIGNTGVKFLCEGLRYPECKLQTLVLWNCDITSDGCCDLTKLLQEKSSLLCLDLGLNHIGVKGMKFLCEALRKPLCNLRCLWLWGCSIPPFSCEDLCSALSCNQSLVTLDLGQNPLGSSGVKMLFETLTCSSGTLRTLRLKIDDFNDELNKLLEEIEEKNPQLIIDTEKHHPWAERPSSHDFMI

SEQ ID NO: 6753 - protein, 253 aa, Homo sapiens
MELEQREGTMAAVGFEEFSAPPGSELALPPLFGGHILESELETEVEFVSGGLGGSGLRERDEEEEAARGRRRRQRELNRRKYQALGRRCREIEQVNERVLNRLHQVQRITRRLQQERRFLMRVLDSYGDDYRASQFTIVLEDEGSQGTDAPTPGNAENEPPEKETLSPPRRTPAPPEPGSPAPGEGPSGRKRRRVPRDGRRAGNALTPELAPVQIKVEEDFGFEADEALDSSWVSRGPDKLLPYPTLASPASD

SEQ ID NO: 6754 - protein, 891 aa, Homo sapiens
MLRTAGRDGLCRLSTYLEELEAVELKKFKLYLGTATELGEGKIPWGSMEKAGPLEMAQLLITHFGPEEAWRLALSTFERINRKDLWERGQREDLVRDTPPGGPSSLGNQSTCLLEVSLVTPRKDPQETYRDYVRRKFRLMEDRNARLGECVNLSHRYTRLLLVKEHSNPMQVQQQLLDTGRGHARTVGHQASPIKIETLFEPDEERPEPAAVVMQGAAGIGKSMLAHKVMLDWADGKLFQGRFDYLFYINCREMNQSATECSMQDLIFSCWPEPSAPLQELIRVPERLLFIIDGFDELKPSFHDPQGPWCLCWEEKRPTELLLNSLIRKKLLPELSLLITTRPTALEKLHRLLEHPRHVEILGFSEAERKEYFYKYFHNAEQAGQVFNYVRDNEPLFTMCFVPLVCWVVCTCLQQQLEGGGLLRQTSRTTTAVYMLYLLSLMQPKPGAPRLQPPPNQRGLCSLAADGLWNQKILFEEQDLRKHGLDGEDVSAFLNMNIFQKDINCERYYSFIHLSFQEFFAAMYYILDEGEGGAGPDQDVTRLLTEYAFSERSFLALTSRFLFGLLNEETRSHLEKSLCWKVSPHIKMDLLQWIQSKAQSDGSTLQQGSLEFFSCLYEIQEEEFIQQALSHFQVIVVSNIASKMEHMVSSFCLKRCRSAQVLHLYGATYSADGEDRARCSAGAHTLLVQLRPERTVLLDAYSEHLAAALCTNPNLIELSLYRNALGSRGVKLLCQGLRHPNCKLQNLRLKRCRISSSACEDLSAALIANKNLTRMDLSGNGVGFPGMMLLCEGLRHPQCRLQMIQLRKCQLESGACQEMASVLGTNPHLVELDLTGNALEDLGLRLLCQGLRHPVCRLRTLWWLFGMDLNKMTHSRLAALRVTKPYLDIGC

SEQ ID NO: 6755 - protein, 1061 aa, Homo sapiens
MLRTAGRDGLCRLSTYLEELEAVELKKFKLYLGTATELGEGKIPWGSMEKAGPLEMAQLLITHFGPEEAWRLALSTFERINRKDLWERGQREDLVRDTPPGGPSSLGNQSTCLLEVSLVTPRKDPQETYRDYVRRKFRLMEDRNARLGECVNLSHRYTRLLLVKEHSNPMQVQQQLLDTGRGHARTVGHQASPIKIETLFEPDEERPEPAAVVMQGAAGIGKSMLAHKVMLDWADGKLFQGRFDYLFYINCREMNQSATECSMQDLIFSCWPEPSAPLQELIRVPERLLFIIDGFDELKPSFHDPQGPWCLCWEEKRPTELLLNSLIRKKLLPELSLLITTRPTALEKLHRLLEHPRHVEILGFSEAERKEYFYKYFHNAEQAGQVFNYVRDNEPLFTMCFVPLVCWVVCTCLQQQLEGGGLLRQTSRTTTAVYMLYLLSLMQPKPGAPRLQPPPNQRGLCSLAADGLWNQKILFEEQDLRKHGLDGEDVSAFLNMNIFQKDINCERYYSFIHLSFQEFFAAMYYILDEGEGGAGPDQDVTRLLTEYAFSERSFLALTSRFLFGLLNEETRSHLEKSLCWKVSPHIKMDLLQWIQSKAQSDGSTLQQGSLEFFSCLYEIQEEEFIQQALSHFQVIVVSNIASKMEHMVSSFCLKRCRSAQVLHLYGATYSADGEDRARCSAGAHTLLVQLRPERTVLLDAYSEHLAAALCTNPNLIELSLYRNALGSRGVKLLCQGLRHPNCKLQNLRLKRCRISSSACEDLSAALIANKNLTRMDLSGNGVGFPGMMLLCEGLRHPQCRLQMIQLRKCQLESGACQEMASVLGTNPHLVELDLTGNALEDLGLRLLCQGLRHPVCRLRTLWLKICRLTAAACDELASTLSVNQSLRELDLSLNELGDLGVLLLCEGLRHPTCKLQTLRLGICRLGSAACEGLSVVLQANHNLRELDLSFNDLGDWGLWLLAEGLQHPACRLQKLWLDSCGLTAKACENLYFTLGINQTLTDLYLTNNALGDTGVRLLCKRLSHPGCKLRVLWLFGMDLNKMTHSRLAALRVTKPYLDIGC

SEQ ID NO: 6756 - protein, 1003 aa, Homo sapiens
MLRTAGRDGLCRLSTYLEELEAVELKKFKLYLGTATELGEGKIPWGSMEKAGPLEMAQLLITHFGPEEAWRLALSTFERINRKDLWERGQREDLVRDTPPGGPSSLGNQSTCLLEVSLVTPRKDPQETYRDYVRRKFRLMEDRNARLGECVNLSHRYTRLLLVKEHSNPMQVQQQLLDTGRGHARTVGHQASPIKIETLFEPDEERPEPAAVVMQGAAGIGKSMLAHKVMLDWADGKLFQGRFDYLFYINCREMNQSATECSMQDLIFSCWPEPSAPLQELIRVPERLLFIIDGFDELKPSFHDPQGPWCLCWEEKRPTELLLNSLIRKKLLPELSLLITTRPTALEKLHRLLEHPRHVEILGFSEAERKEYFYKYFHNAEQAGQVFNYVRDNEPLFTMCFVPLVCWVVCTCLQQQLEGGGLLRQTSRTTTAVYMLYLLSLMQPKPGAPRLQPPPNQRGLCSLAADGLWNQKILFEEQDLRKHGLDGEDVSAFLNMNIFQKDINCERYYSFIHLSFQEFFAAMYYILDEGEGGAGPDQDVTRLLTEYAFSERSFLALTSRFLFGLLNEETRSHLEKSLCWKVSPHIKMDLLQWIQSKAQSDGSTLQQGSLEFFSCLYEIQEEEFIQQALSHFQVIVVSNIASKMEHMVSSFCLKRCRSAQVLHLYGATYSADGEDRARCSAGAHTLLVQLPERTVLLDAYSEHLAAALCTNPNLIELSLYRNALGSRGVKLLCQGLRHPNCKLQNLRLKRCRISSSACEDLSAALIANKNLTRMDLSGNGVGFPGMMLLCEGLRHPQCRLQMIQLRKCQLESGACQEMASVLGTNPHLVELDLTGNALEDLGLRLLCQGLRHPVCRLRTLWLKICRLTAAACDELASTLSVNQSLRELDLSLNELGDLGVLLLCEGLRHPTCKLQTLRLDSCGLTAKACENLYFTLGINQTLTDLYLTNNALGDTGVRLLCKRLSHPGCKLRVLWLFGMDLNKMTHSRLAALRVTKPYLDIGC

SEQ ID NO: 6757 - protein, 108 aa, Homo sapiens
MASGRPEELWEAVVGAAERFRARTGTELVLLTAAPPPPPRPGPCAYAAHGRGALAEAARRCLHDIALAHRAATAARPPAPPPAPQPPSPTPSPPRPTLAREDNEEDED

SEQ ID NO: 6758 - protein, 256 aa, Homo sapiens; identical to SEQ ID NO: 5767

SEQ ID NO: 6759 - protein, 256 aa, Homo sapiens; identical to SEQ ID NO: 5767

SEQ ID NO: 6760 - protein, 256 aa, Homo sapiens; identical to SEQ ID NO: 5767

SEQ ID NO: 6761 - protein, 256 aa, Homo sapiens; identical to SEQ ID NO: 5767

SEQ ID NO: 6762 - protein, 276 aa, Homo sapiens
MSFEGGDGAGPAMLATGTARMASGRPEELWEAVVGAAERFRARTGTELVLLTAAPPPPPRPGPCAYAAHGRGALAEAARRCLHDIALAHRAATAARPPAPPPAPQPPSPTPSPPRPTLAREDNEEDEDEPTETETSGEQLGISDNGGLFVMDEDATLQDLPPFCESDPESTDDGSLSEETPAGPPTCSVPPASALPTQQYAKSLPVSVPVWGFKEKRTEARSSDEENGPPSSPDLDRIAASMRALVLREAEDTQVFGDLPRPRLNTSDFQKLKRKY

SEQ ID NO: 6763 - protein, 301 aa, Homo sapiens; identical to SEQ ID NO: 5683

SEQ ID NO: 6764 - protein, 203 aa, Homo sapiens [sequence omitted]

SEQ ID NO: 6765 - protein, 229 aa, Homo sapiens; identical to SEQ ID NO: 4809

SEQ ID NO: 6766 - protein, 760 aa, Homo sapiens
MMEERAAAAVAAAASSCRPLGSGAGPGPTGAAPVSAPAPGPGPAGKGGGGGGSPGPTAGPEPLSLPGILHFIQHEWARFEAEKARWEAERAELQAQVAFLQGERKGQENLKTDLVRRIKMLEYALKQERAKYHKLKFGTDLNQGEKKADVSEQVSNGPVESVTLENSPLVWKEGRQLLRQYLEEVGYTDTILDMRSKRVRSLLGRSLELNGAVEPSEGAPRAPPGPAGLSGGESLLVKQIEEQIKRNAAGKDGKERLGGSVLGQIPFLQNCEDEDSDEDDELDSVQHKKQRVKLPSKALVPEMEDEDEEDDSEDAINEFDFLGSGEDGEGAPDPRRCTVDGSPHELESRRVKLQGILADLRDVDGLPPKVTGPPPGTPQPRPHEGSFGFSSDVFIMDTIGGGEVSLGDLADLTVTNDNDLSCDLSDSKDAFKKTWNPKFTLRSHYDGIRSLAFHHSQSALLTASEDGTLKLWNLQKAVTAKKNAALDVEPIHAFRAHRGPVLAVAMGSNSEYCYSGGADACIHSWKIPDLSMDPYDGYDPSVLSHVLEGHGDAVWGLAFSPTSQRLASCSADGTVRIWDPSSSSPACLCTFPTASEHGVPTSVAFTSTEPAHIVASFRSGDTVLYDMEVGSALLTLESRGSSGPTQINQVVSHPNQPLTITAHDDRGIRFLDNRTGKPVHSMVAHLDAVTCLAVDPNGAFLMSGSHDCSLRLWSLDNKTCVQEITAHRKKHEEAIHAVACHPSKALIASAGADALAKVFV

SEQ ID NO: 6767 - protein, 108 aa, Homo sapiens
MTPEELQKREEEEFNTGPLSVLTQSVKNNTQVLINCRNNKKLLGRVKAFDRHCNMVLENVKEMWTEVPKSGKGKKKSKPVNKDRYISKMFLRGDSVIVVLRNPLIAGK

SEQ ID NO: 6768 - protein, 424 aa, Homo sapiens
MVQTLYYSADHKLLDGNLLDGQAEVFGSDDDHIQFVQKKPPRENGHKQISSSSTGCLSSPNATVQSPKHEWKIVASEKTSNNTYLCLAVLDGIFCVIFLHGRNSPQSSPTSTPKLSKSLSFEMQQDELIEKPMSPMQYARSGLGTAEMNGKLIAAGGYNREECLRTVECYNPHTDHWSFLAPMRTPRARFQMAVLMGQLYVVGGSNGHSDDLSCGEMYDSNIDDWIPVPELRTNRCNAGVCALNGKLYIVGGSDPYGQKGLKNCDVFDPVTKLWTSCAPLNIRRHQSAVCELGGYLYIIGGAESWNCLNTVERYNPENNTWTLIAPMNVARRGAGVAVLNGKLFVCGGFDGSHAISCVEMYDPTRNEWKMMGNMTSPRSNAGIATVGNTIYAVGGFDGNEFLNTVEVYNLESNEWSPYTKIFQF

SEQ ID NO: 6769 - protein, 160 aa, Homo sapiens
MNNARYLWKRIPPAIKSANSELGGIWSVGQRIWQRDFPGIYTTINAHQWSETVQPIMEALRDATRRRAFALVSQAYTSIIADDFAAFVGLPVEEAVKGILEQGWQADSTTRMVLPRKPVAGALDVSFNKFIPLSEPAPVPPIPNEQQLARLTDYVAFLEN

SEQ ID NO: 6770 - protein, 308 aa, Homo sapiens
MMEEISIMVAYDAHVFSQLHDEDFLTSLVAISKPRSMVPTKKLKKYEKEYQTMRESQLQQEDPMDRYKRENRRLQEASMRLEQENDDLAHELVTSKIALRNDLDQAEDKADVLNKELLLTKQRLVETEEEKRKQEEETAQLKEVFRKQLEKAEYEIKKTTAIIAEYKQICSQLSTRLEKQQAASKEELEVVKGKMMACKHCSDIFSKEGALKLAATGREDQGIETDDEKDSLKKQLREMELELAQTKLQLVEAKCKIQELEHQRGALMNEIQAAKNSWFSKTLNSIKTATGTQPLQPAPVTQPPKEST

SEQ ID NO: 6771 - protein, 1199 aa, Homo sapiens; identical to SEQ ID NO: 4861

SEQ ID NO: 6772 - protein, 778 aa, Homo sapiens
RIQEQLESSFTGLTDEKVKAYLSLHPQVLDEFVSESVSAETVEKWLKRKNNKSEDESAPKEVSRYQDTNMQGVVYELNSYIEQRLDTGGDNQLLLYELSSIIKIATKADGFALYFLGECNNSLCIFTPPGIKEGKPRLIPAGPITQGTTVSAYVAKSRKTLLVEDILGDERFPRGTGLESGTRIQSVLCLPIVTAIGDLIGILELYRHWGKEAFCLSHQEVATANLAWASVAIHQVQVCRGLAKQTELNDFLLDVSKTYFDNIVAIDSLLEHIMIYAKNLVNADRCALFQVDHKNKELYSDLFDIGEEKEGKPVFKKTKEIRFSIEKGIAGQVARTGEVLNIPDAYADPRFNREVDLYTGYTTRNILCMPIVSRGSVIGVVQMVNKISGSAFSKTDENNFKMFAVFCALALHCANMYHRIRHSECIYRVTMEKLSYHSICTSEEWQGLMQFTLPVRLCKEIELFHFDIGPFENMWPGIFVYMVHRSCGTSCFELEKLCRFIMSVKKNYRRVPYHNWKHAVTVAHCMYAILQNNHTLFTDLERKGLLIACLCHDLDHRGFSNSYLQKFDHPLAALYSTSTMEQHHFSQTVSILQLEGHNIFSTLSSSEYEQVLEIIRKAIIATDLALYFGNRKQLEEMYQTGSLNLNNQSHRDRVIGLMMTACDLCSVTKLWPVTKLTANDIYAEFWAEGDEMKKLGIQPIPMMDRDKKDEVPQGQLGFYNAVAIPCYTTLTQILPPTEPLLKACRDNLSQWEKVIRGEETATWISSPSVAQKAAASED

SEQ ID NO: 6773 - protein, 426 aa, Homo sapiens; identical to SEQ ID NO: 6138

SEQ ID NO: 6774 - protein, 592 aa, Homo sapiens
MDVMLENYCHLISVGCHMTKPDVILKLERGEEPWTSFAGHTCLEENWKAEDFLVKFKEHQEKYSRSVVSINHKKLVKEKSKIYEKTFTLGKNPVNSKNLPPEYDTHGRILKNVSELIISNLNPARKRLSEYNGYGKSLLSTKQETTHPEVKSHNQSARAFSHNEVLMQYQKTETPAQSFGYNDCEKSFLQRGGLITHSRPYKGENPSVYNKKRRATNIEKKHTCNECGKSFCRKSVLILHQGIHSEEKPYQCHQCGNAFRRKSYLIDHQRTHTGEKPFVCNECGKSFRLKTALTDHQRTHTGEKSYECLQCRNAFRLKSHLIRHQRTHTGEKPYECNDCGKSFRQKTTLSLHQRIHTGEKPYICKECGKSFHQKANLTVHQRTHTGEKPYICNECGKSFSQKTTLALHEKTHNEEKPYICSECGKSFRQKTTLVAHQRTHTGEKSYECPHCGKAFRMKSYLIDHHRTHTGEKPYECNECGKSFSQKTNLNLHQRIHTGEKPYVCNECGKSFRQKATLTVHQKIHTGQKSYECPQCGKAFSRKSYLIHHQRTHTGEKPYKCSECGKCFRQKTNLIVHQRTHTGGEDGLTGCLS

SEQ ID NO: 6775 - protein, 214 aa, Homo sapiens
MEVTGVSAPTVTVFISSSLNTFRSEKRYSRSLTIAEFKCKLELLVGSPASCMELELYGVDDKFYSKLDQEDALLGSYPVDDGCRIHVIDHSGARLGEYEDVSRVEKYTISQEAYDQRQDTVRSFLKRSKLGRYNEEERAQQEAEAAQRLAEEKAQASSIPVGSRCEVRAAGQSPRRGTVMYVGAWLAGPVPGSRAPRPGGNVGGTVEPRRPRSA

SEQ ID NO: 6776 - protein, 62 aa, Homo sapiens
MSIQWKTRQLQSKLHEADIVVLGSPKPEEIPLTWIQPGTTVLNCSHDFLSESLIIIRRMAIF

SEQ ID NO: 6777 - protein, 422 aa, Homo sapiens
MYPNPLIYCTCWDPWNLGPRKLIKTPQLPRKNSTGSSKLTPLVPAPKNHNYLQPTKPVVSPKMKIHSARQEETNKSFYEVINVSPGYQLVRNREQISVTLGDEMFDRKKRWESEIPDKGRFSRTNIISDLEEQISELTAIIEQMNRDHQSAQKLLSSEMDLRCAEMKQNFENKNRELKEAHEAELSELENNYKAALKAEKLAAQEKLEEMGKEYKYLKNMFRTYQDSIYDEMEEKWSKQKAKWKKDEKFERENILLQQKKKMTKKFEMESGEEDKKINESCSAVFENFIQEKEELLKQHQSDTLQLEELRKTKEVMQEELHAQALILESLNTNLYYTQLELQKEKAIVGNLEKMLQTKFAETEEKYKHTIQILTEENIHLKQKIISKNEEICEGCSGRLASITVSKDDSDTVQDGSKKGQES

SEQ ID NO: 6778 - protein, 459 aa, Homo sapiens
MVPFGPFAFMPGKLVHTNEVTVLLGDNWFAKCSAKQAVGLVEHRKEHVRKTIDDLKKVMKNFESRVEFTEDLQKMSDAAGDIVDIREEIKCDFEFKAKHRIAHKPHSKPKTSDIFEADIANDVKSKDLLADKELWARLEELERQEELLGELDSKPDTVIANGEDTTSSEEEKEDRNTNVNAMHQVTDSHTPCHKDVASSEPFSGQVNSQLNCSVNGSSSYHSDDDDDDDDDDDDDNIDDDDGDNDHEALGVGDNSIPTIYFSHTVEPKRVRINTGKNTTLKFSEKKEEAKRKRKNSTGSGHSAQELPTIRTPADIYRAFVDVVNGEYVPRKSILKSRSRENSVCSDTSESSAAEFDDRRGVLRSISCEEATCSDTSESILEEEPQENQKKLLPLSVTPEAFSGTVIEKEFVSPSLTPPPAIAHPALPTIPERKEVLLEASEETGKRVSKFKAARLQQKD

SEQ ID NO: 6779 - protein, 355 aa, Homo sapiens
MREIVHIQAGQCGNQIGAKFWEVISDEHGIDPTGSYHGDSDLQLLTHSLGGGTGSGMGTLLISKIREEYPDRIMNTFSVMPSPKVSDTVVEPYNATLSVHQLVENTDETYSIDNEALYDICFRTLKLTTPTYGDLNHLVSATMSGVTTCLRFPGQLNADLRKLAVNMVPFPRLHFFMPGFAPLTSRGSQQYRALTVPELTQQMFDSKNMMAACDPRHGRYLTVAAIFRGRMSMKEVDEQMLNVQNKNSSYFVEWIPNNVKTAVCDIPPRGLKMSATFIGNSTAIQELFKRISEQFTAMFRRKAFLHWYTGEGMDEMEFTEAESNMNDLVSEYQQYQDATADEQGEFEEEEGEDEA

SEQ ID NO: 6780 - protein, 84 aa, Homo sapiens; identical to SEQ ID NO: 5781

SEQ ID NO: 6781 - protein, 471 aa, Homo sapiens
MKMQVFCKSIEDMTVKAEQSQQEAAKKHEEEKKELERKLSDLEKKMETSHNQCQELKARYERATSETKTKHEEILQNLQKTLLDTEDKLKGAREENSGLLQELEELRKQADKAKAAQTAEDAMQIMEQMTKEKTETLASLEDTKQTNAKLQNELDTLKENNLKNVEELNKSKELLTVENQKMEEFRKEIETLKQAAAQKSQQLSALQEENVKLAEELGRSRDEVTSHQKLEEERSVLNNQLLEMKKRESKFIKDADEEKASLQKSISITSALLTEKDAELEKLRNEVTVLRGENASAKSLHSVVQTLESDKVKLELKVKNLELQLKENKRQLSSSSGNTDTQADEDERAQESQVMIDFLNSVIVDLQRKNQDLKMKVEMMSEAALNGNGDDLNNYDSDDQEKQSKKKPRLFCDICDCFDLHDTEDCPTQAQMSEDPPHSTHHGSRGEERPYCEICEMFGHWATNCNDDETF

SEQ ID NO: 6782 - protein, 533 aa, Homo sapiens
MSSCVSSQPSSNRAAPQDELGGRGSSSSESQKPCEALRGLSSLSIHLGMESFIVVTECEPGCAVDLGLARDRPLEADGQEVPLDTSGSQARPHLSGRKLSLQERSQGGLAAGGSLDMNGRCICPSLPYSPVSSPQSSPRLPRRPTVESHHVSITGMQDCVQLNQYTLKDEIGKGSYGVVKLAYNENDNTYYAMKVLSKKKLIRQAGFPRRPPPRGTRPAPGGCIQPRGPIEQVYQEIAILKKLDHPNVVKLVEVLDDPNEDHLYMVFELVNQGPVMEVPTLKPLSEDQARFYFQDLIKGIEYLHYQKIIHRDIKPSNLLVGEDGHIKIADFGVSNEFKGSDALLSNTVGTPAFMAPESLSETRKIFSGKALDVWAMGVTLYCFVFGQCPFMDERIMCLHSKIKSQALEFPDQPDIAEDLKDLITRMLDKNPESRIVVPEIKLHPWVTRHGAEPLPSEDENCTLVEVTEEEVENSVKHIPSLATVILVKTMIRKRSFGNPFEGSRREERSLSAPGNLLTKKPTRECESLSELKT

SEQ ID NO: 6783 - protein, 556 aa, Homo sapiens
MSSCVSSQPSSNRAAPQDELGGRGSSSSESQKPCEALRGLSSLSIHLGMESFIVVTECEPGCAVDLGLARDRPLEADGQEVPLDTSGSQARPHLSGRKLSLQERSQGGLAAGGSLDMNGRCICPSLPYSPVSSPQSSPRLPRRPTVESHHVSITGMQDCVQLNQYTLKDEIGKGSYGVVKLAYNENDNTYYAMKVLSKKKLIRQAGFPRRPPPRGTRPAPGGCIQPRGPIEQVYQEIAILKKLDHPNVVKLVEVLDDPNEDHLYMVFELVNQGPVMEVPTLKPLSEDQARFYFQDLIKGIEYLHYQKIIHRDIKPSNLLVGEDGHIKIADFGVSNEFKGSDALLSNTVGTPAFMAPESLSETRKIFSGKALDVWAMGVTLYCFVFGQCPFMDERIMCLHSKIKSQALEFPDQPDIAEDLKDLITRMLDKNPESRIVVPEIKLHPWVTRHGAEPLPSEDENCTLVEVTEEEVENSVKHIPSLATVILVKTMIRKRSFGNPFEGSRREERSLSAPGNLLTKKPTRECESLSELKGTKKKKGLDSMTSTVAAGWLDRRV

SEQ ID NO: 6784 - protein, 102 aa, Homo sapiens
MLSEEEKEELKAELVQLEDEITTLRQVLSAKERHLVEIKQKLGMNLMNELKQNFSKSWHDMQTTTAYKKTHETLSHAGQKATAAFSNVGTAISKKFGDMRRK

SEQ ID NO: 6785 - protein, 204 aa, Homo sapiens
MEAEPKGLLETEPLQGTDEDAVASADFSSMLSEEEKEELKAELVQLEDEITTLRQVLSAKERHLVEIKQKLGMNLMNELKQNFSKSWHDMQTTTAYKKTHETLSHAGQKATAAFSNVGTAISKKFGDMSYSIRHSISMPAMRNSPTFKSFEERVETTVTSLKTKVGGTNPNGGSFEEVLSSTAHASAQSLAGGSRRTKEEELQC

SEQ ID NO: 6786 - protein, 122 aa, Homo sapiens
  VARIANT 1: note = X can be any amino acid
XYLVALGCIKPLCDLLTVMDSKIVQVALNGLENILRLGEQESKQNGIGINPYCALIEEAYGLDKIEFLQSHENQEIYQKAFDLIEHYFGVEEDDPSIVPQVDENQQQFIFQQQEAPMDGFQL

SEQ ID NO: 6787 - protein, 378 aa, Homo sapiens
MEVKPPPGRPQPDSGRRRRRRGEEGHDPKEPEQLRKLFIGGLSFETTDDSLREHFEKWGTLTDCVVMRDPQTKRSRGFGFVTYSCVEEVDAAMCARPHKVDGRVVEPKRAVSREDSVKPGAHLTVKKIFVGGIKEDTEEYNLRDYFEKYGKIETIEVMEDRQSGKKRGFAFVTFDDHDTVDKIVVQKYHTINGHNCEVKKALSKQEMQSAGSQRGRGGGSGNFMGRGGNFGGGGGNFGRGGNFGGRGGYGGGGGGSRGSYGGGDGGYNGFGGDGGNYGGGPGYSSRGGYGGGGPGYGNQGGGYGGGGGYDGYNEGGNFGGGNYGGGGNYNDFGNYSGQQQSNYGPMKGGSFGGRSSGSPYGGGYGSGGGSGGYGSRRF

SEQ ID NO: 6788 - protein, 1020 aa, Homo sapiens
MRRFLRPGHDPVRERLKRDLFQFNKTVEHGFPHQPSALGYSPSLRILAIGTRSGAIKLYGAPGVEFMGLHQENNAVTQIHLLPGQCQLVTLLDDNSLHLWSLKVKGGASELQEDESFTLRGPPGAAPSATQITVVLPHSSCELLYLGTESGNVFVVQLPAFRALEDRTISSDAVLQRLPEEARHRRVFEMVEALQEHPRDPNQILIGYSRGLVVIWDLQGSRVLYHFLSSQQLENIWWQRDGRLLVSCHSDGSYCQWPVSSEAQQPEPLRSLVPYGPFPCKAITRILWLTTRQGLPFTIFQGGMPRASYGDRHCISVIHDGQQTAFDFTSRVIGFTVLTEADPAATFDDPYALVVLAEEELVVIDLQTAGWPPVQLPYLASLHCSAITCSHHVSNIPLKLWERIIAAGSRQNAHFSTMEWPIDGGTSLTPAPPQRDLLLTGHEDGTVRFWDASGVCLRLLYKLSTVRVFLTDTDPNENFSAQGEDEWPPLRKVGSFDPYSDDPRLGIQKIFLCKYSGYLAVAGTAGQVLVLELNDEAAEQAVEQVEADLLQDQEGYRWKGHERLAARSGPVRFEPGFQPFVLVQCQPPAVVTSLALHSEWRLVAFGTSHGFGLFDHQQRRQVFVKCTLHPSDQLALEGPLSRVKSLKKSLRQSFRRMRRSRVSSRKRHPAGPPGEAQEGSAKAERPGLQNMELAPVQRKIEARSAEDSFTGFVRTLYFADTYLKDSSRHCPSLWAGTNGGTIYAFSLRVPPAERRMDEPVRAEQAKEIQLMHRAPVVGILVLDGHSVPLPEPLEVAHDLSKSPDMQGSHQLLVVSEEQFKVFTLPKVSAKLKLKLTALEGSRVRRVSVAHFGSRRAEDYGEHHLAVLTNLGDIQVVSLPLLKPQVRYSCIRREDVSGIASCVFTKYGQGFYLISPSEFERFSLSTKWLVEPRCLVDSAETKNHRPGNGAGPKKAPSRARNSGTQSDGEEKQPGLVMERALLSDERVLKEIQSTLEGDRGSGNWRSHRAAVGCSLSNGGAE

SEQ ID NO: 6789 - protein, 485 aa, Homo sapiens
MAAELYAPASAAAADLANSNAGAAVGRKAGPRSPPSAPAPAPPPPAPAPPTLGNNHQESPGWRCCRPTLRERNALMFNNELMADVHFVVGPPGATRTVPAHKYVLAVGSSVFYAMFYGDLAEVKSEIHIPDVEPAAFLILLKYMYSDEIDLEADTVLATLYAAKKYIVPALAKACVNFLETSLEAKNACVLLSQSRLFEEPELTQRCWEVIDAQAEMALRSEGFCEIDRQTLEIIVTREALNTKEAVVFEAVLNWAEAECKRQGLPITPRNKRHVLGRALYLVRIPTMTLEEFANGAAQSDILTLEETHSIFLWYTATNKPRLDFPLTKRKGLAPQRCHRFQSSAYRSNQWRYRGRCDSIQFAVDRRVFIAGLGLYGSSSGKAEYSVKIELKRLGVVLAQNLTKFMSDGSSNTFPVWFEHPVQVEQDTFYTASAVLDGSELSYFGQEGMTEVQCGKVAFQFQCSSDSTNGTGVQGGQIPELIFYA

SEQ ID NO: 6790 - protein, 960 aa, Homo sapiens; identical to SEQ ID NO: 4904

SEQ ID NO: 6791 - protein, 222 aa, Homo sapiens
MERIEGASVGRCAASPYLRPLTLHYRQNGAQKSWDFMKTHDSVTVLLFNSSRRSLVLVKQFRPAVYAGEVERRFPGSLAAVDQDGPRELQPALPGSAGVTVELCAGLVDQPGLSLEEVACKEAWEECGYHLAPSDLRRVATYWSGVGLTGSRQTMFYTEVTDAQRSGPGGGLVEEGELIEVVHLPLEGAQAFADDPDIPKTLGVIFGVSWFLSQVAPNLDLQ

SEQ ID NO: 6792 - protein, 291 aa, Homo sapiens
MNMIWRNSISCLRLGKVPHRYQSGYHPVAPLGSRILTDPAKVFEHNMWDHMQWSKEEEAAARKKVKENSAVRVLLEEQVKYEREASKYWDTFYKIHKNKFFKDRNWLLREFPEILPVDQKPEEKARESSWDHVKTSATNRFSRMHCPTVPDEKNHYEKSSGSSEGQSKTESDFSNLDSEKHKKGPMETGLFPGSNATFRILEVGCGAGNSVFPILNTLENSPESFLYCCDFASGAVELVKSHSSYRATQCFAFVHDVCDDGLPYPFPDGILDVILLVFVLSSIHPDRTLFI

SEQ ID NO: 6793 - protein, 209 aa, Homo sapiens; identical to SEQ ID NO: 4887

SEQ ID NO: 6794 - protein, 167 aa, Homo sapiens
MPAYHSSLMDPDTKLIGNMALLPIRSQFKGPAPRETKDTDIVDEAIYYFKANVFFKNYEIKNEADRTLIYITLYISECLKKLQKCNSKSQGEKEMYTLGITNFPIPGEPGFPLNAIYAKPANKQEDEVMRAYLQQLRQETGLRLCEKVIKGDLKFSAALKLALNKNK

SEQ ID NO: 6795 - protein, 1356 aa, Homo sapiens; identical to SEQ ID NO: 6044

SEQ ID NO: 6796 - protein, 95 aa, Homo sapiens
MLKNKGHSSKKDNLAVNAVALQDHILHDLQLRNLSVADHSKTQVQKKENKSLKRDTKAIIDTGLKKTTQCPKLEDSEKEYVLDPKPPPLTLGYHS

SEQ ID NO: 6797 - protein, 235 aa, Homo sapiens
MLKNKGHSSKKDNLAVNAVALQDHILHDLQLRNLSVADHSKTQVQKKENKSLKRDTKAIIDTGLKKTTQCPKLEDSEKEYVLDPKPPPLTLAQKLGLIGPPPPPLSSDEWEKVKQRSLLQGDSVQPCPICKEEFELRPQVLLSCSHVFHKACLQAFEKFTNKKTCPLCRKNQYQTRVIHDGARLFRIKCVTRIQAYWRGCVVRKWYRNLRKTVPPTDAKLRKKFFEKKTQDWKPA

SEQ ID NO: 6798 - protein, 362 aa, Homo sapiens; identical to SEQ ID NO: 5396

SEQ ID NO: 6799 - protein, 425 aa, Homo sapiens; identical to SEQ ID NO: 4868

SEQ ID NO: 6800 - protein, 212 aa, Homo sapiens
MAPWGKRLAGVRGVLLDISGVLYDSGAGGGTAIAGSVEAVARLKRSRLKVRFCTNESQKSRAELVGQLQRLGFDISEQEVTAPAPAACQILKEQGLRPYLLIHDGVRSEFDQIDTSNPNCVVIADAGESFSYQNMNNAFQVLMELEKPVLISLGKGRYYKETSGLMLDVGPYMKALEYACGIKAEVVGKPSPEFFKSALQAIGVEAHQLLSV

SEQ ID NO: 6801 - protein, 955 aa, Homo sapiens
MEVGSEEEKWEKLDAEFDHFVVDMKPFVLKLPHRTERQRCALWIRKLCEPSGTGAGIMGRKNRNLYAKLLLHMLKRGALEGPFTHRPEPGTLKILPSYMSIYFDEPNPARAKGSSPEGLPAWVLGELETSEHKLNESWKLSSGEDNTLVQSPTDVYSREQYTGKLRVRSHSLSPTHREDGQNITPKICEVYSKKSPVSLDDSDIEARLNSWNLGIENPRYLRQKPIPVSLMTPKFSLRKSSSFHDDHFLSRIREKELDMKTKMMEAKFHEEKLKLQQKHDADVQKILERKNNEIEELKTLYRSKQHETEETIRKLEKKVQTLIRDCQVIRETKEDQIAELKKICEQSTESLNNDWEKKLHNAVAEMEQEKFDLQKQHTENIQELLEDTNVRLNKMESEYMAQTQSTNHMIKELEARVQQLTGEAENSNLQRQKLIQEKAELERCYQITCSELQEVKARRNTLHKEKDHLVNDYEQNMKLLQTKYDADINLLKQEHALSASKASSMIEELEQNVCQLKQQLQESELQRKQQLRDQENKFQMEKSHLKHIYEKKAHDLQSELDKGKEDTQKKIHKFEEALKEKEEQLTRVTEVQRLQAQQADAALEEFKRQVELNSEKVYAEMKEQMEKVEADLTRSKSLREKQSKEFLWQLEDIRQRYEQQIVELKLEHEQEKTHLLQQHNAEKDSLVRDHEREIENLEKQLRAANMEHENQIQEFKKRDAQVIADMEAQVHKLREELINVNSQRKQQLVELGLLREEEKQRATREHEIVVNKLKAESEKMKIELKKTHAAETEMTLEKANSKLKQIEKEYTQKLAKSSQIIAELQTTISSLKEENSQQQLAAERRLQDVRQKFEDEKKQLIRDNDQAIKVLQDELENRSNQVRCAEKKLQHKELESQEQITYIRQEYETKLKGLMPASLRQELEDTISSLKSQVNFLQKRASILQEELTTYQGRR

SEQ ID NO: 6802 - protein, 422 aa, Homo sapiens
MPRKGTQPSTARRREEGPPPPSPDGASSDAEPEPPSGRTESPATAAETASEELDNRSLEEILNSIPPPPPPAMTNEAGAPRLMITHIVNQNFKSYAGEKILGPFHKRFSCIIGPNGSGKSNVIDSMLFVFGYRAQKIRSKKLSVLIHNSDEHKDIQSCTVEVHFQKIIDKEGDDYEVIPNSNFYVSRTACRDNTSVYHISGKKKTFKDVGNLLRSHGIDLDHNRFLILQGEVEQIAMMKPKGQTEHDEGMLEYLEDIIGCGRLNEPIKVLCRRVEILNEHRGEKLNRVKMVEKEKDALEGEKNIAIEFLTLENEIFRKKNHVCQYYIYELQKRIAEMETQKEKIHEDTKEINEKSNILSNEMKAKNKDVKDTEKKLNKITKFIEENKEKFTQLDLEDVQVREKLKHATSKAKTGETTSKRKK

SEQ ID NO: 6803 - protein, 100 aa, Homo sapiens
MRKRLSAPELRLSLTKGPGNDGASPTQSAPSSPDGSSDLEIDELETPSDSEQLDSGHEFEWEDELPRAEGLGTSETAERLGRGCMWDVTGEDGHHWRVFR

SEQ ID NO: 6804 - protein, 352 aa, Homo sapiens
MGKVENSKSAQGLAGLRNLGNTCFMNSILQCLSNTRELRDYCLQRLYMRDLHHGSNAHTALVEEFAKLIQTIWTSSPNDVVSPSEFKTQIQRYAPRFVGYNQQDAQEFLRFLLDGLHNEVNRVTLRPKSNPENLDHLPDDEKGRQMWRKYLEREDSRIGDLFVGQLKSSLTCTDCGYCSTVFDPFWDLSLPIAKRGYPEVTLMDCMRLFTKEDVLDGDEKPTCCRCRGRKRCIKKFSIQRFPKILVLHLKRFSESRIRTSKLTTFVNFPLRDLDLREFASENTNHAVYNLYAVSNHSGTTMGGHYTAYCRSPGTGEWHTFNDSSVTPMSSSQVRTSDAYLLFYELASPPSRM

SEQ ID NO: 6805 - protein, 498 aa, Homo sapiens
MVIEEVNFMQNHLEIEKTCRESAEALATKLNKENKTLKRISMLYMAKLGPDVITEEINIDDEDSTTDTDGAAETCVSVQCQKQIKELRDQIVSVQEEKKILAIELENLKSKLVEVIEEVNKVKQEKTVLNSEVLEQRKVLEKCNRVSMLAVEEYEEMQVNLELEKDLRKKAESFAQEMFIEQNKLKRQSHLLLQSSIPDQQLLKALDENAKLTQQLEEERIQHQQKVKELEEQLENETLHKEIHNLKQQLELLEEDKKELELKYQNSEEKARNLKHSVDELQKRVNQSENSVPPPPPPPPPLPPPPPNPIRSLMSMIRKRSHPSGSGAKKEKATQPETTEEVTDLKRQAVEEMMDRIKKGVHLRPVNQTARPKTKPESSKGCESAVDELKGILGTLNKSTSSRSLKSLDPENSETELERILRRRKVTAEADSSSPTGILATSESKSMPVLGSVSSVTKTALNKKTLEAEFNSPSPPTPEPGEGPRKLEGCTSSKVTFQ

SEQ ID NO: 6806 - protein, 649 aa, Homo sapiens
MNSSDEEKQLQLITSLKEQAIGEYEDLRAENQKTKEKCDKIRQERDEAVKKLEEFQKISHMVIEEVNFMQNHLEIEKTCRESAEALATKLNKENKTLKRISMLYMAKLGPDVITEEINIDDEDSTTDTDGAAETCVSVQCQKQIKELRDQIVSVQEEKKILAIELENLKSKLVEVIEEVNKVKQEKTVLNSEVLEQRKVLEKCNRVSMLAVEEYEEMQVNLELEKDLRKKAESFAQEMFIEQNKLKRQSHLLLQSSIPDQQLLKALDENAKLTQQLEEERIQHQQKVKELEEQLENETLHKEIHNLKQQLELLEEDKKELELKYQNSEEKARNLKHSVDELQKRVNQSENSVPPPPPPPPPLPPPPPNPIRSLMSMIRKRSHPSGSGAKKEKATQPETTEEVTDLKRQAVEEMMDRIKKGVHLRPVNQTARPKTKPESSKGCESAVDELKGILGTLNKSTSSRSLKSLDPENSETELERILRRRKVTAEADSSSPTGILATSESKSMPVLGSVSSVTKTALNKKTLEAEFNSPSPPTPEPGEGPRKLEGCTSSKVTFQPPSSIGCRKKYIDGEKQAEPVVVLDPVSTHEPQTKDQVAEKDPTQHKEDEGEIQPENKEDSIENFFPFHFGFEGVLPLAGVTLSTKARDPK

SEQ ID NO: 6807 - protein, 278 aa, Homo sapiens; identical to SEQ ID NO: 5072

SEQ ID NO: 6808 - protein, 454 aa, Homo sapiens
MFTEGEEMYLQGSTVWHPDCKQSTKTEEKLRLPNIRRSSSDFFYSKSLIRRTGRSPSLQPTRTSSESIYSRPGSSIPGSPGHTIYAKVDNEILDYKDLAAIPKVKAIYDIERPDLITYEPFYTSGYDDKQERQSLGESAALSPTPSAEGYQDVRDRMIHRSTSQGSINSPVYSRHSYTPTTSRSPQHFHRPDQGINIYRKPPIYKQHAALAAQSKSSEDIIKFSKFPAAQAPDPSETPKIETDHWPGPPSFAVVGPDMKRRSSGREEDDEELLRRRQLQEEQLMKLNSGLGQLILKEEMEKESRERSSLLASRYDSPINSASHIPSSKTASLPGYGRNGLHRPVSTDFAQYNSYGDVSGGVRDYQTLPDGHMPAMRMDRGVSMPNMLEPKIFPYEMLMVTNRGRNKILREVDRTRLERHLAPEVFREIFGMSIQEFDRLPLWRRNDMKKKAKLF

SEQ ID NO: 6809 - protein, 651 aa, Homo sapiens
  VARIANT 1: note = X can be any amino acid
XSHAFISQWVCRHWRDPVAHPQDPHHPSEKPVIHCHKCGEPCKGEVLRVQTKHFHIKCFTCKVCGCDLAQGGFFIKNGEYLCTLDYHPNCFACTICKRPFPPGDRVTFNGRDCLCQLCAQPMSSSPKETTFSSNCAGCGRDIKNGQALLALDKQWHLGCFKCKSCGKVLTGEYISKDGAPYCEKDYQGLFGVKCEACHQFITGKVLEAGDKHYHPSCARCSRCNQMFTEGEEMYLQGSTVWHPDCKQSTKTEEKLRPTRTSSESIYSRPGSSIPGSPGHTIYAKVDNEILDYKDLAAIPKVKAIYDIERPDLITYEPFYTSGYDDKQERQSLGESAALSPTPSAEGYQDVRDRMIHRSTSQGSINSPVYSRHSYTPTTSRSPQHFHRPDQGINIYRKPPIYKQHAALAAQSKSSEDIIKFSKFPAAQAPDPSETPKIETDHWPGPPSFAVVGPDMKRRSSGREEDDEELLRRRQLQEEQLMKLNSGLGQLILKEEMEKESRERSSLLASRYDSPINSASHIPSSKTASLPGYGRNGLHRPVSTDFAQYNSYGDVSGGVRDYQTLPDGHMPAMRMDRGVSMPNMLEPKIFPYEMLMVTNRGRNKILREVDRTRLERHLAPEVFREIFGMSIQEFDRLPLWRRNDMKKKAKLF

SEQ ID NO: 6810 - protein, 278 aa, Homo sapiens
MTQQWREVNEDREAVAQARSWQSLNLGDRDMGVSFIETALALSAARARRPLLTSHPPSRPFQPPKHTPSPPPAPRVNSRHPGRSVSLSLPSASQAPPVPLASPEGRPHTVGAPHASTWKRTRGRQRARPPKIVKEAEVPQAALGVPAQGTGDNGHTPVEEEVGGIPVPAPGLLQVTERRQPLSSVSSLEVHFDLLDLTELTDMSDQELAEVFADSDDENLNTESPAGLHPLPRAGYLRSPSWTRTRAEQSHEKQPLGDPERQATVLDTFLTVERPQED

SEQ ID NO: 6811 - protein, 179 aa, Homo sapiens
MTDLVAVWDVALSDGVHKIEFEHGTTSGKRVVYVDGKEEIRKEWMFKLVGKETFYVGAAKTKATINIDAISGFAYEYTLEINGKSLKKYMEDRSKTTNTWVLHMDGENFRIVLEKDAMDVWCNGKKLETAGEFVDDGTETHFSIGNHDCYIKAVSSGKRKEGIIHTLIVDNREIPEIAS

SEQ ID NO: 6812 - protein, 179 aa, Homo sapiens; identical to SEQ ID NO: 6811

SEQ ID NO: 6813 - protein, 350 aa, Homo sapiens
MGPCNLSSAAGPTAEKSVPYQRTLKEGQGTSVVAQGPSRPLPSTANVVVIGGGSLGCQTLYHLAKLGMSGAVLLERERLTSGTTWHTAGLLWQLRPSDVEVELLAHTRRVVSRELEEETGLHTGWIQNGGLFIASNRQRLDEYKRLMSLGKAYGVESHVLSPAETKTLYPLMNVDDLYGTLYVPHDGTMDPAGTCTTLARAASARGAQVIENCPVTGIRVWTDDFGVRRVAGVETQHGSIQTPCVVNCAGVWASAVGRMAGVKVPLVAMHHAYVVTERIEGIQNMPNVRDHDASVYLRLQGDALSVGGYEANPIFWEEAVKYRPRAAGGLCLKTSTEKVCAVWSDDLRRA

SEQ ID NO: 6814 - protein, 666 aa, Homo sapiens
MARAGSCGGAAAGAGRPEPWELSLEEVLKAYEQPLNEEQAWAVCFQGCRGLRGSPGRRLRDTGDLLLRGDGSVGAREPEAAEPATMVVPLASSEAQTVQSLGFAIYRALDWGLDESEERELSPQLERLIDLMANNDSEDSGCGAADEGYGGPEEEEEAEGVPRSVRTFAQAMRLCAARLTDPRGAQAHYQAVCRALFVETLELRAFLARVREAKEMLQKLREDEPHLETPRAELDSLGHTDWARLWVQLMRELRRGVKLKKVQEQEFNPLPTEFQLTPFEMLMQDIRARNYKLRKVMVDGDIPPRVKKDAHELILDFIRSRPPLKQVSERRLRPLPPKQRSLHEKILEEIKQERRLRPVRGEGWAARGFGSLPCILNACSGDAKSTSCINLSVTDAGGSAQRPRPRVLLKAPTLAEMEEMNTSEEEESPCGEVTLKRDRSFSEHDLAQLRSEVASGLQSATHPPGGTEPPRPRAGSAHVWRPGSRDQGTCPASVSDPSHPLLSNRGSSGDRPEASMTPDAKHLWLEFSHPVESLALTVEEVMDVRRVLVKAEMEKFLQNKELFSSLKKGKICCCCRAKFPLFSWPPSCLFCKRSLQGPQWQSVEEAFPHIYSHGCVLKDVCSECTSFVADVVRSSRKSVDVLNTTPRRSRQTQSLYIPNTRTLDFK

SEQ ID NO: 6815 - protein, 157 aa, Homo sapiens
METLQSETKTRVLPSWLTAQVATKNVAPMKAPKRMRMAAVPVAAARLPATRTVYCMNEAEIVDVALGILIESRKQEKACEQPALAGADNPEHSPPCSVSPHTSSGSSSEEEDSGKQALAPGLSPSQRPGGSSSACSRSPEEEEEEDVLKYVREIFFS

SEQ ID NO: 6816 - protein, 267 aa, Homo sapiens
MANCERTFIAIKPDGVQRGLVGEIIKRFEQKGFRLVGLKFMQASEDLLKEHYVDLKDRPFFAGLVKYMHSGPVVAMVWEGLNVVKTGRVMLGETNPADSKPGTIRGDFCIQVGRTMANLERTFIAIKPDGVQRGLVGEIIKRFEQKGFRLVAMKFLRASEEHLKQHYIDLKDRPFFPGLVKYMNSGPVVAMVWEGLNVVKTGRVMLGETNPADSKPGTIRGDFCIQVGRNIIHGSDSVKSAEKEISLWFKPEELVDYKSCAHDWVYE

SEQ ID NO: 6817 - protein, 292 aa, Homo sapiens
MVLLSTLGIVFQGEGPPISSCDTGTMANCERTFIAIKPDGVQRGLVGEIIKRFEQKGFRLVGLKFMQASEDLLKEHYVDLKDRPFFAGLVKYMHSGPVVAMVWEGLNVVKTGRVMLGETNPADSKPGTIRGDFCIQVGRTMANLERTFIAIKPDGVQRGLVGEIIKRFEQKGFRLVAMKFLRASEEHLKQHYIDLKDRPFFPGLVKYMNSGPVVAMVWEGLNVVKTGRVMLGETNPADSKPGTIRGDFCIQVGRNIIHGSDSVKSAEKEISLWFKPEELVDYKSCAHDWVYE

SEQ ID NO: 6818 - protein, 163 aa, Homo sapiens
MKSSQTFEEQTECIVNTLLMDFLSPTLQVASRNLCCVDEVDSGEPCSFDVAIIAGRLRMLGDQFNGELEASAKNVIAETIKGQTGAILQDTVESLSKTWCAQDSSLAYERAFLAVSVKLLEYMAHIAPEVVGQVAIPMTGMINGNQAIREFIQGQGGWENLES

SEQ ID NO: 6819 - protein, 185 aa, Homo sapiens; identical to SEQ ID NO: 4734

SEQ ID NO: 6820 - protein, 449 aa, Homo sapiens; identical to SEQ ID NO: 5907

SEQ ID NO: 6821 - protein, 246 aa, Homo sapiens
MSGAGEALAPGPVGPQRVAEAGGGQLGSTAQGKCDKDNTEKDITQATNSHFTHGEMQDQSIWGNPSDGELIRTQPQRLPQLQTSAQVPSGEEIGKIKNGHTGLSNGNGIHHGAKHGSADNRKLSAPVSQKMHRKIQSSLSVNSDISKKSKVNAVFSQKTGSSPEDCCVHCILACLFCEFLTLCNIVLGQASCGICTSEACCCCCGDEMGDDCNCPCDMDCGIMDACCESSDCLEICMECCGICFPS

SEQ ID NO: 6822 - protein, 9 aa, Homo sapiens
MSYYQRPFS

SEQ ID NO: 6823 - protein, 666 aa, Homo sapiens
MNTGRDSQSPDSAKGFRSVRPNLQDKRSPTQSQITVNGNSGGAVSPMSYYQRPFSPSAYSLPASLNSSIVMQHGTSLDSTDTYPQHAQSLDGTTSSSIPLYRSSEEEKRVTVIKAPHYPGIGPVDESGIPTAIRTTVDRPKDWYKTMFKQIHMVHKPDDDTDMYNTPYTYNAGLYNPPYSAQSHPAAKTQTYRPLSKSHSDNSPNAFKDASSPVPPPHVPPPVPPLRPRDRSSTEKHDWDPPDRKVDTRKFRSEPRSIFEYEPGKSSILQHERPTDRINPDDIDLENEPWYKFFSELEFGRPPPKKPLDYVQDHSSGVFNEASLYQSSIDRSLERPMSSASMASDFRKRRKSEPAVGPPRGLGDQSASRTSPGRVDLPGSSTTLTKSFTSSSPSSPSRAKDRESPRSYSSTLTDMGRSAPRERRGTPEKEKLPAKAVYDFKAQTSKELSFKKGDTVYILRKIDQNWYEGEHHGRVGIFPISYVEKLTPPEKAQPARPPPPAQPGEIGEAIAKYNFNADTNVELSLRKGDRVILLKRVDQNWYEGKIPGTNRQGIFPVSYVEVVKKNTKGAEDYPDPPIPHSYSSDRIHSLSSNKPQRPVFTHENIQGGGEPFQALYNYTPRNEDELELRESDVIDVMEKCDDGWFVGTSRRTKFFGTFPGNYVKRL

SEQ ID NO: 6824 - protein, 823 aa, Homo sapiens
MTLLSSQSSSLVAPSGSVSAENPEQRMLEKRAKVIEELLQTERDYIRDLEMCIERIMVPMQQAQVPNIDFEGLFGNMQMVIKVSKQLLAALEISDAVGPVFLGHRDELEGTYKIYCQNHDEAIALLEIYEKDEKIQKHLQDSLADLNSLVLKKGCTNYINLGSFLIKPVQRVMRYPLLLMELLNSTPESHPDKVPLTNAVLAVKEINVNINEYKRRKDLVLKYRKGDEDSLMEKISKLNIHSIIKKSNRVSSHLKHLTGFAPQIKDEVFEETEKNFRMQERLIKSFIRDLSLYLQHIRESACVKVVAAVSMWDVCMERGHRDLEQFERVHRYISDQLFTNFKERTERLVISPLNQLLSMFTGPHKLVQKRFDKLLDFYNCTERAEKLKDKKTLEELQSARNNYEALNAQLLDELPKFHQYAQGLFTNCVHGYAEAHCDFVHQALEQLKPLLSLLKVAGREGNLIAIFHEEHSRVLQQLQVFTFFPESLPATKKPFERKTIDRQSARKPLLGLPSYMLQSEELRASLLARYPPEKLFQAERNFNAAQDLDVSLLEGDLVGVIKKKDPMGSQNRWLIDNGVTKGFVYSSFLKPYNPRRSHSDASVGSHSSTESEHGSSSPRFPRQNSGSTLTFNPSSMAVSFTSGSCQKQPQDASPPPKECDQGTLSASLNPSNSESSPSRCPSDPDSTSQPRSGDSADVARDVKQPTATPRSYRNFRHPEIVGYSVPGRNGQSQDLVKGCARTAQAPEDRSTEPDGSEAEGNQVYFAVYTFKARNPNELSVSANQKLKILEFKDVTGNTEWWLAEVNGKKGYVPSNYIRKTEYT

SEQ ID NO: 6825 - protein, 987 aa, Homo sapiens
MAESSSESDHFRCRDRLSPWAARSTHRGTRSLPTVEVTEKVNTITSTLQDTSRNLRQVDQMLGRYREYSNGQAGAIEHLKESLEQSIDQLRSQRLLRNSGGRSISVTSLSASDLDGGTGSELHHFPPTSPLKDYGDPQGIKRMRSRTGVRFVQETDDMTQLHGFHQSLRDLSSEQIRLGDDFNRELSRRSRSDAETKRALEELTEKLNEAQKQEVVSDRVERRLQELEREMRTERELVERRQDQLGLMSLQLQEALKKQEAKADEHEGAIKNKLRQTETEKNQLEQELELSRRLLNQSEGSRETLLHQVEELRTQLTKAEGDRKGLQHQVSQISKQQSNYQDEQGEDWRFRRGVEREKQDLEKQMSDLRVQLNFSAMASELEEVKRCMERKDKEKAHLASQVENLTRELENGEKQQLQMLDRLKEIQNHFDTCEAERKHADLQISELTRHAEDATKQAERYLSELQQSEALKEEAEKRREDLKLKAQESIRQWKLKHKKLERALEKQSETVDELTGKNNQILKEKDELKTQLYAALQQIENLRKELNDVLTKRALQEEELHSKEEKLRDIKSHQADLELEVKNSLDTIHRLESELKKQSKIQSQMKVEKAHLEEEIAELKKSQAQDKAKLLEMQESIKDLSAIRADLANKLAEEERAKKAVLKDLSDLTAQAKSRDEETATIITQLKLERDVHQRELKDLTSSLQSVKTKHEQNIQELMKHFKKEKSEAENHIRTLKAESLEEKNMAKIHRGQLEKLKSQCDRLTEELTQNENENKKLKLKYQCLKDQLEEREKHISIEEEHLRRMEEARLQLKDQLLCLETEQESILGVIGKEIDAACKTFSKDSVEKLKVFSSGPDIHYDPHRWLAESKTKLQWLCEELKERENREKNLRHQLMLCRQQLRNLTENKESELQCLFQQIERQEQLLDEIHREKRDLLEETQRKDEEMGSLQDRVIALETSTQVALDHLESVPEKLSLLEDFKDFRR

SEQ ID NO: 6826 - protein, 1718 aa, Homo sapiens
MSGTSSPEAVKKLLENMQSDLRALSLECKKKFPPVKEAAESGIIKVKTIAARNTEILAALKENSSEVVQPFLMGCGTKEPKITQLCLAAIQRLMSHEVVSETAAGNIINMLWQLMENSLEELKLLQTVLVLLTTNTVVHDEALSKAIVLCFRLHFTKDNITNNTAAATVRQVVTVVFERMVAEDERHRDIIEQPVLVQGNSNRRSVSTLKPCAKDAYMLFQDLCQLVNADAPYWLVGMTEMTRTFGLELLESVLNDFPQVFLQHQEFSFLLKERVCPLVIKLFSPNIKFRQGSSTSSSPAPVEKPYFPICMRLLRVVSVLIKQFYSLLVTECEIFLSLLVKFLDADKPQWLRAVAVESIHRFCVQPQLLRSFCQSYDMKQHSTKVFRDIVNALGSFIQSLFLVPPTGNPATSNQAGNNNLGGSVSAPANSGMVGIGGGVTLLPAFEYRGTWIPILTITVQGSAKATYLEMLDKVEPPTIPEGYAMSVAFHCLLDLVRGITSMIEGELGELETECQTTTEEGSSPTQSTEQQDLQSTSDQMDKEIVSRAVWEEMVNACWCGLLAALSLLLDASTDEAATENILKAELTMAALCGRLGLVTSRDAFITAICKGSLPPHYALTVLNTTTAATLSNKSYSVQGQSVMMISPSSESHQQVVAVGQPLAVQPQGTVMLTSKNIQCMRTLLNLAHCHGAVLGTSWQLVLATLQHLVWILGLKPSSGGALKPGRAVEGPSTVLTTAVMTDLPVISNILSRLFESSQYLDDVSLHHLINALCSLSLEAMDMAYGNNKEPSLFAVAKLLETGLVNMHRIEILWRPLTGHLLEKVCQHPNSRMREWGAEALTSLIKAGLTFNHDPPLSQNQRLQLLLLNPLKEMSNINHPDIRLKQLECVLQILQSQGDSLGPGWPLVLGVMGAIRNDQGESLIRTAFQCLQLVVTDFLPTMPCTCLQIVVDVAGSFGLHNQELNISLTSIGLLWNISDYFFQRGETIEKELNKEEAAQQKQAEEKGVVLNRPFHPAPPFDCLWLCLYAKLGELCVDPRPAVRKSAGQTLFSTIGAHGTLLQHSTWHTVIWKVLFHLLDRVRESSTTADKEKIESGGGNILIHHSRDTAEKQWAETWVLTLAGVARIFNTRRYLLQPLGDFSRAWDVLLDHIQSAALSKNNEVSLAALKSFQEILQIVSPVRDSDKPETPPVVNVPVPVLIGPISGMSRPFVRTDSIGEKLGRYSSSEPPIVTDELEDLNLWWAAWNTWYRIGSESTKPPITFDKLTFIPSQPFLTALIQIFPALYQHIKTGFNMDDLQKLGVILHSAISVPISSDASPFILPSYTEAVLTSLQEAVLTALDVLQKAICVGPENMQIMYPAIFDQLLAFVEFSCKPPQYGQLETKHIANAKYNQIQLFAPAEWVALNYVPFAERSLEVVVDLYQKTACHKAVVNEKVLQNIIKTLRVPLSLKYSCPSESTWKLAVSSLLRVLSIGLPVARQHASSGKFDSMWPELANTFEDFLFTKSIPPDNLSIQEFQRNENIDVEVVQLISNEILPYANFIPKEFVGQIMTMLNKGSIHSQSSSFTEAEIDIRLREEFSKMCFETLLQFSFSNKVTTPQEGYISRMALSVLLKRSQDVLHRYIEDERLSGKCPLPRQQVTEIIFVLKAVSTLIDSLKKTQPENVDGNTWAQVIALYPTLVECITCSSSEVCSALKEALVPFKDFMQPPASRVQNGES

SEQ ID NO: 6827 - protein, 699 aa, Homo sapiens
MSSRKVLAIQARKRRPKREKHPKKPEPQQKAPLVPPPPPPPPPPPPPLPDPTPPEPEEEILGSDDEEQEDPADYCKGGYHPVKIGDLFNGRYHVIRKLGWGHFSTVWLCWDMQGKRFVAMKVVKSAQHYTETALDEIKLLKCVRESDPSDPNKDMVVQLIDDFKISGMNGIHVCMVFEVLGHHLLKWIIKSNYQGLPVRCVKSIIRQVLQGLDYLHSKCKIIHTDIKPENILMCVDDAYVRRMAAEATEWQKAGAPPPSGSAVSTAPQQKPIGKISKNKKKKLKKKQKRQAELLEKRLQEIEELEREAERKIIEENITSAAPSNDQDGEYCPEVKLKTTGLEEAAEAETAKDNGEAEDQEEKEDAEKENIEKDEDDVDQELANIDPTWIESPKTNGHIENGPFSLEQQLDDEDDDEEDCPNPEEYNLDEPNAESDYTYSSSYEQFNGELPNGRHKIPESQFPEFSTSLFSGSLEPVACGSVLSEGSPLTEQEESSPSHDRSRTVSASSTGDLPKAKTRAADLLVNPLDPRNADKIRVKIADLGNACWVHKHFTEDIQTRQYRSIEVLIGAGYSTPADIWSTACMAFELATGDYLFEPHSGEDYSRDEDHIAHIIELLGSIPRHFALSGKYSREFFNRRGELRHITKLKPWSLFDVLVEKYGWPHEDAAQFTDFLIPMLEMVPEKRASAGECLRHPWLNS

SEQ ID NO: 6828 - protein, 370 aa, Homo sapiens
MGFNRPSKIQENALPLMLAEPPQNLIAQSQSGTGKTAAFVLAMLSQVEPANKYPQCLCLSPTYELALQTGKVIEQMGKFYPELKLAYAVRGNKLERGQKISEQIVIGTPGTVLDWCSKLKFIDPKKIKVFVLDEADVMIATQGHQDQSIRIQRMLPRNCQMLLFSATFEDSVWKFAQKVVPDPNVIKLKREEETLDTIKQYYVLCSSRDEKFQALCNLYGAITIAQAMIFCHTRKTASWLAAELSKEGHQVALLSGEMMVEQRAAVIERFREGKEKVLVTTNVCARGIDVEQVSVVINFDLPVDKDGNPDNETYLHRIGRTGRFGKRGLAVNMVDSKHSMNILNRIQEHFNKKIERLDTDDLDEIEKIAN

SEQ ID NO: 6829 - protein, 879 aa, Homo sapiens
MFWKFDLHSSSHIDTLLEREDVTLKELMDEEDVLQECKAQNRKLIEFLLKAECLEDLVSFIIEEPPQDMDEKIRYKYPNISCELLTSDVSQMNDRLGEDESLLMKLYSFLLNDSPLNPLLASFFSKVLSILISRKPEQIVDFLKKKHDFVDLIIKHIGTSAIMDLLLRLLTCIEPPQPRQDVLNWLNEEKIIQRLVEIVHPSQEEDRHSNASQSLCEIVRLSRDQMLQIQNSTEPDPLLATLEKQEIIEQLLSNIFHKEKNESAIVSAIQILLTLLETRRPTFEGHIEICPPGMSHSACSVNKSVLEAIRGRLGSFHELLLEPPKKSVMKTTWGVLDPPVGNTRLNVIRLISSLLQTNTSSINGDLMELNSIGVILNMFFKYTWNNFLHTQVEICIALILASPFENTENATITDQDSTGDNLLLKHLFQKCQLIERILEAWEMNEKKQAEGGRRHGYMGHLTRIANCIVHSTDKGPNSALVQQLIKDLPDEVRERWETFCTSSLGETNKRNTVDLVTTCHIHSSSDDEIDFKETGFSQDSSLQQAFSDYQMQQMTSNFIDQFGFNDEKFADQDDIGNVSFDRVSDINFTLNTNESGNIALFEACCKERIQQFDDGGSDEEDIWEEKHIAFTPESQRRSSSGSTDSEESTDSEEEDGAKQDLFEPSSANTEDKMEVDLSEPPNWSANFDVPMETTHGAPLDSVGSDVWSTEEPMPTKETGWASFSEFTSSLSTKDSLRSNSPVEMETSTEPMDPLTPSAAALAVQPEAAGSVAMEASSDGEEDAESTDKVTETVMNGGMKETLSLTVDAKTETAVFKRLLGGCSEEGKLSTSQDAACKDAEECPETAEAKCAAPRPPSSSPEQRTGQPSAPGDTSVNGPV

SEQ ID NO: 6830 - protein, 873 aa, Homo sapiens
MFWKFDLHSSSHIDTLLEREDVTLKELMDEEDVLQECKAQNRKLIEFLLKAECLEDLVSFIIEEPPQDMDEKIRYKYPNISCELLTSDVSQMNDRLGEDESLLMKLYSFLLNDSPLNPLLASFFSKVLSILISRKPEQIVDFLKKKHDFVDLIIKHIGTSAIMDLLLRLLTCIEPPQPRQDVLNWLNEEKIIQRLVEIVHPSQEEDRHSNASQSLCEIVRLSRDQMLQIQNSTEPDPLLATLEKQEIIEQLLSNIFHKEKNESAIVSAIQILLTLLETRRPTFEGHIEICPPGMSHSACSVNKSVLEAIRGRLGSFHELLLEPPKKSVMKTTWGVLDPPVGNTRLNVIRLISSLLQTNTSSINGDLMELNSIGVILNMFFKYTWNNFLHTQVEICIALILASPFENTENATITDQDSTGDNLLLKHLFQKCQLIERILEAWEMNEKKQAEGGRRHGYMGHLTRIANCIVHSTDKGPNSALVQQLIKDLPDEVRERWETFCTSSLGETNKRNTVDLVTTCHIHSSSDDEIDFKETGFSQDSSLQQAFSDYQMQQMTSNFIDQFGFNDEKFADQDDIGNVSFDRVSDINFTLNTNESGNIALFEACCKERIQQFDDGGSDEEDIWEEKHIAFTPESQRRSSSGSTDSEESTDSEEEDGAKQDLFEPSSANTEDKMEVDLSEPPNWSANFDVPMETTHGAPLDSVGSDVWSTEEPMPTKETGWASFSEFTSSLSTKDSLRSNSPVEMETSTEPMDPLTPSAAALAVQPEAAGSVAMEASSDGEEDAESTDKVTETVMNGGMKETLSLTVDAKTETAVFKSEEGKLSTSQDAACKDAEECPETAEAKCAAPRPPSSSPEQRTGQPSAPGDTSVNGPV

SEQ ID NO: 6831 - protein, 879 aa, Homo sapiens
MFWKFDLHSSSHIDTLLEREDVTLKELMDEEDVLQECKAQNRKLIEFLLKAECLEDLVSFIIEEPPQDMDEKIRYKYPNISCELLTSDVSQMNDRLGEDESLLMKLYSFLLNDSPLNPLLASFFSKVLSILISRKPEQIVDFLKKKHDFVDLIIKHIGTSAIMDLLLRLLTCIEPPQPRQDVLNWLNEEKIIQRLVEIVHPSQEEDRHSNASQSLCEIVRLSRDQMLQIQNSTEPDPLLATLEKQEIIEQLLSNIFHKEKNESAIVSAIQILLTLLETRRPTFEGHIEICPPGMSHSACSVNKSVLEAIRGRLGSFHELLLEPPKKSVMKTTWGVLDPPVGNTRLNVIRLISSLLQTNTSSINGDLMELNSIGVILNMFFKYTWNNFLHTQVEICIALILASPFENTENATITDQDSTGDNLLLKHLFQKCQLIERILEAWEMNEKKQAEGGRRHGYMGHLTRIANCIVHSTDKGPNSALVQQLIKDLPDEVRERWETFCTSSLGETNKRNTVDLVTTCHIHSSSDDEIDFKETGFSQDSSLQQAFSDYQMQQMTSNFIDQFGFNDEKFADQDDIGNVSFDRVSDINFTLNTNESGNIALFEACCKERIQQFDDGGSDEEDIWEEKHIAFTPESQRRSSSGSTDSEESTDSEEEDGAKQDLFEPSSANTEDKMEVDLSEPPNWSANFDVPMETTHGAPLDSVGSDVWSTEEPMPTKETGWASFSEFTSSLSTKDSLRSNSPVEMETSTEPMDPLTPSAAALAVQPEAAGSVAMEASSDGEEDAESTDKVTETVMNGGMKETLSLTVDAKTETAVFKRVLKSYREEGKLSTSQDAACKDAEECPETAEAKCAAPRPPSSSPEQRTGQPSAPGDTSVNGPV

SEQ ID NO: 6832 - protein, 377 aa, Homo sapiens
MSDEVFSTTLAYTKSPKVTKRTTFQDELIRAITARSARQRSSEYSDDFDSDEIVSLGDFSDTSADENSVNKKMNDFHISDDEEKNPSKLLFLKTNKSNGNITKDEPVCAIKNEEEMAPDGCEDIVVKSFSESQNKDEEFEKDKIKMKPKPRILSIKSTSSAENNSLDTDDHFKPSPRPRSMLKKKSHMEEKDGLEDKETALSEELELHSAPSSLPTPNGIQLEAEKKAFSENLDPEDSCLTSLASSSLKQILGDSFSPGSEGNASGKDPNEEITENHNSLKSDENKENSFSADHVTTAVEKSKESQVTADDLEEEKAKAELIMDDDRTVDPLLSKSQSILISTSATASSKKTIEDRNIKNKKSTNNRASSASASKAS

SEQ ID NO: 6833 - protein, 191 aa, Homo sapiens; identical to SEQ ID NO: 5282

SEQ ID NO: 6834 - protein, 191 aa, Homo sapiens; identical to SEQ ID NO: 5282

SEQ ID NO: 6835 - protein, 189 aa, Homo sapiens
MGKSCKVVVCGQASVGKTSILEQLLYGNHVVAMIETQEDIYVGSIETDRGVREQVRFYDTRGLRDGAELPRHCFSCTDGYVLVYSTDSRESFQRVELLKKEIDKSKDKKEVTIVVLGNKCDLQEQRRVDPDVAQHWAKSEKVKLWEVSVADRRSLLEPFVYLASKMTQPQSKSAFPLSRKNKGSGSLDG

SEQ ID NO: 6836 - protein, 191 aa, Homo sapiens; identical to SEQ ID NO: 5282

SEQ ID NO: 6837 - protein, 334 aa, Homo sapiens
MAEEVRREEASGVGRARTPTPGALRAPQLVTEAPPLHPGHTLMKATVLMRQPGRVQEIVGALRKGGGDRLQVISDFDMTLSRFAYNGKRCPSSYNILDNSKIISEECRKELTALLHHYYPIEIDPHRTVKEKLPHMVEWWTKAHNLLCQQKIQKFQIAQVVRESNAMLREGYKTFFNTLYHNNIPLFIFSAGIGDILEEIIRQMKVFHPNIHIVSNYMDFNEDGFLQGFKGQLIHTYNKNSSACENSGYFQQLEGKTNVILLGDSIGDLTMADGVPGVQNILKIGFLNDKVEERRERYMDSYDIVLEKDETLDVVNGLLQHILCQGVQLEMQGP

SEQ ID NO: 6838 - protein, 176 aa, Homo sapiens; identical to SEQ ID NO: 5124

SEQ ID NO: 6839 - protein, 303 aa, Homo sapiens
MDSLPDEFFVRHPAVEDQRKEETENKLEKSSGQLNKQENDIPTDLVPVNLLLEVKKLLNAINTLPKGVVPHIKKFLQEDFSFQTMQREVAANSQNGEEIVPALTLRFLITQLEAALRNIQAGNYTAHQINIGYYLTLLFLYGVALTERGKKEDYTEAENKFLVMKMMIQENEICENFMSLVYFGRGLLRCAQKRYNGGLLEFHKSLQEIGDKNDHWFDIDPTEDEDLPTTFKDLLNNFIKTTESNIMKQTICSYLDCERSCEADILKNTSYKGFFQLMCSKSCCVYFHKICWKKFKNLKYPGF

SEQ ID NO: 6840 - protein, 622 aa, Homo sapiens
MDLLTRENVALKVESAQQPKQVLKMEVAVLKKLQGKDHVCRFIGCGRNEKFNYVVMQLQGRNLADLRRSQPRGTFTLSTTLRLGKQILESIEAIHSVGFLHRDIKPSNFAMGRLPSTYRKCYMLDFGLARQYTNTTGDVRPPRNVAGFRGTVRYASVNAHKNREMGRHDDLWSLFYMLVEFAVGQLPWRKIKDKEQVGMIKEKYEHRMLLKHMPSEFHLFLDHIASLDYFTKPDYQLIMSVFENSMKERGIAENEAFDWEKAGTDALLSTSTSTPPQQNTRQTAAMFGVVNVTPVPGDLLRENTEDVLQGEHLSDQENAPPILPGRPSEGLGPSPHLVPHPGGPEAEVWEETDVNRNKLRINIGKSPCVEEEQSRGMGVPSSPVRAPPDSPTTPVRSLRYRRVNSPESERLSTADGRVELPERRSRMDLPGSPSRQACSSQPAQMLSVDTGHADRQASGRMDVSASVEQEALSNAFRSVPLAEEEDFDSKEWVIIDKETELKDFPPGAEPSTSGTTDEEPEELRPLPEEGEERRRLGAEPPFPLTPALGTPPSTERVGPHRPTETVGGGQTLGALPPAVQPPATTGVLRVLLLHAGDGALPSPRRRRLLGLLRFPHSAQPLG

SEQ ID NO: 6841 - protein, 148 aa, Homo sapiens
MAAAMVPGRSESWERGEPGRPALYFCGSIRGGREDRTLYERIVSRLRRFGTVLTEHVAAAELGARGEEAAGGDRLIHEQDLEWLQQADVVVAEVTQPSLGVGYELGRAVAFNKRILCLFRPQSGRGEHPKPPSWLSMDPALSSFPGGL

SEQ ID NO: 6842 - protein, 201 aa, Homo sapiens
MVNSCCGSVCSDQGCGLENCCRPSCCQTTCCRTTCCRPSCCVSSCCRPQCCQSVCCQPTCCRPSCCQTTCCRTTCCRPSCCVSSCCRPQCCQSVCCQPTCCRPSCCQTTCCRTTCCRPSCCVSSCCRPQCCQSVCCQPTCCRPSCCISSSCCPSCCESSCCRPCCCLRPVCGRVSCHTTCYRPTCVISTCPRPLCCASSCC

SEQ ID NO: 6843 - protein, 128 aa, Homo sapiens; identical to SEQ ID NO: 6742

SEQ ID NO: 6844 - protein, 379 aa, Homo sapiens
MSLRLSSASRRSCPRPTTGSLRLYGGGTSFGTGNSCGISGIGSGFSSAFGGSSSGGNTGGGNPCAGFTVNERGLLSGNEKVTMQNLNDRLASYLDSVHALEEANADLEQKIKGWYEKFGPGSCRGLDHDYSRYFPIIDDLKNQIIASTTSNANAVLQIDNARLTADDFRLKYENELALHQSVEADVNGLRRVLDEITLCRTDLEIQYETLSEEMTYLKKNHKEEMQVLQCAAGGNVNVEIELQSLLATKHSLECSLTETESNYCAQLAQIQAQIGALEEQLHQVRTETEGQKLEYEQLLDIKLHLEKEIETYCLLIGGDDGACKSGGYKSKDYGSGNVGSQVKDPAKAIVVKKVLEEVDQRSKILTTRLHSLEEKSQSN

SEQ ID NO: 6845 - protein, 255 aa, Homo sapiens
MDKDEEALKAAQAELKEARRQWHHLQVEIESLHAVERGLENSLHASEQHYQMQLQDLETVIEGLEKELQEVRRGIEKQLQEHEMLLNTKMRLEQEIATYRHLLEKEEIRYYGCIQGGKKDKKPTTSRVGFVLPSAIINEISFTTKVPQKYENENVETVTKQAILNGSIVKESTEAHGTIQTEKVDEVIKEWEGSFFKDNPRLRKKSVSLRFDLHLAATDEGCLETKQDNLPDIEVRLIMRRSCSIPSIKPPSTAN

SEQ ID NO: 6846 - protein, 295 aa, Homo sapiens
MELSQLLNEIRANYEKILTRNQIETVLSTRIQLEEDISKKMDKDEEALKAAQAELKEARRQWHHLQVEIESLHAVERGLENSLHASEQHYQMQLQDLETVIEGLEKELQEVRRGIEKQLQEHEMLLNTKMRLEQEIATYRHLLEKEEIRYYGCIQGGKKDKKPTTSRVGFVLPSAIINEISFTTKVPQKYENENVETVTKQAILNGSIVKESTEAHGTIQTEKVDEVIKEWEGSFFKDNPRLRKKSVSLRFDLHLAATDEGCLETKQDNLPDIEVRLIMRRSCSIPSIKPPSTAN

SEQ ID NO: 6847 - protein, 619 aa, Homo sapiens; identical to SEQ ID NO: 5804

SEQ ID NO: 6848 - protein, 619 aa, Homo sapiens; identical to SEQ ID NO: 5804

SEQ ID NO: 6849 - protein, 389 aa, Homo sapiens [sequence omitted]

SEQ ID NO: 6850 - protein, 182 aa, Homo sapiens
MPIPPPPPPPPGPPPPPTFHQANTEQPKLSRDEQRGRGALLQDICKGTKLKKVTNINDRSAPILETPPPPPPVIRNGARDAPPPPPPYRMHGSEPPSRGKPPPPPSRTPAGPPPPPPPPLRNGHRDSITTVRSFLDDFESKYSFHPVEDFPAPEEYKHFQRIYPSKTNRAARGAPPLPPILR

SEQ ID NO: 6851 - protein, 276 aa, Homo sapiens
MTSFRLALIQLQISSIKSDNVTRACSFIREAATQGAKIVSLPECFNSPYGAKYFPEYAEKIPGESTQKLSEVAKECSIYLIGGSIPEEDAGKLYNTCAVFGPDGTLLAKYRKIHLFDIDVPGKITFQESKTLSPGDSFSTFDTPYCRVGLGICYDMRFAELAQIYAQRGCQLLVYPGAFNLTTGPAHWELLQRSRAVDNQVYVATASPARDDKASYVAWGHSTVVNPWGEVLAKAGTEEAIVYSDIDLKKLAEIRQQIPVFRQKRSDLYAVEMKKP

SEQ ID NO: 6852 - protein, 491 aa, Homo sapiens; identical to SEQ ID NO: 4824

SEQ ID NO: 6853 - protein, 362 aa, Homo sapiens
MAHSSFFPDEYFTCSSLCLSCGVGCKKSMNHGKEGVPHEAKSRCRYSHQYDNRVYTCKACYERGEEVSVVPKTSASTDSPWMGLAKYAWSGYVIECPNCGVVYRSRQYWFGNQDPVDTVVRTEIVHVWPGTDGFLKDNNNAAQRLLDGMNFMAQSVSELSLGPTKAVTSWLTDQIAPAYWRPNSQILSCNKCATSFKDNDTKHHCRACGEGFCDSCSSKTRPVPERGWGPAPVRVCDNCYEARNVQLAVTEAQVDDEGGTLIARKVGEAVQNTLGAVVTAIDIPLGLVKDAARPAYWVPDHEILHCHNCRKEFSIKLSKHHCRACGQGFCDECSHDRRAVPSRGWDHPVRVCFNCNKKPGDL

SEQ ID NO: 6854 - protein, 115 aa, Homo sapiens
MSGEPGQTSVAPPPEEVEPGSGVRIVVEYCEPCGFEATYLELASAVKEQYPGIEIESRLGGTGAFEIEINGQLVFSKLENGGFPYEKDLIEAIRRASNGETLEKITNSRPPCVIL

SEQ ID NO: 6855 - protein, 168 aa, Homo sapiens
MLFRLSEHSSPEEEASPHQRASGEGHHLKSKRPNPCAYTPPSLKAVQRIAESHLQSISNLNENQASEEEDELGELRELGYPREEDEEEEEDDEEEEEEEDSQAEVLKVIRQSAGQKTTCGQGLEGPWERPPPLDESERDGGSEDQVEDPALSEPGEEPQRPSPSEPGT

SEQ ID NO: 6856 - protein, 168 aa, Homo sapiens; identical to SEQ ID NO: 6855

SEQ ID NO: 6857 - protein, 215 aa, Homo sapiens
MDPKDRKKIQFSVPAPPSQLDPRQVEMIRRRRPTPAMLFRLSEHSSPEEEASPHQVTPLTWHFPWQRASGEGHHLKSKRPNPCAYTPPSLKAVQRIAESHLQSISNLNENQASEEEDELGELRELGYPREEDEEEEEDDEEEEEEEDSQAEVLKVIRQSAGQKTTCGQGLEGPWERPPPLDESERDGGSEDQVEDPALSEPGEEPQRPSPSEPGT

SEQ ID NO: 6858 - protein, 1723 aa, Homo sapiens
MESNFNQEGVPRPSYVFSADPIARPSEINFDGIKLDLSHEFSLVAPNTEANSFESKDYLQVCLRIRPFTQSEKELESEGCVHILDSQTVVLKEPQCILGRLSEKSSGQMAQKFSFSKVFGPATTQKEFFQGCIMQPVKDLLKGQSRLIFTYGLTNSGKTYTFQGTEENIGILAALNVLFDSLQERLYTKMNLKPHRSREYLRLSSEQEKEEIASKSALLRQIKEVTVHNDSDDTLYGSLTNSLNISEFEESIKDYEQANLNMANSIKFSVWVSFFEIYNEYIYDLFVPVSSKFQKRKMLRLSQDVKGYSFIKDLQWIQVSDSKEAYRLLKLGIKHQSVAFTKLNNASSRSHSIFTVKILQIEDSEMSRVIRVSELSLCDLAGSERTMKTQNEGERLRETGNINTSLLTLGKCINVLKNSEKSKFQQHVPFRESKLTHYFQSFFNGKGKICMIVNISQCYLAYDETLNVLKFSAIAQKVCVPDTLNSSQEKLFGPVKSSQDVSLDSNSNSKILNVKRATISWENSLEDLMEDEDLVEELENAEETQNVETKLLDEDLDKTLEENKAFISHEEKRKLLDLIEDLKKKLINEKKEKLTLEFKIREEVTQEFTQYWAQREADFKETLLQEREILEENAERRLAIFKDLVGKCDTREEAAKDICATKVETEETHNYVGFEDIIDSLQDNVADIKKQAEIAHLYIASLPDPQEATACLELKFNQIKAELAKTKGELIKTKEELKKRENESDSLIQELETSNKKIITQNQRIKELINIIDQKEDTINEFQNLKSHMENTFKCNDKADTSSLIINNKLICNETVEVPKDSKSKICSERKRVNENELQQDEPPAKKGSIHVSSAITEDQKKSEEVRPNIAEIEDIRVLQENNEGLRAFLLTIENELKNEKEEKAELNKQIVHFQQELSLSEKKNLTLSKEVQQIQSNYDIAIAELHVQKSKNQEQEEKIMKLSNEIETATRSITNNVSQIKLMHTKIDELRTLDSVSQISNIDLLNLRDLSNGSEEDNLPNTQLDLLGNDYLVSKQVKEYRIQEPNRENSFHSSIEAIWEECKEIVKASSKKSHQIEELEQQIEKLQAEVKGYKDENNRLKEKEHKNQDDLLKEKETLIQQLKEELQEKNVTLDVQIQHVVEGKRALSELTQGVTCYKAKIKELETILETQKVECSHSAKLEQDILEKESIILKLERNLKEFQEHLQDSVKNTKDLNVKELKLKEEITQLTNNLQDMKHLLQLKEEEEETNRQETEKLKEELSASSARTQNLKADLQARGSEEDYADLKEKLTDAKKQIKQVQKEVSVMRDEDKLLRIKINELEKKKNQCSQELDMKQRTIQQLKEQLNNQKVEEAIQQYERACKDLNVKEKIIEDMRMTLEEQEQTQVEQDQVLEAKLEEVERLATELEKWKEKCNDLETKNNQRSNKEHENNTDVLGKLTNLQDELQESEQKYNADRKKWLEEKMMLITQAKEAENIRNKEMKKYAEDRERFFKQQNEMEILTAQLTEKDSDLQKWREERDQLVAALEIQLKALISSNVQKDNEIEQLKRIISETSKIETQIMDIKPKRISSADPDKLQTEPLSTSFEISRNKIEDGSVVLDSCEVSTENDQSTRFPKPELEIQFTPLQPNKMAVKHPGCTTPVTVKIPKARKRKSNEMEESASPPPKECSSSPAMEQSWKENDFDKLREEGFRRSNYSELQEEIQTKGKEVENFEKNLD

SEQ ID NO: 6859 - protein, 404 aa, Homo sapiens
MRRDVNGVTKSRFEMFSNSDEAVINKKLPKELLLRIFSFLDVVTLCRCAQVSRAWNVLALDGSNWQRIDLFDFQRDIEGRVVENISKRCGGFLRKLSLRGCLGVGDNALRTFAQNCRNIEVLNLNGCTKTTDAEGCPLLEQLNISWCDQVTKDGIQALVRGCGGLKALFLKGCTQLEDEALKYIGAHCPELVTLNLQTCLQITDEGLITICRGCHKLQSLCASGCSNITDAILNALGQNCPRLRILEVARCSQLTDVGFTTLARNCHELEKMDLEECVQITDSTLIQLSIHCPRLQVLSLSHCELITDDGIRHLGNGACAHDQLEVIELDNCPLITDASLEHLKSCHSLERIELYDCQQITRAGIKRLRTHLPNIKVHAYFAPVTPPPSVGGSRQRFCRCCIIL

SEQ ID NO: 6860 - protein, 416 aa, Homo sapiens
MAHSPVAVQVPGMQNNIADPEELFTKLERIGKGSFGEVFKGIDNRTQQVVAIKIIDLEEAEDEIEDIQQEITVLSQCDSSYVTKYYGSYLKGSKLWIIMEYLGGGSALDLLRAGPFDEFQIATMLKEILKGLDYLHSEKKIHRDIKAANVLLSEQGDVKLADFGVAGQLTDTQIKRNTFVGTPFWMAPEVIQQSAYDSKADIWSLGITAIELAKGEPPNSDMHPMRVLFLIPKNNPPTLVGDFTKSFKEFIDACLNKDPSFRPTAKELLKHKFIVKNSKKTSYLTELIDRFKRWKAEGHSDDESDSEGSDSESTSRENNTHPEWSFTTVRKKPDPKKVQNGAEQDLVQTLSCLSMIITPAFAELKQQDENNASRNQAIEELEKSIAVAEAACPGITDKMVKKLIEKFQKCSADESP

SEQ ID NO: 6861 - protein, 339 aa, Homo sapiens
MAHSPVAVQVPGMQGSKLWIIMEYLGGGSALDLLRAGPFDEFQIATMLKEILKGLDYLHSEKKIHRDIKAANVLLSEQGDVKLADFGVAGQLTDTQIKRNTFVGTPFWMAPEVIQQSAYDSKADIWSLGITAIELAKGEPPNSDMHPMRVLFLIPKNNPPTLVGDFTKSFKEFIDACLNKDPSFRPTAKELLKHKFIVKNSKKTSYLTELIDRFKRWKAEGHSDDESDSEGSDSESTSRENNTHPEWSFTTVRKKPDPKKVQNGAEQDLVQTLSCLSMIITPAFAELKQQDENNASRNQAIEELEKSIAVAEAACPGITDKMVKKLIEKFQKCSADESP

SEQ ID NO: 6862 - protein, 873 aa, Homo sapiens; identical to SEQ ID NO: 6021

SEQ ID NO: 6863 - protein, 482 aa, Homo sapiens
MEQSNLEKLELNVRKLQQELDQLNRDKLSLHNDISAMQQQLQEKREAVNSLQEELANVQDHLNLAKQDLLHTTKHQDVLLSEQTRLQKDISEWANRFEDCQKEEETKQQQLQVLQNEIEENKLKLVQQEMMFQRLQKERESEKSKLDQVLSKVLAAEERVRTLQEEERWCESLEKTLSQTKRQLSEREQQLVEKSGELLALQKEADSMRADFSLLRNQFLTERKKAEKQVASLKEALKIQRSQLEKNLLEQKQENSCIQKEMATIELVAQDNHERARRLMKELNQMQYEYTELKKQMANQKDLERRQMEISDAMRTLKSEVKDEIRTSLKNLNQFLPELPADLEAILERNENLEGELESLKENLPFTMNEGPFEEKLNFSQVHIMDEHWRGEALREKLRHREDRLKAQLRHCMSKQAEVLIKGKRQTEGTLHSLRRQVDALGELVTSTSADSASSPSLSQLESSLTEDSQLGQNQEKNASAR

SEQ ID NO: 6864 - protein, 1259 aa, Homo sapiens
MALRPGAGSGGGGAAGAGAGSAGGGGFMFPVAGGIRPPQAGLMPMQQQGFPMVSVMQPNMQGIMGMNYSSQMSQGPIAMQAGIPMGPMPAAGMPYLGQAPFLGMRPPGPQYTPDMQKQFAEEQQKRFEQQQKLLEEERKRRQFEEQKQKLRLLSSVKPKTGEKSRDDALEAIKGNLDGFSRDAKMHPTPASHPKKPGVGVFPSQDPAQPRMPPWIYNESLVPDAYKKILETTMTPTGIDTAKLYPILMSSGLPRETLGQIWALANRTTPGKLTKEELYTVLAMIAVTQRGVPAMSPDALNQFPAAPIPTLSGFSMTLPTPVSQPTVIPSGPAGSMPLSLGQPVMGINLVGPVGGAAAQASSGFIPTYPANQVVKPEEDDFQDFQDASKSGSLDDSFSDFQELPASSKTSNSQHGNSAPSLLMPLPGTKALPSMDKYAVFKGIAADKSSENTVPPGDPGDKYSAFRELEQTAENKPLGESFAEFRSAGTDDGFTDFKTADSVSPLEPPTKDKTFPPSFPSGTIQQKQQTQVKNPLNLADLDMFSSVNCSSEKPLSFSAVFSTSKSVSTPQSTGSAATMTALAATKTSSLADDFGEFSLFGEYSGLAPVGEQDDFADFMAFSNSSISSEQKPDDKYDALKEEASPVPLTSNVGSTVKGGQNSTAASTKYDVFRQLSLEGSGLGVEDLKDNTPSGKSDDDFADFHSSKFSSINSDKSLGEKAVAFRHTKEDSASVKSLDLPSIGGSSVGKEDSEDALSVQFDMKLADVGGDLKHVMSDSSLDLPTVSGQHPPAADIEDLKYAAFGSYSSNFAVSTLTSYDWSDRDDATQGRKLSPFVLSAGSGSPSATSILQKKETSFGSSENITMTSLSKVTTFVSEDALPETTFPALASFKDTIPQTSEQKEYENRDYKDFTKQDLPTAERSQEATCPSPASSGASQETPNECSDDFGEFQSEKPKISKFDFLVATSQSKMKSSEEMIKSELATFDLSVQGSHKRSLSLGDKEISRSSPSPALEQPFRDRSNTLNEKPALPVIRDKYKDLTGEVEENERYAYEWQRCLGSALNVIKKANDTLNGISSSSVCTEVIQSAQGMEYLLGVVEVYRVTKRVELGIKATAVCSEKLQQLLKDIDKVWNNLIGFMSLATLTCCWEKMTVITKHLSPYHELLEEKPDENSLDFSSCMLRPGIKNAQELACGVCLLNVDSRSRKEEKPAEEHPKKAFNSETDSFKLAYGGHQYHASCANFWINCVEPKPPGLVLPDLL

SEQ ID NO: 6865 - protein, 385 aa, Homo sapiens
MALRPGAGSGGGGAAGAGAGSAGGGGFMFPVAGGIRPPQAGLMPMQQQGFPMVSVMQPNMQGIMGMNYSSQMSQGPIAMQAGIPMGPMPAAGMPYLGQAPFLGMRPPGPQYTPDMQKQFAEEQQKRFEQQQKLLEEERKRRQFEEQKQKLRLLSSVKPKTGEKSRDDALEAIKGNLDGFSRDAKMHPTPASHPKKPDCPTSSHSTKTVSPSPAFLDEEEFSDFMQGPVEVPPCGPSSTSQPFQSFHPSTPLGQLHTQKAGTQPLPPSQSPVPFALHGVPGQIPYFSTASASHSVPEAGPSLEEKFLVSCDISTSGQEQIKLNTSEVGHKALGPGSSKKYPSLMASNGVAVDGCVWEYFPHRILLSPECLLGFTMRVWFQMPIRKS

SEQ ID NO: 6866 - protein, 312 aa, Homo sapiens
MADFGISAGQFVAVVWDKSSPVEALKGLVDKLQALTGNEGRVSVENIKQLLQSAHKESSFDIILSGLVPGSTTLHSAEILAEIARILRPGGCLFLKEPVETAVDNNSKVKTASKLCSALTLSGLVEVKELQREPLTPEEVQSVREHLGHESDNLLFVQITGKKPNFEVGSSRQLKLSITKKSSPSVKPAVDPAAAKLWTLSANDMEDDSMDLIDSDELLDPEDLKKPDPASLRAASCGEGKKRKACKNCTCGLAEELEKEKSREQMSSQPKSACGNCYLGDAFRCASCPYLGMPAFKPGEKVLLSDSNLHDA

SEQ ID NO: 6867 - protein, 351 aa, Homo sapiens
MNESNDSTNYDMAPYYEALCKSLDWQIDVDLLNKMKKANEDELKRLDEELEDAEKNLGESEIRDAMMAKAEYLCRIGDKEGALTAFRKTYDKTVALGHRLDIVFYLLRIGLFYMDNDLITRNTEKAKSLIEEGGDWDRRNRLKVYQGLYCVAIRDFKQAAELFLDTVSTFTSYELMDYKTFVTYTVYVSMIALERPDLREKVIKGAEILEVLHSLPAVRQYLFSLYECRYSVFFQSLAVVEQEMKKDWLFAPHYRYYVREMRIHAYSQLLESYRSLTLGYMAEAFGVGVEFIDQELSRFIAAGRLHCKIDKVNEIVETNRPDSKNWQYQETIKKGDLLLNRVQKLSRVINM

SEQ ID NO: 6868 - protein, 137 aa, Homo sapiens; identical to SEQ ID NO: 5914

SEQ ID NO: 6869 - protein, 931 aa, Homo sapiens; identical to SEQ ID NO: 4998

SEQ ID NO: 6870 - protein, 105 aa, Homo sapiens [sequence omitted]

SEQ ID NO: 6871 - protein, 220 aa, Homo sapiens
MNSMDRHIQQTNDRLQCIKQHLQNPANFHNAATELLDWCGDPRAFQRPFEQSLMGCLTVVSRVAAQQGFDLDLGYRLLAVCAANRDKFTPKSAALLSSWCEELGRLLLLRHQKSRQSDPPGKLPMQPPLSSMSSMKPTLSHSDGSFPYDSVPWLPAYPACTPPPSQSHPNSCSLKQKQPLAFPPPLCSIWLTTLQGLLGSLSCVHFVSGWSVPREPHGLG

SEQ ID NO: 6872 - protein, 117 aa, Homo sapiens [sequence omitted]

SEQ ID NO: 6873 - protein, 117 aa, Homo sapiens [sequence omitted]

SEQ ID NO: 6874 - protein, 117 aa, Homo sapiens [sequence omitted]

SEQ ID NO: 6875 - protein, 633 aa, Homo sapiens; identical to SEQ ID NO: 6010

SEQ ID NO: 6876 - protein, 546 aa, Homo sapiens
MKAIKKSLTEEEYLYLDFSHQTEGCIFPLHTSVTLFLLSYCDCKIFKICLVVTKEVSQWTRLCELTIPLAIENFLRESSDQPPTIPVEILQLEKKLSEPVRVHNDDKLRRQKLKQQKADGVGPPLTKGKAKSKVHTQETSEGLDSSSKSLELKVAFSKLTVQEEPATTNREPSHIRKAKASDLPPLEHVFAEGLYFTLADIVLLPCIHHFLVIISRKFSEKLVEFPLLASWYQRIQEVPGVKTAASKCGIQFLHLPKLLTTSTEQHPNLCEVPGVEEQSDPLFIGGPRPTMAKLMEKGIEVMFSPHPCPTWTLDWNVLPAAVSPKEGKMSSDRALRKQQQLNNLVYVVTNQAKPGDRIVDFCSGGGHVGIVLAHMLPSCQVTLIENKELSLIRAKKRSDELGLSNIWFIQANMEYFTGMFNIGVALHACGVATDMVIEHCIKTRASFVTCPCCYGFIQNTSKFNFPKSEQFKKTLSYKEHMILCRFADQTAVQLPPQRRLIGKQCMCLVDLDRARAAEECGYSVQVISMEPESCSPKNNMIVGVPI

SEQ ID NO: 6877 - protein, 513 aa, Homo sapiens
MLLENLTDNESENTNLKKKVFEKEAHIQELSCLFQSEKANTLKANRFSQSVKVVHERLQIQIHKREAENDKLKEYVKSLETKIAKWNLQSRMNKNEAIVMKEASRQKTVALKKASKVYKQRLDHFTGAIEKLTSQIRDQEAKLSETISASNAWKSHYEKIVIEKTELEVQIETMKKQIINLLEDLKKMEDHGKNSCEEILRKVHSIEYENETLNLENTKLKTTLAALKDEVVSVENELSELQEVEKKQKTLIEMYKTQVQKLQEAAEIVKSRCENLLHKNNQITKTKNKNVEKMRGQMESHLKELERVCDSLTAAERRLHECQESLQCCKGKCADQEHTIRELQGQVDGNHNLLTKLSLEEENCLIQLKCENLQQKLEQMDAENKELEKKLANQEECLKHSNLKFKEKSAEYTALARQLEAALEEGRQKVAEEIEKMSSRESALQIKILDLETELRKKNEEQNQLVCKMNSKAQHQEVCLKEVQNSLEKSENQNESIKNYLQFLKTSYVTMFE

SEQ ID NO: 6878 - protein, 388 aa, Homo sapiens
MAAAAALARLEQKQSRAWGPTSQDTIRNQVRKELQAEATVSGSPEAPGTNVVSEPREEGSAHLAVPGVYFTCPLTGATLRKDQRDACIKEAILLHFSTDPVAASIMKIYTFNKDQDRVKLGVDTIAKYLDNIHLHPEEEKYRKIKLQNKVFQERINCLEGTHEFFEAIGFQKVLLPAQDQEDPEEFYVLSETTLAQPQSLERHKEQLLAAEPVRAKLDRQRRVFQPSPLASQFELPGDFFNLTAEEIKREQRLRSEAVERLSVLRTKAMREKEEQRGLRKYNYTLLRVRLPDGCLLQGTFYARERLGAVYGFVREALQSDWLPFELLASGGQKLSEDENLALNECGLVPSALLTFSWDMAVLEDIKAAGAEPDSILKPELLSAIEKLL

SEQ ID NO: 6879 - protein, 896 aa, Homo sapiens
MDGAAGPGDGPAREALQSLSQRLRVQEQEMELVKAALAEALRLLRLQVPPSSLQGSGTPAPPGDSLAAPPGLPPTCTPSLVSRGTQTETEVELKSSPGPPGLSNGPPAPQGASEEPSGTQSEGGGSSSSGAGSPGPPGILRPLQPPQRADTPRRNSSSSSSPSERPRQKLSRKAISSANLLVRSGSTESRGGKDPLSSPGGPGSRRSNYNLEGISVKMFLRGRPITMYIPSGIRSLEELPSGPPPETLSLDWVYGYRGRDSRSNLFVLRSGEVVYFIACVVVLYRPGGGPGGPGGGGQRHYRGHTDCVRCLAVHPDGVRVASGQTAGVDKDGKPLQPVVHIWDSETLLKLQEIGLGAFERGVGALAFSAADQGAFLCVVDDSNEHMLSVWDCSRGMKLAEIKSTNDSVLAVGFNPRDSSCIVTSGKSHVHFWNWSGGVGVPGNGTLTRKQGVFGKYKKPKFIPCFVFLPDGDILTGDSEGNILTWGRSPSDSKTPGRGGAKETYGIVAQAHAHEGSIFALCLRRDGTVLSGGGRDRRLVQWGPGLVALQEAEIPEHFGAVRAIAEGLGSELLVGTTKNALLRGDLAQGFSPVIQGHTDELWGLCTHPSQNRFLTCGHDRQLCLWDGESHALAWSIDLKETGLCADFHPSGAVVAVGLNTGRWLVLDTETREIVSDVIDGNEQLSVVRYSPDGLYLAIGSHDNVIYIYSVSSDGAKSSRFGRCMGHSSFITHLDWSKDGNFIMSNSGDYEILYWDVAGGCKQLKNRYESRDREWATYTCVLGFHVYGVWPDGSDGTDINSLCRSHNERVVAVADDFCKVHLFQYPCARAKAPSRMYGGHGSHVTSVRFTHDDSHLVSLGGKDASIFQWRVLGAGGAGPAPATPSRTPSLSPASSLDV

SEQ ID NO: 6880 - protein, 977 aa, Homo sapiens
MGAEEEVLVTLSGGAPWGFRLHGGAEQRKPLQVSKIRRRSQAGRAGLRERDQLLAINGVSCTNLSHASAMSLIDASGNQLVLTVQRLADEGPVQSPSPHELQVLSPLSPLSPEPPGAPVPQPLQPGSLRSPPDSEAYYGETDSDADGPATQEKPRRPRRRGPTRPTPPGAPPDEVYLSDSPAEPAPTIPGPPSQGDSRVSSPSWEDGAALQPPPAEALLLPHGPLRPGPHLIPMVGPVPHPVAEDLTTTYTQKAKQAKLQRAESLQEKSIKEAKTKCRTIASLLTAAPNPHSKGVLMFKKRRQRAKKYTLVSFGAAAGTGAEEEDGVPPTSESELDEEAFSDARSLTNQSDWDSPYLDMELARAGSRASEGQGSGLGGQLSEVSGRGVQLFEQQRQRADSSTQELARVEPAAMLNGEGLQSPPRAQSAPPEAAVLPPSPLPAPVASPRPFQPGGGAPTPAPSIFNRSARPFTPGLQGQRPTTTSVIFRPLAPKRANDSLGGLSPAPPPFLSSQGPTPLPSFTSGVPSHAPVSGSPSTPRSSGPVTATSSLYIPAPSRPVTPGGAPEPPAPPSAAAMTSTASIFLSAPLRPSARPEAPAPGPGAPEPPSAREQRISVPAARTGILQEARRRGTRKQMFRPGKEETKNSPNPELLSLVQNLDEKPRAGGAESGPEEDALSLGAEACNFMQPVGARSYKTLPHVTPKTPPPMAPKTPPPMTPKTPPPVAPKPPSRGLLDGLVNGAASSAGIPEPPRLQGRGGELFAKRQSRADRYVVEGTPGPGLGPRPRSPSPTPSLPPSWKYSPNIRAPPPIAYNPLLSPFFPQAARTLPKAQSQGPRATPKQGIKALDFMRHQPYQLKTAMFCFDEVPPTPGPIASGSPKTARVQEIRRFSTPAPQPTAEPLAPTVLAPRAATTLDEPIWRTELASAPVPSPAPPPEAPRGLGASPSSCGFQVARPRFSATRTGLQAHVWRPGAGHQ

SEQ ID NO: 6881 - protein, 917 aa, Homo sapiens
MGTTAPGPIHLLELCDQKLMEFLCNMDNKDLVWLEEIQEEAERMFTREFSKEPELMPKTPSQKNRRKKRRISYVQDENRDPIRRRLSRRKSRSSQLSSRRLRSKDSVEKLATVVGENGSVLRRVTRAAAAAAAATMALAAPSSPTPESPTMLTKKPEDNHTQCQLVPVVEIGISERQNAEQHVTQLMSTEPLAALSPTPASATAPTSQGIPTSDEESTPKKSKARILESITVSSLMATPQDPKGQGVGTGRSASKLRIAQVSPGPRDSPAFPDSPWRERVLAPILPDNFSTPTGSRTDSQSVRHSPIAPSSPSPQVLAQKYSLVAKQESVVRRASRRLAKKTAEEPAASGRIICHSYLERLLNVEVPQKVGSEQKEPPEEAEPVAAAEPEVPENNGNNSWPHNDTEIANSTPNPKPAASSPETPSAGQQEAKTDQADGPREPPQSARRKRSYKQAVSELDEEQHLEDEELQPPRSKTPSSPCPASKVVRPLRTFLHTVQRNQMLMTPTSAPRSVMKSFIKRNTPLRMDPKCSFVEKERQRLENLRRKEEAEQLRRQKVEEDKRRRLEEVKLKREERLRKVLQARERVEQMKEEKKKQIEQKFAQIDEKTEKAKEERLAEEKAKKKAAAKKMEEVEARRKQEEEARRLRWLQQEEEERRHQELLQKKKEEEQERLRKAAEAKRLAEQREQERREQERREQERREQERREQERREQERQLAEQERRREQERLQAERELQEREKALRLQKEQLQRELEEKKKKEEQQRLAERQLQEEQEKKAKEAAGASKALNVTVDVQSPACTSYQMTPQGHRAPPKINPDNYGMDLNSDDSTDDEAHPRKPIPTWARGTPLSQAIIHQYYHPPNLLELFGTILPLDLEDIFKKSKPRYHKRTSSAVWNSPPLQGARVPSSLAYSLKKH

SEQ ID NO: 6882 - protein, 575 aa, Homo sapiens
MTSKKLVNSVAGCADDALAGLVACNPNLQLLQGHRVALRSDLDSLKGRVALLSGGGSGHEPAHAGFIGKGMLTGVIAGAVFTSPAVGSILAAIRAVAQAGTVGTLLIVKNYTGDRLNFGLAREQARAEGIPVEMVVIGDDSAFTVLKKAGRRGLCGTVLIHKVAGALAEAGVGLEEIAKQVNVVAKAMGTLGVSLSSCSVPGSKPTFELSADEVELGLGIHGEAGVRRIKMATADEIVKLMLDHMTNTTNASHVPVQPGSSVVMMVNNLGGLSFLELGIIADATVRSLEGRGVKIARALVGTFMSALEMPGISLTLLLVDEPLLKLIDAETTAAAWPNVAAVSITGRKRSRVAPAEPQEAPDSTAAGGSASKRMALVLERVCSTLLGLEEHLNALDRAAGDGDCGTTHSRAARAIQEWLKEGPPPASPAQLLSKLSVLLLEKMGGSSGALYGLFLTAAAQPLKAKTSLPAWSAAMDAGLEAMQKYGKAAPGDRTMLDSLWAAGQELQAWKSPGADLLQVLTKAVKSAEAAAEATKNMEAGAGRASYISSARLEQPDPGAVAAAAILRAILEVLQS

SEQ ID NO: 6883 - protein, 359 aa, Homo sapiens
MAAPCAEDPSLERHFKGHRDAVTCVDFSINTKQLASGSMDSCLMVWHMKPQSRAYRFTGHKDAVTCVNFSPSGHLLASGSRDKTVRIWVPNVKGESTVFRAHTATVRSVHFCSDGQSFVTASDDKTVKVWATHRQKFLFSLSQHINWVRCAKFSPDGRLIVSASDDKTVKLWDKSSRECVHSYCEHGGFVTYVDFHPSGTCIAAAGMDNTVKVWDVRTHRLLQHYQLHSAAVNGLSFHPSGNYLITASSDSTLKILDLMEGRLLYTLHGHQGPATTVAFSRTGEYFASGGSDEQVMVWKSNFDIVDHGEVTKVPRPPATLASSMGNLTVSILEQRLTLTEDKLKQCLENQQLIMQRATP

SEQ ID NO: 6884 - protein, 210 aa, Homo sapiens; identical to SEQ ID NO: 6033

SEQ ID NO: 6885 - protein, 496 aa, Homo sapiens
MDQDYERRLLRQIVIQNENTMPRVTEMRRTLTPASSPVSSPSKHGDRFIPSRAGANWSVNFHRINENEKSPSQNRKAKDATSDNGKDGLAYSALLKNELLGAGIEKVQDPQTEDRRLQPSTPEKKGLFTYSLSTKRSSPDDGNDVSPYSLSPVSNKSQKLLRSPRKPTRKISKIPFKVLDAPELQDDFYLNLVDWSSLNVLSVGLGTCVYLWSACTSQVTRLCDLSVEGDSVTSVGWSERGNLVAVGTHKGFVQIWDAAAGKKLSMLEGHTARVGALAWNAEQLSSGSRDRMILQRDIRTPPLQSERRLQGHRQEVCGLKWSTDHQLLASGGNDNKLLVWNHSSLSPVQQYTEHLAAVKAIAWSPHQHGLLASGGGTADRCIRFWNTLTGQPLQCIDTGSQVCNLAWSKHANELVSTHGYSQNQILVWKYPSLTQVAKLTGHSYRVLYLAMSPDGEAIVTGAGDETLRFWNVFSKTRSTKVKWESVSVLNLFTRIR

SEQ ID NO: 6886 - protein, 129 aa, Homo sapiens; identical to SEQ ID NO: 6440

SEQ ID NO: 6887 - protein, 295 aa, Homo sapiens; identical to SEQ ID NO: 5678

SEQ ID NO: 6888 - protein, 295 aa, Homo sapiens; identical to SEQ ID NO: 5678

SEQ ID NO: 6889 - protein, 117 aa, Homo sapiens
MLCWGNASFGQLGLGGIDEEIVLEPRKSDFFINKRVRDVGCGLRHTVFVLDDGTVYTCGCNDLGQLGHEKSRKKPEILKVCQISRLYRLLVVTIIHLHFLKQVKSSVGDRINMANWV

SEQ ID NO: 6890 - protein, 1057 aa, Homo sapiens
MLCWGNASFGQLGLGGIDEEIVLEPRKSDFFINKRVRDVGCGLRHTVFVLDDGTVYTCGCNDLGQLGHEKSRKKPEQVVALDAQNIVAVSCGEAHTLALNDKGQVYAWGLDSDGQLGLVGSEECIRVPRNIKSLSDIQIVQVACGYYHSLALSKASEVFCWGQNKYGQLGLGTDCKKQTSPQLLKSLLGIPFMQVAAGGAHSFVLTLSGAIFGWGRNKFGQLGLNDENDRYVPNLLKSLRSQKIVYICCGEDHTAALTKEGGVFTFGAGGYGQLGHNSTSHEINPRKVFELMGSIVTEIACGRQHTSAFVPSSGRIYSFGLGGNGQLGTGSTSNRKSPFTVKGNWYPYNGQCLPDIDSEEYFCVKRIFSGGDQSFSHYSSPQNCGPPDDFRCPNPTKQIWTVNEALIQKWLSYPSGRFPVEIANEIDGTFSSSGCLNGSFLAVSNDDHYRTGTRFSGVDMNAARLLFHKLIQPDHPQISQQVAASLEKNLIPKLTSSLPDVEALRFYLTLPECPLMSDSNNFTTIAIPFGTALVNLEKAPLKVLENWWSVLEPPLFLKIVELFKEVVVHLLKLYKIGIPPSERRIFNSFLHTALKVLEILHRVNEKMGQIIQYDKFYIHEVQELIDIRNDYINWVQQQAYGMDVNHGLTELADIPVTICTYPFVFDAQAKTTLLQTDAVLQMQMAIDQAHRQNVSSLFLPVIESVNPCLILVVRRENIVGDAMEVLRKTKNIDYKKPLKVIFVGEDAVDAGGVRKEFFLLIMRELLDPKYGMFRYYEDSRLIWFSDKTFEDSDLFHLIGVICGLAIYNCTIVDLHFPLALYKKLLKKKPSLDDLKELMPDVGRSMQQLLDYPEDDIEETFCLNFTITVENFGATEVKELVLNGADTAVNKQNRQEFVDAYVDYIFNKSVASLFDAFHAGFHKVCGGKVLLLFQPNELQAMVIGNTNYDWKELEKNTEYKGEYWAEHPTIKIFWEVFHELPLEKKKQFLLFLTGSDRIPILGMKSLKLVIQSTGGGEEYLPVSHTCFNLLDLPKYTEKETLRSKLIQAIDHNEGFSLI

SEQ ID NO: 6891 - protein, 359 aa, Homo sapiens; identical to SEQ ID NO: 4870

SEQ ID NO: 6892 - protein, 237 aa, Homo sapiens
MEVMEGPLNLAHQQSRRADRLLAAGKYEEAISCHKKAAAYLSEAMKLTQSEQAHLSLELQRDSHMKQLLLIQERWKRAQREERLKAQQNTVLYLLQQKSEPAEPCIGSKAPKDDKTIIEEQATKIADLKRHVEFLVAENERLRKENKQLKAEKARLLKGPIEKELDVDADFVETSELWSLPPHAETATASSTWQKFAANTGKAKDIPIPNLPPLDFPSPELPLMELSEDILKGFMNN

SEQ ID NO: 6893 - protein, 484 aa, Homo sapiens
MNGTLDHPDQPDLDAIKMFVGQVAAWSEKDLRELFEQYGAVYEINVLRDRSQNPPQSKGCCFVTFYTRKAALEAQNALHNMKVLPGMHHPIQMKPADSEKNNVEDRKLFIGMISKKCTENDIRVMFSSFGQIEECRILRGPDGLSRGCAFVTFTTRAMAQTAIKAMHQAQTMEGCSSPMVVKFADTQKDKEQKRMAQQLQQQMQQISAASVWGNLAGLNTLGPQYLALYLQLLQQTASSGNLNTLSSLHPMGGLNAMQLQNLAALAAAASAAQNTPSGTNALTTSSSPLSVLTSSGSSPSSSSSNSVNPIASLGALQTLAGATAGLNVGSLAGMAALNGGLGSSGLSNGTGSTMEALTQAYSGIQQYAAAALPTLYNQNLLTQQSIGAAGSQKEGPEGANLFIYHLPQEFGDQDLLQMFMPFGNVVSAKVFIDKQTNLSKCFGFVSYDNPVSAQAAIQSMNGFQIGMKRLKVQLKRSKNDSKPY

SEQ ID NO: 6894 - protein, 482 aa, Homo sapiens
MNGTLDHPDQPDLDAIKMFVGQVAAWSEKDLRELFEQYGAVYEINVLRDRSQNPPQSKGCCFVTFYTRKAALEAQNALHNMKVLPGMHHPIQMKPADSEKNNAVEDRKLFIGMISKKCTENDIRVMFSSFGQIEECRILRGPDGLSRGCAFVTFTTRAMAQTAIKAMHQAQTMEGCSSPMVVKFADTQKDKEQKRMAQQLQQQMQQISAASVWGNLAGLNTLGPQYLALLQQTASSGNLNTLSSLHPMGGLNAMQLQNLAALAAAASAAQNTPSGTNALTTSSSPLSVLTSSAGSSPSSSSSNSVNPIASLGALQTLAGATAGLNVGSLAGMAALNGGLGSSGLSNGTGSTMEALTQAYSGIQQYAAAALPTLYNQNLLTQQSIGAAGSQKEGPEGANLFIYHLPQEFGDQDLLQMFMPFGNVVSAKVFIDKQTNLSKCFGFVSYDNPVSAQAAIQSMNGFQIGMKRLKVQLKRSKNDSKPY

SEQ ID NO: 6895 - protein, 1188 aa, Homo sapiens
MDDKGDPSNEEAPKAIKPTSKEFRKTWGFRRTTIAKREGAGDAEADPLEPPPPQQQLGLSLRRSGRQPKRTERVEQFLTIARRRGRRSMPVSLEDSGEPTSCPATDAETASEGSVESASETRSGPQSASTAVKERPASSEKVKGGDDHDDTSDSDSDGLTLKELQNRLRRKREQEPTERPLKGIQSRLRKKRREEGPAETVGSEASDTVEGVLPSKQEPENDQGVVSQAGKDDRESKLEGKAAQDIKDEEPGDLGRPKPECEGYDPNALYCICRQPHNNRFMICCDRCEEWFHGDCVGISEARGRLLERNGEDYICPNCTILQVQDETHSETADQQEAKWRPGDADGTDCTSIGTIEQKSSEDQGIKGRIEKAANPSGKKKLKIFQPVIEAPGASKCIGPGCCHVAQPDSVYCSNDCILKHAAATMKFLSSGKEQKPKPKEKMKMKPEKPSLPKCGAQAGIKISSVHKRPAPEKKETTVKKAVVVPARSEALGKEAACESSTPSWASDHNYNAVKPEKTAAPSPSLLYKSTKEDRRSEEKAAAMAASKKTAPPGSAVGKQPAPRNLVPKKSSFANVAAATPAIKKPPSGFKGTIPKRPWLSATPSSGASAARQAGPAPAAATAASKKFPGSAALVGAVRKPVVPSVPMASPAPGRLGAMSAAPSQPNSQIRQNIRRSLKEILWKRVNDSDDLIMTENEVGKIALHIEKEMFNLFQVTDNRYKSKYRSIMFNLKDPKNQGLFHRVLREEISLAKLVRLKPEELVSKELSTWKERPARSVMESRTKLHNESKKTAPRQEAIPDLEDSPPVSDSEEQQESARAVPEKSTAPLLDVFSSMLKDTTSQHRAHLFDLNCKICTGQVPSAEDEPAPKKQKLSASVKKEDLKSKHDSSAPDPAPDSADEVMPEAVPEVASEPGLESASHPNVDRTYFPGPPGDGHPEPSPLEDLSPCPASCGSGVVTTVTVSGRDAAAPSSSCTAVASAASRPDSTHMVEARQDVPKPVLTSVMVPKSILAKPSSSPDPRYLSVPPSPNISTSESRSPPEGDTTLFLSRLSTIWKGFINMQSVAKFVTKAYPVSGCFDYLSEDLPDTIHIGGRIAPKTVWDYVGKLKSSVSKELCLIRFHPATEEEEVAYISLYSYFSSRGRFGVVANNNRHVKDLYLIPLSAQDPVPSKLLPFEGPGKRRLSGWR

SEQ ID NO: 6896 - protein, 1188 aa, Homo sapiens; identical to SEQ ID NO: 6895

SEQ ID NO: 6897 - protein, 2241 aa, Homo sapiens; identical to SEQ ID NO: 4982

SEQ ID NO: 6898 - protein, 295 aa, Homo sapiens; identical to SEQ ID NO: 5678

SEQ ID NO: 6899 - protein, 277 aa, Homo sapiens; identical to SEQ ID NO: 6399

SEQ ID NO: 6900 - protein, 413 aa, Homo sapiens
MGTVTEDLIRRNAEHNDCVIFSLEELSLHQQEIERLEHIDKWCRDLKILYLQNNLIGKIENVSKLKKLEYLNLALNNIEKIENLEGCEELAKLDLTVNFIGELSSIKNLQHNIHLKELFLMGNPCASFDHYREFVVATLPQLKWLDGKEIEPSERIKALQDYSVIEPQIREQEKDHCLKRAKLKEEAQRKHQEEDKNEDKRSNAGFDGRWYTDINATLSSLESKDHLQAPDTEEHNTKKLDNSEDDLEFWNKPCLFTPESRLETLRHMEKQRKKQEKLSEKKKKVKPAALITEDGKALNVNEPKIDFSLKDNEKQIILDLAVYRYMDTSLIDVDVQPTYVRVMIKGKPFQLVLPAEVKPDSSSAKRSQTTGHLVICMPKVGEVITGGQRAFKSMKTTSDRSREQTNTSYSTGF

SEQ ID NO: 6901 - protein, 841 aa, Homo sapiens
MSSSHFASRHRKDISTEMIRTKIAHRKSLSQKENRHKEYERNRHFGLKDVNIPTLEGRILVELDETSQGLVPEKTNVKPRAMKTILGDQRKQMLQKYKEEKQLQKLKEQREKAKRGIFKVGRYRPDMPCFLLSNQNAVKAEPKKAIPSSVRITRSKAKDQMEQTKIDNESDVRAIRPGPRQTSEKKVSDKEKKVVQPVMPTSLRMTRSATQAAKQVAAVSSTTARKPVTRAANENEPEGKVPSKGRPAKNVETKPDKGISCKVDSEENTLNSQTNATSGMNPDGVLSKMENLPEINTAKIKGKNSFAPKDFMFQPLDGLKTYQVTPMTPRSANAFLTPSYTWTPLKTEVDESQATKEILAQKCKTYSTKTIQQDSNKLPCPLGPLTVWHEEHVLNKNEATTKNLNGLPIKEVPSLERNEGRIAQPHHGVPYFRNILQSETEKLTSHCFEWDRKLELDIPDDAKDLIRTAVGQTRLLMKERFKQFEGLVDDCEYKRGIKETTCTDLDGFWDMVSFQIEDVIHKFNNLIKLEESGWQVNNNMNHNMNKNVFRKKVVSGIASKPKQDDAGRIAARNRLAAIKNAMRERIRQEECAETAVSVIPKEVDKIVFDAGFFRVESPVKLFSGLSVSSEGPSQRLGTPKSVNKAVSQSRNEMGIPQQTTSPENAGPQNTKSEHVKKTLFLSIPESRSSIEDAQCPGLPDLIEENHVVNKTDLKVDCLSSERMSLPLLAGGVADDINTNKKEGISDVVEGMELNSSITSQDVLMSSPEKNTASQNSILEEGETKISQSELFDNKSLTTECHLLDSVGSCYVARAGLEVLGSSDPTTSASRVAGTTARSKLQ

SEQ ID NO: 6902 - protein, 569 aa, Homo sapiens
MLCSPSFCKLCWKRQRENGQRKYGGPPPGWDAAPPERGCEIFIGKLPRDLFEDELIPLCEKIGKIYEMRMMMDFNGNNRGYAFVTFSNKVEAKNAIKQLNNYEIRNGRLLGVCASVDNCRLFVGGIPKTKKREEILSEMKKVTEGVVDVIVYPSAADKTKNRGFAFVEYESHRAAAMARRKLLPGRIQLWGHGIAVDWAEPEVEVDEDTMSSVKILYVRNLMLSTSEEMIEKEFNNIKPGAVERVKKIRDYAFVHFSNREDAVEAMKALNGKVLDGSPIEVTLAKPVDKDSYVRYTRGTGGRGTMLQGEYTYSLGQVYDPTTTYLGAPVFYAPQTYAAIPSLHFPATKGHLSNRAIIRAPSVRGAAGVRGLGGRGYLAYTGLGRGYQVKGDKREDKLYDILPGMELTPMNPVTLKPQGIKLAPQILEEICQKNNWGQPVYQLHSAIGQDQRQLFLYKITIPALASQNPAIHPFTPPKLSAFVDEAKTYAAEYTLQTLGIPTDGGDGTMATAAAAATAFPGYAVPNATAPVSAAQLKQAVTLGQDLAAYTTYEVYPTFAVTARGDGYGTF

SEQ ID NO: 6903 - protein, 587 aa, Homo sapiens
MSTAIPGLKKGNNALQSIILQTLLEKENGQRKYGGPPPGWDAAPPERGCEIFIGKLPRDLFEDELIPLCEKIGKIYEMRMMMDFNGNNRGYAFVTFSNKVEAKNAIKQLNNYEIRNGRLLGVCASVDNCRLFVGGIPKTKKREEILSEMKKVTEGVVDVIVYPSAADKTKNRGFAFVEYESHRAAAMARRKLLPGRIQLWGHGIAVDWAEPEVEVDEDTMSSVKILYVRNLMLSTSEEMIEKEFNNIKPGAVERVKKIRDYAFVHFSNREDAVEAMKALNGKVLDGSPIEVTLAKPVDKDSYVRYTRGTGGRGTMLQGEYTYSLGQVYDPTTTYLGAPVFYAPQTYAAIPSLHFPATKGHLSNRAIIRAPSVREIYMNVPVGAAGVRGLGGRGYLAYTGLGRGYQVKGDKREDKLYDILPGMELTPMNPVTLKPQGIKLAPQILEEICQKNNWGQPVYQLHSAIGQDQRQLFLYKITIPALASQNPAIHPFTPPKLSAFVDEAKTYAAEYTLQTLGIPTDGGDGTMATAAAAATAFPGYAVPNATAPVSAAQLKQAVTLGQDLAAYTTYEVYPTFAVTARGDGYGTF

SEQ ID NO: 6904 - protein, 539 aa, Homo sapiens
MESNHKSGDGLSGTQKEAALRALVQRTGYSLVQENGQRKYGGPPPGWDAAPPERGCEIFIGKLPRDLFEDELIPLCEKIGKIYEMRMMMDFNGNNRGYAFVTFSNKVEAKNAIKQLNNYEIRNGRLLGVCASVDNCRLFVGGIPKTKKREEILSEMKKVTEGVVDVIVYPSAADKTKNRGFAFVEYESHRAAAMARRKLLPGAVERVKKIRDYAFVHFSNREDAVEAMKALNGKVLDGSPIEVTLAKPVDKDSYVRYTRGTGGRGTMLQGEYTYSLGQVYDPTTTYLGAPVFYAPQTYAAIPSLHFPATKGHLSNRAIIRAPSVREIYMNVPVGAAGVRGLGGRGYLAYTGLGRGYQVKGDKREDKLYDILPGMELTPMNPVTLKPQGIKLAPQILEEICQKNNWGQPVYQLHSAIGQDQRQLFLYKITIPALASQNPAIHPFTPPKLSAFVDEAKTYAAEYTLQTLGIPTDGGDGTMATAAAAATAFPGYAVPNATAPVSAAQLKQAVTLGQDLAAYTTYEVYPTFAVTARGDGYGTF

SEQ ID NO: 6905 - protein, 347 aa, Homo sapiens
FSLFPAVDNEEAALLHEEATMTIEELLTRYGQNCHKGPPHSKSGASDKLPRVAKSKFFEDSEDESDEAEEEEEDSEECSEEEDGYSSEEAENEEDEDDTEEAEEDDEEEEEEMMVPGMEGKEEPGSDSGTTAVVALIRGKQLIVANAGDSRCVVSEAGKALDMSYDHKPEDEVELARIKNAGGKVTMDGRVNGGLNLSRAIGDHFYKRNKNLPPEEQMISALPDIKVLTLTDDHEFMVIACDGIWNVMSSQEVVDFIQSKISQRDENGELRLLSSIVEELLDQCLAPDTSGDGTGCDNMTCIIICFKPRNTAELQPESGKRKLEEVLSTEGAEENGNSDKKKKAKRD

SEQ ID NO: 6906 - protein, 405 aa, Homo sapiens
METDLNSQDRKDLDKFIKFFALKTVQVIVQARLGEKICTRSSSSPTGSDWFNLAIKDIPEVTHEAKKALAGQLPAVGRSMCVEISLKTSEGDSMELEIWCLEMNEKCDKEIKVSYTVYNRLSLLLKSLLAITRVTPAYRLSRKQGHEYVILYRIYFGEVQLSGLGEGFQTVRVGTVGTPVGTITLSCAYRINLAFMSTRQFERTPPIMGIIIDHFVDRPYPSSSPMHPCNYRTAGEDTGVIYPSVEDSQEVCTTSFSTSPPSQLMVPGKEGGVPLAPNQPVHGTQADQERLATCTPSDRTHCAATPSSSEDTETVSNSSEGRASPHDVLETIFVRKVGAFVNKPINQVTLTSLDIPFAMFAPKNLELEDTDPMVNPPDSPETESPLQGSLPCSWPLPCLLSPSTV

SEQ ID NO: 6907 - protein, 674 aa, Homo sapiens; identical to SEQ ID NO: 5910

SEQ ID NO: 6908 - protein, 879 aa, Homo sapiens
MNYPGRGSPRSPEHNGRGGGGGAWELGSDARPAFGGGVCCFEHLPGGDPDDGDVPLALLRGEPGLHLAPGTDDHNHHLALDPCLSDENYDFSSAESGSSLRYYSEGESGGGGSSLSLHPPQQPPLVPTNSGGGGATGGSPGERKRTRLGGPAARHRYEVVTELGPEEVRWFYKEDKKTWKPFIGYDSLRIELAFRTLLQTTGARPQGGDRDGDHVCSPTGPASSSGEDDDEDRACGFCQSTTGHEPEMVELVNIEPVCVRGGLYEVDVTQGECYPVYWNQADKIPVMRGQWFIDGTWQPLEEEESNLIEQEHLNCFRGQQMQENFDIEVSKSIDGKDGSGINYSAVHSFKLSRNHVDWHSVDEVYLYSDATTSKIARTVTQKLGFSKASSSGTRLHRGYVEEATLEDKPSQTTHIVFVVHGIGQKMDQGRIIKNTAMMREAARKIEERHFSNHATHVEFLPVEWRSKLTLDGDTVDSITPDKVRGLRDMLNSSAMDIMYYTSPLYRDELVKGLQQELNRLYSLFCSRNPDFEEKGGKVSIVSHSLGCVITYDIMTGWNPVRLYEQLLQKEEELPDERWMSYEERHLLDELYITKRRLKEIEERLHGLKASSMTQTPALKFKVENFFCMGSPLAVFLALRGIRPGNTGSQDHILPREICNRLLNIFHPTDPVAYRLEPLILKHYSNISPVQIHWYNTSNPLPYEHMKPSFLNPAKEPTSVSENEGISTIPSPVTSPVLSRRHYGESITNIGKASILGAASIGKGLGGMLFSRFGRSSTTQSSETSKDSMEDEKKPVASPSATTVGTQTLPHSSSGFLDSALELDHRIDFELREGLVESRYWSAVTSHTAYWSSLDVALFLLTFMYKHEHDDDAKPNLDPI

SEQ ID NO: 6909 - protein, 771 aa, Homo sapiens
MNYPGRGSPRSPEHNGRGGGGGAWELGSDARPAFGGGVCCFEHLPGGDPDDGDVPLALLRGEPGLHLAPGTDDHNHHLALDPCLSDENYDFSSAESGSSLRYYSEGESGGGGSSLSLHPPQQPPLVPTNSGGGLYEVDVTQGECYPVYWNQADKIPVMRGQWFIDGTWQPLEEEESNLIEQEHLNCFRGQQMQENFDIEVSKSIDGKDAVHSFKLSRNHVDWHSVDEVYLYSDATTSKIARTVTQKLGFSKASSSGTRLHRGYVEEATLEDKPSQTTHIVFVVHGIGQKMDQGRIIKNTAMMREAARKIEERHFSNHATHVEFLPVEWRSKLTLDGDTVDSITPDKVRGLRDMLNSSAMDIMYYTSPLYRDELVKGLQQELNRLYSLFCSRNPDFEEKGGKVSIVSHSLGCVITYDIMTGWNPVRLYEQLLQKEEELPDERWMSYEERHLLDELYITKRRLKEIEERLHGLKASSMTQTPALKFKVENFFCMGSPLAVFLALRGIRPGNTGSQDHILPREICNRLLNIFHPTDPVAYRLEPLILKHYSNISPVQIHWYNTSNPLPYEHMKPSFLNPAKEPTSVSENEGISTIPSPVTSPVLSRRHYGESITNIGKASILGAASIGKGLGGMLFSRFGRSSTTQSSETSKDSMEDEKKPVASPSATTVGTQTLPHSSSGFLDSAYFRLQESFFNLPQLLFPENVMQNKDNALVELDHRIDFELREGLVESRYWSAVTSHTAYWSSLDVALFLLTFMYKHEHDDDAKPNLDPI

SEQ ID NO: 6910 - protein, 392 aa, Homo sapiens
MGTTCLHLGTLEQSLVFENKVNSEKVKLSLRNFPHNDYEDVFEEPSESGSDPSMWTARGPFRRDRWSSEDEEAAGPSQALSPLLSDTRKIVSEGELDQLAQIRPLIFNFHEQTAIKDCLKILEEKTAAYDIMQEFMALELKNLPGEFNSGNQPSNREKNRYRDILPYDSTRVPLGKSKDYINASYIRIVNCGEEYFYIATQGPLLSTIDDFWQMVLENNSNVIAMITREIEGGIIKCYHYWPISLKKPLELKHFRVFLENYQILQYFIIRMFQVVEKSTGTSHSVKQLQFTKWPDHGTPASADSFIKYIRYARKSHLTGPMVVHCSAGIGRTGVFLCVDVVFCAIVKNCSFNIMDIVAQMREQRSGMVQTKEQYHFCYDIVLEVLRKLLTLD

SEQ ID NO: 6911 - protein, 206 aa, Homo sapiens
MSSPRDFRAEPVNDYEGNDSEAEDLNFRETLPSSSQENTPRSKVFENKVNSEKVKLSLRNFPHNDYEDVFEEPSESGSDPSMWTARGPFRRDRWSSEDEEAAGPSQALSPLLSDTRKIVSEGELDQLAQIRPLIFNFHEQTAIKDCLKILEEKTAAYDIMQEFMFNIMDIVAQMREQRSGMVQTKEQYHFCYDIVLEVLRKLLTLD

SEQ ID NO: 6912 - protein, 145 aa, Homo sapiens
MWTARGPFRRDRWSSEDEEAAGPSQALSPLLSDTRKIVSEGELDQLAQIRPLIFNFHEQTAIKDCLKILEEKTAAYDIMQEFMALELKNLPGEFNSGNQPSNREKNRYRDILPFQHHGYSGPNERTTFWHGSNEGAVSLLLRYCA

SEQ ID NO: 6913 - protein, 339 aa, Homo sapiens; identical to SEQ ID NO: 5550

SEQ ID NO: 6914 - protein, 348 aa, Homo sapiens
MQFGELLAAVRKAQANVMLFLEEKEQAALSQANGIKAHLEYRSAEMEKSKQELETMAAISNTVQFLEEYCKFKNTEDITFPSVYIGLKDKLSGIRKVITESTVHLIQLLENYKKKLQEFSKEEEYDIRTQVSAIVQRKYWTSKPEPSTREQFLQYVHDITFDPDTAHKYLRLQEENRKVTNTTPWEHPYPDLPSRFLHWRQVLSQQSLYLHRYYFEVEIFGAGTYVGLTCKGIDQKGEERSSCISGNNFSWSLQWNGKEFTAWYSDMETPLKAGPFWRLGVYIDFPGGILSFYGVEYDSMTLVHKFACKFSEPVYAAFWLSKKENAIRIVDLGEEPEKPAPSLVGTAP

SEQ ID NO: 6915 - protein, 348 aa, Homo sapiens; identical to SEQ ID NO: 6914

SEQ ID NO: 6916 - protein, 228 aa, Homo sapiens
MIDDSTRVPLGKSKDYINASYIRIVNCGEEYFYIATQGPLLSTIDDFWQMVLENNSNVIAMITREIEGGIIKCYHYWPISLKKPLELKHFRVFLENYQILQYFIIRMFQVVEKSTGTSHSVKQLQFTKWPDHGTPASADSFIKYIRYARKSHLTGPMVVHCSAGIGRTGVFLCVDVVFCAIVKNCSFNIMDIVAQMREQRSGMVQTKEQYHFCYDIVLEVLRKLLTLD

SEQ ID NO: 6917 - protein, 482 aa, Homo sapiens; identical to SEQ ID NO: 5986

SEQ ID NO: 6918 - protein, 339 aa, Homo sapiens; identical to SEQ ID NO: 5550

SEQ ID NO: 6919 - protein, 206 aa, Homo sapiens; identical to SEQ ID NO: 6911

SEQ ID NO: 6920 - protein, 145 aa, Homo sapiens; identical to SEQ ID NO: 6912

SEQ ID NO: 6921 - protein, 228 aa, Homo sapiens; identical to SEQ ID NO: 6916

SEQ ID NO: 6922 - protein, 933 aa, Homo sapiens
MFWKFDLNTTSHVDKLLDKEHVTLQELMDEDDILQECKAQNQKLLDFLCRQQCMEELVSLITQDPPLDMEEKVRFKYPNTACELLTCDVPQISDRLGGDESLLSLLYDFLDHEPPLNPLLASFFSKTIGNLIARKTEQVITFLKKKDKFISLVLKHIGTSALMDLLLRLVSCVEPAGLRQDVLHWLNEEKVIQRLVELIHPSQDEDRQSNASQTLCDIVRLGRDQGSQLQEALEPDPLLTALESRQDCVEQLLKNMFDGDRTESCLVSGTQVLLTLLETRRVGTEGLVDSFSQGLERSYAVSSSVLHGIEPRLKDFHQLLLNPPKKKAILTTIGVLEEPLGNARLHGARLMAALLHTNTPSINQELCRLNTMDLLLDLFFKYTWNNFLHFQVELCIAAILSHAAREERTEASGSESRVEPPHENGNRSLETPQPAASLPDNTMVTHLFQKCCLVQRILEAWEANDHTQAAGGMRRGNMGHLTRIANAVVQNLERGPVQTHISEVIRGLPADCRGRWESFVEETLTETNRRNTVDLAFSDYQIQQMTANFVDQFGFNDEEFADQDDNINAPFDRIAEINFNIDADEDSPSAALFEACCSDRIQPFDDDEDEDIWEDSDTRCAARVMARPRFGAPHASESCSKNGPERGGQDGKASLEAHRDAPGAGAPPAPGKKEAPPVEGDSEGAMWTAVFDEPANSTPTAPGVVRDVGSSVWAAGTSAPEEKGWAKFTDFQPFCCSESGPRCSSPVDTECSHAEGSRSQGPEKAFSPASPCAWNVCVTRKAPLLASDSSSSGGSHSEDGDQKAASAMDAVSRGPGREAPPLPTVARTEEAVGRVGCADSRLLSPACPAPKEVTAAPAVAVPPEATVAITTALSKAGPAIPTPAVSSALAVAVPLGPIMAVTAAPAMVATLGTVTKDGKTDAPPEGAALNGPV

SEQ ID NO: 6923 - protein, 932 aa, Homo sapiens
MFWKFDLNTTSHVDKLLDKEHVTLQELMDEDDILQECKAQNQKLLDFLCRQQCMEELVSLITQDPPLDMEEKVRFKYPNTACELLTCDVPQISDRLGGDESLLSLLYDFLDHEPPLNPLLASFFSKTIGNLIARKTEQVITFLKKKDKFISLVLKHIGTSALMDLLLRLVSCVEPAGLRQDVLHWLNEEKVIQRLVELIHPSQDEDRQSNASQTLCDIVRLGRDQGSQLQEALEPDPLLTALESQDCVEQLLKNMFDGDRTESCLVSGTQVLLTLLETRRVGTEGLVDSFSQGLERSYAVSSSVLHGIEPRLKDFHQLLLNPPKKKAILTTIGVLEEPLGNARLHGARLMAALLHTNTPSINQELCRLNTMDLLLDLFFKYTWNNFLHFQVELCIAAILSHAAREERTEASGSESRVEPPHENGNRSLETPQPAASLPDNTMVTHLFQKCCLVQRILEAWEANDHTQAAGGMRRGNMGHLTRIANAVVQNLERGPVQTHISEVIRGLPADCRGRWESFVEETLTETNRRNTVDLAFSDYQIQQMTANFVDQFGFNDEEFADQDDNINAPFDRIAEINFNIDADEDSPSAALFEACCSDRIQPFDDDEDEDIWEDSDTRCAARVMARPRFGAPHASESCSKNGPERGGQDGKASLEAHRDAPGAGAPPAPGKKEAPPVEGDSEGAMWTAVFDEPANSTPTAPGVVRDVGSSVWAAGTSAPEEKGWAKFTDFQPFCCSESGPRCSSPVDTECSHAEGSRSQGPEKAFSPASPCAWNVCVTRKAPLLASDSSSSGGSHSEDGDQKAASAMDAVSRGPGREAPPLPTVARTEEAVGRVGCADSRLLSPACPAPKEVTAAPAVAVPPEATVAITTALSKAGPAIPTPAVSSALAVAVPLGPIMAVTAAPAMVATLGTVTKDGKTDAPPEGAALNGPV

SEQ ID NO: 6924 - protein, 262 aa, Homo sapiens; identical to SEQ ID NO: 5940

SEQ ID NO: 6925 - protein, 905 aa, Homo sapiens
MEVQVSQASLGFELTSVEKSLREWSRLSREVIAWLCPSSPNFILNFPPPPSASSVSMVQLFSSPFGYQSPSGHSEEEREGNMKSAKPQVNHSQHGESQRALSPLQSTLSSAASPSQAYETYIENGLICLKHKIRNIEKKKLKLEDYKDRLKSGEHLNPDQLEAVEKYEEVLHNLEFAKELQKTFSGLSLDLLKAQKKAQRREHMLKLEAEKKKLRTILQVQYVLQNLTQEHVQKDFKGGLNGAVYLPSKELDYLIKFSKLTCPERNESLSVEDQMEQSSLYFWDLLEGSEKAVVGTTYKHLKDLLSKLLNSGYFESIPVPKNAKEKEVPLEEEMLIQSEKKTQLSKTESVKESESLMEFAQPEIQPQEFLNRRYMTEVDYSNKQGEEQPWEADYARKPNLPKRWDMLTEPDGQEKKQESFKSWEASGKHQEVSKPAVSLEQRKQDTSKLRSTLPEEQKKQEISKSKPSPSQWKQDTPKSKAGYVQEEQKKQETPKLWPVQLQKEQDPKKQTPKSWTPSMQSEQNTTKSWTTPMCEEQDSKQPETPKSWENNVESQKHSLTSQSQISPKSWGVATASLIPNDQLLPRKLNTEPKDVPKPVHQPVGSSSTLPKDPVLRKEKLQDLMTQIQGTCNFMQESVLDFDKPSSAIPTSQPPSATPGSPVASKEQNLSSQSDFLQEPLQAAIPPGKQPSSLASPNPPMAKGSEQGFQSPPASSSSVTINTAPFQAMQTVFNVNAPLPPRKEQEIKESPYSPGYNQSFTTASTQTPPQCQLPSIHVEQTVHSQETAQTNVFPRPTQPFVNSRGSVRGCTRGGRLITNSYRSPGGYKGFDTYRGLPSISNGNYSQLQFQAREYSGAPYSQRDNFQQCYKRGGTSGGPRANSRANCFIMRNSLLLIKQQGGVILLR

SEQ ID NO: 6926 - protein, 368 aa, Homo sapiens; identical to SEQ ID NO: 6275

SEQ ID NO: 6927 - protein, 368 aa, Homo sapiens; identical to SEQ ID NO: 6275

SEQ ID NO: 6928 - protein, 914 aa, Homo sapiens
MSSSGYPPNQGAFSTEQSRYPPHSVQYTFPNTRHQQDPAFGGKHEAPSSPISGQPCGDDQNASPSKLSKEELIQSMDRVDREIAKVEQQILKLKKKQQQLEEEAAKPPEPEKPVSPPPVEQKHRSIVQIIYDENRKKAEEAHKIFEGLGPKVELPLYNQPSDTKVYHENIKTNQVMRKKLILFFKRRNHARKQREQKICQRYDQLMEAWEKKVDRIENNPRRKAKESKTREYYEKQFPEIRKQREQQERFQRVGQRGAGLSATIARSEHEISEIIDGLSEQENNEKQMRQLSVIPPMMFDAEQRRVKFINMNGLMEDPMKVYKDRQFMNVWTDHEKEIFKDKFIQHPKNFGLIASYLERKSVPDCVLYYYLTKKNENYKALVRRNYGKRRGRNQQIARPSQEEKVEEKEEDKAEKTEKKEEEKKDEEEKDEKEDSKENTKEKDKIDGTAEETEEREQATPRGRKTANSQGRRKGRITRSMTNEAAAASAAAAAATEEPPPPLPPPPEPISTEPVETSRWTEEEMEVAKKGLVEHGRNWAAIAKMVGTKSEAQCKNFYFNYKRRHNLDNLLQQHKQKTSRKPREERDVSQCESVASTVSAQEDEDIEASNEEENPEDSEGAENSSDTESAPSPSPVEAVKPSEDSPENATSRGNTEPAVELEPTTETAPSTSPSLAVPSTKPAEDESVETQVNDSISAETAEQMDVDQQEHSAEEGSVCDPPPATKADSVDVEVRVPENHASKVEGDNTKERDLDRASEKVEPRDEDLVVAQQINAQRPEPQSDNDSSATCSADEDVDGEPERQRMFPMDSKPSLLNPTGSILVSSPLKPNPLDLPQLQHRAAVIPPMVSCTPCNIPIGTPVSGYALYQRHIKAMHESALLEEQRQRQEQIDLECRSSTSPCGTSKSPNREWEGR

SEQ ID NO: 6929 - protein, 2341 aa, Homo sapiens
MSSSGYPPNQGAFSTEQSRYPPHSVQYTFPNTRHQQDPAFGGKHEAPSSPISGQPCGDDQNASPSKLSKEELIQSMDRVDREIAKVEQQILKLKKKQQQLEEEAAKPPEPEKPVSPPPVEQKHRSIVQIIYDENRKKAEEAHKIFEGLGPKVELPLYNQPSDTKVYHENIKTNQVMRKKLILFFKRRNHARKQREQKICQRYDQLMEAWEKKVDRIENNPRRKAKESKTREYYEKQFPEIRKQREQQERFQRVGQRGAGLSATIARSEHEISEIIDGLSEQENNEKQMRQLSVIPPMMFDAEQRRVKFINMNGLMEDPMKVYKDRQFMNVWTDHEKEIFKDKFIQHPKNFGLIASYLERKSVPDCVLYYYLTKKNENYKALVRRNYGKRRGRNQQIARPSQEEKVEEKEEDKAEKTEKKEEEKKDEEEKDEKEDSKENTKEKDKIDGTAEETEEREQATPRGRKTANSQGRRKGRITRSMTNEAAAASAAAAAATEEPPPPLPPPPEPISTEPVETSRWTEEEMEVAKKGLVEHGRNWAAIAKMVGTKSEAQCKNFYFNYKRRHNLDNLLQQHKQKTSRKPREERDVSQCESVASTVSAQEDEDIEASNEEENPEDSEGAENSSDTESAPSPSPVEAVKPSEDSPENATSRGNTEPAVELEPTTETAPSTSPSLAVPSTKPAEDESVETQVNDSISAETAEQMDVDQQEHSAEEGSVCDPPPATKADSVDVEVRVPENHASKVEGDNTKERDLDRASEKVEPRDEDLVVAQQINAQRPEPQSDNDSSATCSADEDVDGEPERQRMFPMDSKPSLLNPTGSILVSSPLKPNPLDLPQLQHRAAVIPPMVSCTPCNIPIGTPVSGYALYQRHIKAMHESALLEEQRQRQEQIDLECRSSTSPCGTSKSPNREWEVLQPAPHQVITNLPEGVRLPTTRPTRPPPPLIPSSKTTVASEKPSFIMGGSISQGTPGTYLTSHNQASYTQETPKPSVGSISLGLPRQQESAKSATLPYIKQEEFSPRSQNSQPEGLLVRAQHEGVVRGTAGAIQEGSITRGTPTSKISVESIPSLRGSITQGTPALPQTGIPTEALVKGSISRMPIEDSSPEKGREEAASKGHVIYEGKSGHILSYDNIKNAREGTRSAAAHEISLKRSYESVEGNIKQGMSMRESPVSAPLEGLICRALPRGSPHSDLKERTVLSGSIMQGTPRATTESFEDGLKYPKQIKRESPPIRAFEGAITKGKPYDGITTIKEMGRSIHEIPRQDILTQESRKTPEVVQSTRPIIEGSISQGTPIKFDNNSGQSAIKHNVKSLITGPSKLSRGMPPLEIVPENIKVVERGKYEDVKAGETVRSRHTSVVSSGPSVLRSTLHEAPKAQLSPGIYDDTSARRTPVSYQNTMSRGSPMMNRTSDVSSNKSTNHERKSTLTPTQRESIPAKSPVPGVDPVVSHSPFDPHHRGSTAGEVYRSHLPTHLDPAMPFHRALDPAAAYLFQRQLSPTPGYPSQYQLYAMENTRQTILNDYITSQQMQVNLRPDVARGLSPREQPLGLPYPATRGIIDLTNMPPTILVPHPGGTSTPPMDRITYIPGTQITFPPRPYNSASMSPGHPTHLAAAASAEREREREREKERERERIAAASSDLYLRPGSEQPGRPGSHGYVRSPSPSVRTQETMLQQRPSVFQGTNGTSVITPLDPTAQLRIMPLPAGGPSISQGLPASRYNTAADALAALVDAAASAPQMDVSKTKESKHEAARLEENLRSRSAAVSEQQQLEQKTLEVEKRSVQCLYTSSAFPSGKPQPHSSVVYSEAGKDKGPPPKSRYEEELRTRGKTTITAANFIDVIITRQIASDKDARERGSQSSDSSSSLSSHRYETPSDAIEVISPASSPAPPQEKLQTYQPEVVKANQAENDPTRQYEGPLHHYRPQQESPSPQQQLPPSSQAEGMGQVAAHRLITLADHICQIITQDFARNQVSSQTPQQPPTSTFQNSPSALVSTPVRTKTSNRYSPESQAQSVHHQRPGSRVSPENLVDKSRGSRPGKSPERSHVSSEPYEPISPPQVPVVHEKQDSLLLLSQRGAEPAEQRNDARSPGSISYLPSFFTKLENTSPMVKSKKQEIFRKLNSSGGGDSDMAAAQPGTEIFNLPAVTTSGSVSSRGHSFADPASNLGLEDIIRKALMGSFDDKVEDHGVVMSQPMGVVPGTANTSVVTSGETRREEGDPSPHSGVCKPKLISKSNSRKSKSPIPGQGYLGTERPSSVSSVHSEGDYHRQTPGWAWEDRPSSTGSTQFPYNPLTMRMLSSTPPTPIACAPSAVNQAAPHQQNRIWEREPAPLLSAQYETLSDSDD

SEQ ID NO: 6930 - protein, 2339 aa, Homo sapiens
MSSSGYPPNQGAFSTEQSRYPPHSVQYTFPNTRHQQEFAVPDYRSSHLEVSQASQLLQQQQQQQLRRRPSLLSEFHPGSDRPQERRTSYEPFHPGPSPVDHDSLESKRPRLEQVSDSHFQRVSAAVLPLVHPLPEGLRASADAKKDPAFGGKHEAPSSPISGQPCGDDQNASPSKLSKEELIQSMDRVDREIAKVEQQILKLKKKQQQLEEEAAKPPEPEKPVSPPPVEQKHRSIVQIIYDENRKKAEEAHKIFEGLGPKVELPLYNQPSDTKVYHENIKTNQVMRKKLILFFKRRNHARKQREQKICQRYDQLMEAWEKKVDRIENNPRRKAKESKTREYYEKQFPEIRKQREQQERFQRVGQRGAGLSATIARSEHEISEIIDGLSEQENNEKQMRQLSVIPPMMFDAEQRRVKFINMNGLMEDPMKVYKDRQFMNVWTDHEKEIFKDKFIQHPKNFGLIASYLERKSVPDCVLYYYLTKKNENYKALVRRNYGKRRGRNQQIARPSQEEKVEEKEEDKAEKTEKKEEEKKDEEEKDEKEDSKENTKEKDKIDGTAEETEEREQATPRGRKTANSQGRRKGRITRSMTNEAAAASAAAAAATEEPPPPLPPPPEPISTEPVETSRWTEEEMEVAKKGLVEHGRNWAAIAKMVGTKSEAQCKNFYFNYKRRHNLDNLLQQHKQKTSRKPREERDVSQCESVASTVSAQEDEDIEASNEEENPEDSEGAENSSDTESAPSPSPVEAVKPSEDSPENATSRGNTEPAVELEPTTETAPSTSPSLAVPSTKPAEDESVETQVNDSISAETAEQMDVDQQEHSAEEGSVCDPPPATKADSVDVEVRVPENHASKVEGDNTKERDLDRASEKVEPRDEDLVVAQQINAQRPEPQSDNDSSATCSADEDVDGEPERQRMFPMDSKPSLLNPTGSILVSSPLKPNPLDLPQLQHRAAVIPPMVSCTPCNIPIGTPVSGYALYQRHIKAMHESALLEEQRQRQEQIDLECRSSTSPCGTSKSPNREWEVLQPAPHQVITNLPEGVRLPTTRPTRPPPPLIPSSKTTVASEKPSFIMGGSISQGTPGTYLTSHNQASYTQETPKPSVGSISLGLPRQQESAKSATLPYIKQEEFSPRSQNSQPEGLLVRAQHEGVVRGTAGAIQEGSITRGTPTSKISVESIPSLRGSITQGTPALPQTGIPTEALVKGSISRMPIEDSSPEKGREEAASKGHVIYEGKSGHILSYDNIKNAREGTRSAAAHEISLKRSYESVEGNIKQGMSMRESPVSAPLEGLICRALPRGSPHSDLKERTVLSGSIMQGTPRATTESFEDGLKYPKQIKRESPPIRAFEGAITKGKPYDGITTIKEMGRSIHEIPRQDILTQESRKTPEVVQSTRPIIEGSISQGTPIKFDNNSGQSAIKHNVKSLITGPSKLSRGMPPLEIVPENIKVVERGKYEDVKAGETVRSRHTSVVSSGPSVLRSTLHEAPKAQLSPGIYDDTSARRTPVSYQNTMSRGSPMMNRTSDVTISSNKSTNHERKSTLTPTQRESIPAKSPVPGVDPVVSHSPFDPHHRGSTAGEVYRSHLPTHLDPAMPFHRALDPAAAAYLFQRQLSPTPGYPSQYQLYAMENTRQTILNDYITSQQMQVNLRPDVARGLSPREQPLGLPYPATRGIIDLTNMPPTILVPHPGGTSTPPMDRITYIPGTQITFPPRPYNSASMSPGHPTHLAAAASAEREREREREKERERERIAAASSDLYLRPGSEQPGRPGSHGYVRSPSPSVRTQETMLQQRPSVFQGTNGTSVITPLDPTAQLRIMPLPAGGPSISQGLPASRYNTAADALAALVDAAASAPQMDVSKTKEISSHRYETPSDAIEVISPASSPAPPQEKLQTYQPEVVKANQAENDPTRQYEGPLHHYRPQQESPSPQQQLPPSSQAEGMGQVAAHRLITLADHICQIITQDFARNQVSSQTPQQPPTSTFQNSPSALVSTPVRTKTSNRYSPESQAQSVHHQRPGSRVSPENLVDKSRGSRPGKSPERSHVSSEPYEPISPPQVPVVHEKQDSLLLLSQRGAEPAEQRNDARSPGSISYLPSFFTKLENTSPMVKSKKQEIFRKLNSSGGGDSDMAAAQPGTEIFNLPAVTTSGSVSSRGHSFADPASNLGLEDIIARGSALMGSFDDKVEDHGVVMSQPMGVVPGTANTSVVTSGETRREEGDPSPHSGGVCKPKLISKSNSARGSSKSPIPGQGYLGTERPSSVSSVHSEGDYHRQTPGWAWEDRPSSTGSTQFPYNPLTMRMLSSTPPTPIACAPSAVNQAAPHQQNRIWEREPAPLLSAQYETLSDSDD

SEQ ID NO: 6931 - protein, 1023 aa, Homo sapiens
MPPLEIVPENIKVVERGKYEDVKAGETVRSRHTSVVSSGPSVLRSTLHEAPKAQLSPGIYDDTSARRTPVSYQNTMSRGSPMMNRTSDVTISSNKSTNHERKSTLTPTQRESIPAKSPVPGVDPVVSHSPFDPHHRGSTAGEVYRSHLPTHLDPAMPFHRALDPAAAAYLFQRQLSPTPGYPSQYQLYAMENTRQTILNDYITSQQMQVNLRPDVARGLSPREQPLGLPYPATRGIIDLTNMPPTILVPHPGGTSTPPMDRITYIPGTQITFPPRPYNSASMSPGHPTHLAAAASAEREREREREKERERERIAAASSDLYLRPGSEQPGRPGSHGYVRSPSPSVRTQETMLQQRPSVFQGTNGTSVITPLDPTAQLRIMPLPAGGPSISQGLPASRYNTAADALAALVDAAASAPQMDVSKTKESKHEAARLEENLRSRSAAVSEQQQLEQKTLEVEKRSVQCLYTSSAFPSGKPQPHSSVVYSEAGKDKGPPPKSRYEEELRTRGKTTITAANFIDVIITRQIASDKDARERGSQSSDSSSSLSSHRYETPSDAIEVISPASSPAPPQEKLQTYQPEVVKANQAENDPTRQYEGPLHHYRPQQESPSPQQQLPPSSQAEGMGQVAAHRLITLADHICQIITQDFARNQVSSQTPQQPPTSTFQNSPSALVSTPVRTKTSNRYSPESQAQSVHHQRPGSRVSPENLVDKSRGSRPGKSPERSHVSSEPYEPISPPQVPVVHEKQDSLLLLSQRGAEPAEQRNDARSPGSISYLPSFFTKLENTSPMVKSKKQEIFRKLNSSGGGDSDMAAAQPGTEIFNLPAVTTSGSVSSRGHSFADPASNLGLEDIIRKALMGSFDDKVEDHGVVMSQPMGVVPGTANTSVVTSGETRREEGDPSPHSGGVCKPKLISKSNSRKSKSPIPGQGYLGTERPSSVSSVHSEGDYHRQTPGWAWEDRPSSTGSTQFPYNPLTMRMLSSTPPTPIACAPSAVNQAAPHQQNRIWEREPAPLLSAQYETLSDSDD

SEQ ID NO: 6932 - protein, 1605 aa, Homo sapiens
MLLHLCSVKNLYQNRFLGLAAMASPSRNSQSRRRCKEPLRYSYNPDQFHNMDLRGGPHDGVTIPRSTSDTDLVTSDSRSTLMVSSSYYSIGHSQDLVIHWDIKEEVDAGDWIGMYLIDEVLSENFLDYKNRGVNGSHRGQIIWKIDASSYFVEPETKICFKYYHGVSGALRATTPSVTVKNSAAPIFKSIGADETVQGQGSRRLISFSLSDFQAMGLKKGMFFNPDPYLKISIQPGKHSIFPALPHHGQERRSKIIGNTVNPIWQAEQFSFVSLPTDVLEIEVKDKFAKSRPIIKRFLGKLSMPVQRLLERHAIGDRVVSYTLGRRLPTDHVSGQLQFRFEITSSIHPDDEEISLSTEPESAQIQDSPMNNLMESGSGEPRSEAPESSESWKPEQLGEGSVPDGPGNQSIELSRPAEEAAVITEAGDQGMVSVGPEGAGELLAQVQKDIQPAPSAEELAEQLDLGEEASALLLEDGEAPASTKEEPLEEEATTQSRAGREEEEKEQEEEGDVSTLEQGEGRLQLRASVKRKSRPCSLPVSELETVIASACGDPETAAHYIRIHTLLHSMPSAQGGSAAEEEDGAEEESTLKDSSEKDGLSEVDTVAADPSALEEDREEPEGATPGTAHPGHSGGHFPSLANGAAQDGDTHPSTGSESDSSPRQGGDHSCEGCDASCCSPSCYSSSCYSTSCYSSSCYSASCYSPSCYNGNRFASHTRFSSVDSAKISESTVFSSQDDEEEENSAFESVPDSMQSPELDPESTNGAGPWQDELAAPSGHVERSPEGLESPVAGPSNRREGECPILHNSQPVSQLPSLRPEHHHYPTIDEPLPPNWEARIDSHGRVFYVDHVNRTTTWQRPTAAATPDGMRRSGSIQQMEQLNRRYQNIQRTIATERSEEDSGSQSCEQAPAGGGGGGGSDSEAESSQSSLDLRREGSLSPVNSQKITLLLQSPAVKFITNPEFFTVLHANYSAYRVFTSSTCLKHMILKVRRDARNFERYQHNRDLVNFINMFADTRLELPRGWEIKTDQQGKSFFVDHNSRATTFIDPRIPLQNGRLPNHLTHRQHLQRLRSYSAGEASEVSRNRGASLLARPGHSLVAAIRSQHQHESLPLAYNDKIVAFLRQPNIFEMLQERQPSLARNHTLREKIHYIRTEGNHGLEKLSCDADLVILLSLFEEEIMSYVPLQAAFHPGYSFSPRCSPCSSPQNSPGLQRASARAPSPYRRDFEAKLRNFYRKLEAKGFGQGPGKIKLIIRRDHLLEGTFNQVMAYSRKELQRNKLYVTFVGEEGLDYSGPSREFFFLLSQELFNPYYGLFEYSANDTYTVQISPMSAFVENHLEWFRFSGRILGLALIHQYLLDAFFTRPFYKALLRLPCDLSDLEYLDEEFHQSLQWMKDNNITDILDLTFTVNEEVFGQVTERELKSGGANTQVTEKNKKEYIERMVKWRVERGVVQQTEALVRGFYEVVDSRLVSVFDARELELVIAGTAEIDLNDWRNNTEYRGGYHDGHLVIRWFWAAVERFNNEQRLRLLQFVTGTSSVPYEGFAALRGSNGLRRFCIEKWGKITSLPRAHTCFNRLDLPPYPSYSMLYEKLLTAVEETSTFGLE

SEQ ID NO: 6933 - protein, 402 aa, Homo sapiens
MAALCRTAESQAELQCTQLDLERKLKLNENAISRLQANQKSVLVSVSEVKAVAEMQFGELLAAVRKAQANVMLFLEEKEQAALSQANGIKAHLEYRSAEMEKSKQELETMAAISNTVQFLEEYCKFKNTEDITFPSVYIGLKDKLSGIRKVITESTVHLIQLLENYKKKLQEFSKEEEYDIRTQVSAIVQRKYWTSKPEPSTREQFLQYVHDITFDPDTAHKYLRLQEENRKVTNTTPWEHPYPDLPSRFLHWRQVLSQQSLYLHRYYFEVEIFGAGTYVGLTCKGIDQKGEERSSCISGNNFSWSLQWNGKEFTAWYSDMETPLKAGPFWRLGVYIDFPGGILSFYGVEYDSMTLVHKFACKFSEPVYAAFWLSKKENAIRIVDLGEEPEKPAPSLVGTAP

SEQ ID NO: 6934 - protein, 558 aa, Homo sapiens
MHRSAPSQTTKRSRSPFSTTRRSWDDSESSGTNLNIDNEDYSRYPPREYRASGSRRGMAYGHIDSYGADDSEEEGAGPVERPPVRGKTGKFKDDKLLDPVPAARCSASRADFLPQSSVASQSSSEGKLATKGDSSERERREQNLPARPSRAPVSICGGGENTSKSAEEPVVRPKIRNLASPNCVKPKIFFDTDDDDDMPHSTSRWRDTANDNEGHSDGLARRGRGESSSGYPEPKYPEDKREARSDQVKPEKVPRRRRTMADPDFWTHSDDYYKYCDEDSDSDKEWIAALRRKYRSREQTLSSSGESWETLPGKEEREPPQAKVSASTGTSPGPGASASAGAGAGASAGSNGSNYLEEVREPSLQEEQASLEEGEIPWLQYHENDSSSEGDNDSGHELMQPGVFMLDGNNNLEDDSSVSEDLEVDWSLFDGFADGLGVAEAISYVDPQFLTYMALEERLAQAMETALAHLESLAVDVEVANPPASKESIDALPEILVTEDHGAVGQEMCCPICCSEYVKGEVATELPCHHYFHKPCVSIWLQKSGTCPVCRCMFPPPL

SEQ ID NO: 6935 - protein, 1196 aa, Homo sapiens
VPPCPAELRSVTNGQSNQPSNEGDAIKVFVRIRPPAERSGSADGEQNLCLSVLSSTSLRLHSNPEPKTFTFDHVADVDTTQESVFATVAKSIVESCMSGYNGTIFAYGQTGSGKTFTMMGPSESDNFSHNLRGVIPRSFEYLFSLIDREKEKAGAGKSFLCKCSFIEIYNEQIYDLLDSASAGLYLREHIKKGVFVVGAVEQVVTSAAEAYQVLSGGWRNRRVASTSMNRESSRSHAVFTITIESMEKSNEIVNIRTSLLNLVDLAGSERQKDTHAEGMRLKEAGNINRSLSCLGQVITALVDVGNGKQRHVCYRDSKLTFLLRDSLGGNAKTAIIANVHPGSRCFGETLSTLNFAQRAKLIKNKAVVNEDTQGNVSQLQAEVKRLKEQLAELASGQTPPESFLTRDKKKTNYMEYFQEAMLFFKKSEQEKKSLIEKVTQLEDLTLKKEKFIQSNKMIVKFREDQIIRLEKLHKESRGGFLPEEQDRLLSELRNEIQTLREQIEHHPRVAKYAMENHSLREENRRLRLLEPVKRAQEMDAQTIAKLEKAFSEISGMEKSDKNQQGFSPKAQKEPCLFANTEKLKAQLLQIQTELNNSKQEYEEFKELTRKRQLELESELQSLQKANLNLENLLEATKACKRQEVSQLNKIHAETLKIITTPTKAYQLHSRPVPKLSPEMGSFGSLYTQNSSILDNDILNEPVPPEMNEQAFEAISEELRTVQEQMSALQAKLDEEEHKNLKLQQHVDKLEHHSTQMQELFSSERIDWTKQQEELLSQLNVLEKQLQETQTKNDFLKSEVHDLRVVLHSADKELSSVKLEYSSFKTNQEKEFNKLSERHMHVQLQLDNLRLENEKLLESKACLQDSYDNLQEIMKFEIDQLSRNLQNFKKENETLKSDLNNLMELLEAEKERNNKLSLQFEEDKENSSKEILKVLEAVRQEKQKETAKCEQQMAKVQKLEESLLATEKVISSLEKSRDSDKKVVADLMNQIQELRTSVCEKTETIDTLKQELKDINCKYNSALVDREESRVLIKKQEVDILDLKETLRLRILSEDIERDMLCEDLAHATEQLNMLTEASKKHSGLLQSAQRTDQEGSPDSGTSAQAKPKERGSRTEEEYNFKMRQLEHVMDSAAEDPQSPKTPPHFQTHLAKLLETQEQEIEDGRASKTSLEHLVTKLNEDREVKNAEILRMKEQLR

SEQ ID NO: 6936 - protein, 1087 aa, Homo sapiens
MDPFTEKLLERTRARRENLQRKMAERPTAAPRSMTHAKRARQPLSEASNQQPLSGGEEKSCTKPSPSKKRCSDNTEVEVSNLENKQPVESTSAKSCSPSPVSPQVQPQAADTISDSVAVPASLLGMRRGLNSRLEATAASSVKTRMQKLAEQRRRWDNDDMTDDIPESSLFSPMPSEEKAASPPRPLLSNASATPVGRRGRLANLAATICSWEDDVNHSFAKQNSVQEQPGTACLSKFSSASGASARINSSSVKQEATFCSQRDGDASLNKALSSSADDASLVNASISSSVKATSPVKSTTSITDAKSCEGQNPELLPKTPISPLKTGVSKPIVKSTLSQTVPSKGELSREICLQSQSKDKSTTPGGTGIKPFLERFGERCQEHSKESPARSTPHRTPIITPNTKAIQERLFKQDTSSSTTHLAQQLKQERQKELACLRGRFDKGNIWSAEKGGNSKSKQLETKQETHCQSTPLKKHQGVSKTQSLPVTEKVTENQIPAKNSSTEPKEVIREIEMSVDDDDINSSKVINDLFSDVLEEGELDMEKSQEEMDQALAESSEEQEDALNISSMSLLAPLAQTVGVVSPESLVSTPRLELKDTSRSDESPKPGKFQRTRVPRAESGDSLGSEDRDLLYSIDAYRSQRFKETERPSIKQVIVRKEDVTSKLDEKNNAFPCQVNIKQKMQELNNEINMQQTVIYQASQALNCCVDEEHGKGSLEEAEAERLLLIATGKRTLLIDELNKLKNEGPQRKNKASPQSEFMPSKGSVTLSEIRLPLKADFVCSTVQKPDAANYYYLIILKAGAENMVATPLASTSNSLNGDALTFTTTFTLQDVSNDFEINIEVYSLVQKKDPSGLDKKKKTSKSKAITPKRLLTSITTKSNIHSSVMASPGGLSAVRTSNFALVGSYTLSLSSVGNTKFVLDKVPFLSSLEGHIYLKIKCQVNSSVEERGFLTIFEDVSGFGAWHRRWCVLSGNCISYWTYPDDEKRKNPIGRINLANCTSRQIEPANREFCARRNTFELITVRPQREDDRETLVSQCRDTLCVTKNWLSADTKEERDLWMQKLNQVLVDIRLWQPDACYKPIGKP

SEQ ID NO: 6937 - protein, 215 aa, Homo sapiens [sequence omitted]

SEQ ID NO: 6938 - protein, 991 aa, Homo sapiens
MEEYEKFCEKSLARIQEASLSTESFLPAQSESISLIRFHGVAILSPLLNIEKRKEMQQEKQKALDVEARKQVNRKKALLTRVQEILDNVQVRKAPNASDFDQWEMETVYSNSEVRNLNVPATFPNSFPSHTEHSTAAKLDKIAGILPLDNEDQCKTDGIDLARDSEGFNSPKQCDSSNISHVENEAFPKTSSATPQETLISDGPFSVNEQQDLPLLAEVIPDPYVMSLQNLMKKSKEYIEREQSRRSLRGSINRIVNESHLDKEHDAVEVADCVKEKGQLTGKHCVSVIPDKPSLNKSNVLLQGASTQASSMSMPVLASFSKVDIPIRTGHPTVLESNSDFKVIPTFVTENNVIKSLTGSYAKLPSPEPSMSPKMHRRRSRTSSACHILINNPINACELSPKGKEQAMDLIIQDTDENTNVPEIMPKLPTDLAGVCSSKVYVGKNTSEVKEDVVLGKSNQVCQSSGNHLENKVTHGLVTVEGQLTSDERGAHIMNSTCAAMPKLHEPYASSQCIASPNFGTVSGLKPASMLEKNCSLQTELNKSYDVKNPSPLLMQNQNTRQQMDTPMVSCGNEQFLDNSFEKVKRRLDLDIDGLQKENCPYVITSGITEQERQHLPEKRYPKGSGFVNKNKMLGTSSKESEELLKSKMLAFEEMRKRLEEQHAQQLSLLIAEQEREQERLQKEIEEQEKMLKEKKAMTAEASELDINNAVELEWRKISDSSLLETMLSQADSLHTSNSNSSGFTNSAMQYSFVSANEAPFYLWGSSTSGLTKLSVTRPFGRAKTRWSQVFSLEIQAKFNKITAVAKGFLTRRLMQTDKLKQLRQTVKDTMEFIRSFQSEAPLKRGIVSAQDASLQERVLAQLRAALYGIHDIFFVMDAAERMSILHHDREVRKEKMLRQMDKMKSPRVALSAATQKSLDRKKYMKAAEMGMPNKKFLVKQNPSETRVLQPNQGQNAPVHRLLSRQGSICRKNPKKAAKCCDNLRRQHSLG

SEQ ID NO: 6939 - protein, 991 aa, Homo sapiens; identical to SEQ ID NO: 6938

SEQ ID NO: 6940 - protein, 332 aa, Homo sapiens; identical to SEQ ID NO: 5059

SEQ ID NO: 6941 - protein, 295 aa, Homo sapiens; identical to SEQ ID NO: 4972

SEQ ID NO: 6942 - protein, 455 aa, Homo sapiens
MEGVLYKWTNYLSGWQPRWFLLCGGILSYYDSPEDAWKGCKGSIQMAVCEIQVHSVDNTRMDLIIPGEQYFYLKARSVAERQRWLVALGSAKACLTDSRTQKEKEFAENTENLKTKMSELRLYCDLLVQQVDKTKEVTTTGVSNSEEGIDVGTLLKSTCNTFLKTLEECMQIANAAFTSELLYRTPPGSPQLAMLKSSKMKHPIIPIHNSLERQMELSTCENGSLNMEINGEEEILMKNKNSLYLKSAEIDCSISSEENTDDNITVQGEIRKEDGMENLKNHDNNLTQSGSDSSCSPECLWEEGKEVIPTFFSTMNTSFSDIELLEDSGIPTEAFLASCYAVVPVLDKLGPTVFAPVKMDLVGNIKKVNQKYITNKEEFTTLQKIVLHEVEADVAQVRNSATEALLWLKRGLKFLKGFLTEVKNGEKDIQTALNNAYGKTLRQHHGWVVRGVFAV

SEQ ID NO: 6943 - protein, 439 aa, Homo sapiens
MEGVLYKWTNYLSGWQPRWFLLCGGILSYYDSPEDAWKGCKGSIQMAVCEIQVHSVDNTRMDLIIPGEQYFYLKARSVAERQRWLVALGSAKACLTDSRTQKEKEFAENTENLKTKMSELRLYCDLLVQQVDKTKEVTTTGVSNSEEGIDVGTLLKSTCNTFLKTLEECMQIANAAFTSELLYRTPPGSPQLAMLKSSKMKHPIIPIHNSLERQMELSTCENGSLNMEINGEEEILMKNKNSLYLKSAEIDCSISSEENTDDNITVQGEIRKEDGMENLKNHDNNLTQSGSDSSCSPECLWEEGKEVIPTFFSTMNTSFSDIELLEDSGIPTEAFLASCYAVVPVLDKLGPTVFAPVKMDLVGNIKKVNQKYITNKEEFTTLQKIVLHEVEADVAQVRNSATEALLWLKRGLKFLKGFLTEVKNGEKDIQTALSVGMWV

SEQ ID NO: 6944 - protein, 327 aa, Homo sapiens; identical to SEQ ID NO: 5293

SEQ ID NO: 6945 - protein, 1742 aa, Homo sapiens
MMEGNGTENSCSRTRGWLQQDNDAKPWLWKFSNCFSRPEQTLPHSPQTKEYMENKKVAVELKDVPSPLHAGSKLFPAVPLPDIRSLQQPKIQLSSVPKVSCCAHCPNEPSTSPMRFGGGGGGSGGTSSLIHPGALLDSQSTRTITCQVGSGFAFQSASSLQNASARNNLAGIASDFPSMCLESNLSSCKHLPCCGKLHFQSCHGNVHKLHQFPSLQGCTSAGYFPCSDFTSGAPGHLEEHISQSELTPHLCTNSLHLNVVPPVCLKGSLYCEDCLNKPARNSIIDAAKVWPNIPPPNTQPAPLAVPLCNGCGTKGTGKETTLLLATSLGKAASKFGSPEVAVAGQVLENLPPIGVFWDIENCSVPSGRSATAVVQRIREKFFKGHREAEFICVCDISKENKEVIQELNNCQVTVAHINATAKNAADDKLRQSLRRFANTHTAPATVVLVSTDVNFALELSDLRHRHGFHIILVHKNQASEALLHHANELIRFEEFISDLPPRLPLKMPQCHTLLYVYNLPANKDGKSVSNRLRRLSDNCGGKVLSITGCSAILRFINQDSAERAQKRMENEDVFGNRIIVSFTPKNRELCETKSSNAIADKVKSPKKLKNPKLCLIKDASEQSSSAKATPGKGSQANSGSATKNTNVKSLQELCRMESKTGHRNSEHQQGHLRLVVPTHGNSSAAVSTPKNSGVAEPVYKTSQKKENLSARSVTSSPVEKKDKEETVFQVSYPSAFSKLVASRQVSPLLASQSWSSRSMSPNLLNRASPLAFNIANSSSEADCPDPFANGADVQVSNIDYRLSRKELQQLLQEAFARHGKVKSVELSPHTDYQLKAVVQMENLQDAIGAVNSLHRYKIGSKKILVSLATGAASKSLSLLSAETMSVLQDAPACCLPLFKFTDIYEKKFGHKLNVSDLYKLTDTVAIREQGNGRLVCLLPSSQARQSPLGSSQSHDGSSTNCSPIIFEELEYHEPVCRQHCSNKDFSEHEFDPDSYKIPFVILSLKTFAPQVHSLLQTHEGTVPLLSFPDCYIAEFGDLEVVQENQGGVPLEHFITCVPGVNIATAQNGIKVVKWIHNKPPPPNTDPWLLRSKSPVGNPQLIQFSREVIDLLKSQPSCVIPISHFIPSYHHHFAKQCRVSDYGYSKLIELLEAVPHVLQILGMGSKRLLTLTHRAQVKRFTQDLLKLLKSQASKQVIVREFSQAYHWCFSKDWDVTEYGVCELIDIVSEIPDTTICLSQQDNEMVICIPKRERTQDEIERTKQFSKDVVDLLRHQPHFRMPFNKFIPSYHHHFGRQCKLAYYGFTKLLELFEAIPDTLQVLECGEEKILTLTEVERFKALAAQFVKLLRSQKDNCLMMTDLLTEYAKTFGYTFRLQDYDVSSISALTQKLCHVVKVADIESGRQIQLINRKSLRSLTAQLLVLLMSWEGTTHLSVEELKRHYESTHNTPLNPCEYGFMTLTELLKSLPYLVEVFTNDKMEECVKLTSLYLFAKNVRSLLHTYHYQQIFLHEFSMAYTKYVGETLQPKTYGHSSVEELLGAIPQVVWIKGHGHKRIVVLKNDMKSRLSSLSLSPANHENQPSEGERILEVPESHTASELKLGADGSGPSHTEQELLRLTDDSPVDLLCAPVPSCLPSPQLRPDPVILQSADLIQFEERPQEPSEIMILNQEEKMEIPIPGKSKTLTSDSSSSCISAAVPVPPCPSSETSESLLSKDPVESPAKKQPKNRVKLAANFSLAPITKL

SEQ ID NO: 6946 - protein, 276 aa, Homo sapiens
MCSTSGCDLEEIPLDDDDLNTIEFKILAYYTRHHVFKSTPALFSPKLLRTRSLSQRGLGNCSANESWTEVSWPCRNSQSSEKAINLGKKKSSWKAFFGVVEKEDSQSTPAKVSAQGQRTLEYQDSHSQQWSRCLSNVEQCLEHEAVDPKVISIANRVAEIVYSWPPPQATQAGGFKSKEIFVTEGLSFQLQGHVPVASSSKKDEEEQILAKIVELLKYSGDQLERKEKEWEESAKTKIKMALLWRSSGGGPRVLSIPEAFMKNSFTLTPPGFSEHN

SEQ ID NO: 6947 - protein, 183 aa, Homo sapiens; identical to SEQ ID NO: 5664

SEQ ID NO: 6948 - protein, 319 aa, Homo sapiens
MLRCGQMIFAQALVCRHLGRDWRWTQRKRQPDSYFSVLNAFIDRKDSYYSIHQIAQMGVGEGKSIGQWYGPNTVAQVLKKLAVFDTWSSLAVHIAMDNTVVMEEIRRLCRTSVPCAGATAFPADSDRHCNGFPAGAEVTNRPSPWRPLVLLIPLRLGLTDINEAYVETLKHCFMMPQSLGVIGGKPNSAHYFIGYVGEELIYLDPHTTQPAVEPTDGCFIPDESFHCQHPPCRMSIAELDPSIAVGFFCKTEDDFNDWCQQVKKLSLLGGALPMFELVELQPSHLACPDVLNLSLDSSDVERLERFFDSEDEDFEILSL

SEQ ID NO: 6949 - protein, 187 aa, Homo sapiens
MNGRADFREPNAEVPRPIPHIGPDYIPTEEERRVFAECNDESFWFRSVPLAATSMLITQGLISKGILSSHPKYGSIPKLILACIMGYFAGKLSYVKTCQEKFKKLENSPLGEALRSGQARRSSPPGHYYQKSKYDSSVSGQSSFVTSPAADNIEMLPHYEPIPFSSSMNESAPTGITDHIVQGRNFS

SEQ ID NO: 6950 - protein, 89 aa, Homo sapiens
MSEQGDLNQAIAEEGGTEQETATPENGIVKSESLDEEEKLELQRRLEAQNQERRKSKSGAGKGKLTRSLAVCEESSARPGGESLQDQTL

SEQ ID NO: 6951 - protein, 89 aa, Homo sapiens; identical to SEQ ID NO: 6950

SEQ ID NO: 6952 - protein, 490 aa, Homo sapiens
MEDSASASLSSAAATGTSTSTPAAPTARKQLDKEQVRKAVDALLTHCKSRKNNYGLLLNENESLFLMVVLWKIPSKELRVRLTLPHSIRSDSEDICLFTKDEPNSTPEKTEQFYRKLLNKHGIKTVSQIISLQTLKKEYKSYEAKLRLLSSFDFFLTDARIRRLLPSLIGRHFYQRKKVPVSVNLLSKNLSREINDCIGGTVLNISKSGSCSAIRIGHVGMQIEHIIENIVAVTKGLSEKLPEKWESVKLLFVKTEKSAALPIFSSFVSNWDEATKRSLLNKKKKEARRKRRERNFEKQKERKKKRQQARKTASVLSKDDVAPESGDTTVKKPESKKEQTPEHGKKKRGRGKAQVKATNESEDEIPQLVPIGKKTPANEKVEIQKHATGKKSPAKSPNPSTPRGKKRKALPASETPKAAESETPGKSPEKKPKIKEEAVKEKSPSLGKKDARQTPKKPEAKFFTTPSKSVRKASHTPKKWPKKPKVPQST

SEQ ID NO: 6953 - protein, 164 aa, Homo sapiens
MAEPASVAAESLAGSRARAARTVLGQVVLPGEELLLPEQEDAEGPGGAVERPLSLNARACSRVRVVCGPGLRRCGDRLLVTKCGRLRHKEPGSGSGGGVYWVDSQQKRYVPVKGDHVIGIVTAKSGDIFKVDVGGSEPASLSYLSFEGATKRNRPNVQAISSRL

SEQ ID NO: 6954 - protein, 835 aa, Homo sapiens
MTCNKHGCRQAFHVTCAQFAGLLCEEEGNGADNVQYCGYCKYHFSKLKKSKRGSNRSYDQSLSDSSSHSQDKHHEKEKKKYKEKDKHKQKHKKQPEPSPALVPSLTVTTEKTYTSTSNNSISGSLKRLEDTTARFTNANFQEVSAHTSSGKDVSETRGSEGKGKKSSAHSSGQRGRKPGGGRNPGTTVSAASPFPQGSFSGTPGSVKSSSGSSVQSPQDFLSFTDSDLRNDSYSHSQQSSATKDVHKGESGSQEGGVNSFSTLIGLPSTSAVTSQPKSFENSPGDLGNSSLPTAGYKRAQTSGIEEETVKEKKRKGNKQSKHGPGRPKGNKNQENVSHLSVSSASPTSSVASAAGSITSSSLQKSPTLLRNGSLQSLSVGSSPVGSEISMQYRHDGACPTTSIYNSNDVAVSFPNVVSGSGSSTPVSSSHLPQQSSGHLQQVGALSPSAVSSAAPAVATTQANTLSGSSLSQAPSHMYGNRSNSSMAALIAQSENNQTDQDLGDNSRNLVGRGSSPRGSLSPRSPVSSLQIRYDQPGNSSLENLPPVAASIEQLLERQWSEGQQFLLEQGTPSDILGMLKSLHQLQVENRRLEEQIKNLTAKKERLQLLNAQLSVPFPTITANPSPSHQIHTFSAQTAPTTDSLNSSKSPHIGNSFLPDNSLPVLNQDLTSSGQSTSSSSALSTPPPAGQSPAQQGSGVSGVQQVNGVTVGALASGMQPVTSTIPAVSAVGGIIGALPGNQLAINGIVGALNGVMQTPVTMSQNPTPLTHTTVPPNATHPMPATLTNSASGLGLLSDQQRQILIHQQQFQQLLNSQQLTPNMVKEFSAQIIAWRP

SEQ ID NO: 6955 - protein, 539 aa, Homo sapiens; identical to SEQ ID NO: 5502

SEQ ID NO: 6956 - protein, 147 aa, Homo sapiens; identical to SEQ ID NO: 5321

SEQ ID NO: 6957 - protein, 316 aa, Homo sapiens; identical to SEQ ID NO: 5850

SEQ ID NO: 6958 - protein, 316 aa, Homo sapiens; identical to SEQ ID NO: 5850

SEQ ID NO: 6959 - protein, 269 aa, Homo sapiens; identical to SEQ ID NO: 4783

SEQ ID NO: 6960 - protein, 390 aa, Homo sapiens; identical to SEQ ID NO: 5166

SEQ ID NO: 6961 - protein, 126 aa, Homo sapiens; identical to SEQ ID NO: 4701

SEQ ID NO: 6962 - protein, 236 aa, Homo sapiens
MQVQDDGVNLIPFAKCSRVVSRSPPPRLPSQSLRPMPQRYGDVFWKNLNQRPTPTWLEEQHIPPMLRATGCSQLGLYPPEQLPPPEMLWRRKKRRPCLEGMQQQGLGGVPARVRAVTYHLEDLRRRQSIINELKKAQWGSSGAASEPVVLGEEGCGFPSTNEYPDLEEERATYPQEEDRFLTPGRAQLLWSPWSPLDQEEACASRQLHSLASFSTVTARRNPLHNPWGMELAASEE

SEQ ID NO: 6963 - protein, 559 aa, Homo sapiens
MNPLFGPNLFLLQQEQQGLAGPLGDSLGGDHFAGGGDLPPAPLSPAGPAAYSPPGPGPAPPAAMALRNDLGSNINVLKTLNLRFRCFLAKVHELERRNRLLEKQLQQALEEGKQGRRGLGRRDQAVQTGFVSPIRPLGLQLGARPAAVCSPSARVLGSPARSPAGPLAPSAASLSSSSTSTSTTYSSSARFMPGTIWSFSHARRLGPGLEPTLVQGPGLSWVHPDGVGVQIDTITPEIRALYNVLAKVKRERDEYKRRWEEEYTVRIQLQDRVNELQEEAQEADACQEELALKVEQLKAELVVFKGLMSNNLSELDTKIQEKAMKVDMDICRRIDITAKLCDVAQQRNCEDMIQMFQVPSMGGRKRERKAAVEEDTSLSESEGPRQPDGDEEESTALSINEEMQRMLNQLREYDFEDDCDSLTWEETEETLLLWEDFSGYAMAAAEAQGEQEDSLEKVIKDTESLFKTREKEYQETIDQIELELATAKNDMNRHLHEYMEMCSMKRGLDVQMETCRRLITQSGDRKSPAFTAVPLSDPPPPPSEAEDSDRDVSSDSSMR

SEQ ID NO: 6964 - protein, 393 aa, Homo sapiens
MASGRARCTRKLRNWVVEQVESGQFPGVCWDDTAKTMFRIPWKHAGKQDFREDQDAAFFKAWAIFKGKYKEGDTGGPAVWKTRLRCALNKSSEFKEVPERGRMDVAEPYKVYQLLPPGIVSGQPGTQKVPSKRQHSSVSSERKEEEDAMQNCTLSPSVLQDSLNNEEEGASGGAVHSDIGSSSSSSSPEPQEVTDTTEAPFQGDQRSLEFLLPPEPDYSLLLTFIYNGRVVGEAQVQSLDCRLVAEPSGSESSMEQVLFPKPGPLEPTQRLLSQLERGILVASNPRGLFVQRLCPIPISWNAPQAPPGPGPHLLPSNECVELFRTAYFCRDLVRYFQGLGPPPKFQVTLNFWEESHGSSHTPQNLITVKMEQAFARYLLEQTPEQQAAILSLV

SEQ ID NO: 6965 - protein, 817 aa, Homo sapiens
MWSLTASEGESTTAHFFLGAGDEGLGTRGIGMRPEESDSELLEDEEDEVPPEPQIIVGICAMTKKSKSKPMTQILERLCRFDYLTVVILGEDVILNEPVENWPSCHCLISFHSKGFPLDKAVAYSKLRNPFLINDLAMQYYIQDRREVYRILQEEGIDLPRYAVLNRDPARPEECNLIEGEDQVEVNGAVFPKPFVEKPVSAEDHNVYIYYPSSAGGGSQRLFRKIGSRSSVYSPESSVRKTGSYIYEEFMPTDGTDVKVYTVGPDYAHAEARKSPALDGKVERDSEGKEIQYPVMLTAMEKLVARKVCVAFKQTVCGFDLLRANGHSFVCDVNGFSFVKNSMKYYDDCAKILGNTIMRELAPQFQIPWSIPTEAEDIPIVPTTSGTMMELRCVIAIIRHGDRTPKQKMKMEVKHPRFFALFEKHGGYKTGKLKLKRPEQLQEVLDITRLLLAELEKEPGGEIEEKTGKLEQLKSVLEMYGHFSGINRKVQLTYYPHGVKASNEGQDPQRETLAPSLLLVLKWGGELTPAGRVQAEELGRAFRCMYPGGQGDYAGFPGCGLLRLHSTFRHDLKIYASDEGRVQMTAAAFAKGLLALEGELTPILVQMVKSANMNGLLDSDGDSLSSCQHRVKARLHHILQQDAPFGPEDYDQLAPTRSTSLLNSMTIIQNPVKVCDQVFALIENLTHQIRERMQDPRSVDLQLYHSETLELMLQRWSKLERDFRQKSGRYDISKIPDIYDCVKYDVQHNGSLGLQGTAELLRLSKALADVVIPQEYGISREEKLEIAVGFCLPLLRKILLDLQRTHEDESVNKLHPL

SEQ ID NO: 6966 - protein, 138 aa, Homo sapiens; identical to SEQ ID NO: 4807

SEQ ID NO: 6967 - protein, 1432 aa, Homo sapiens; identical to SEQ ID NO: 5248

SEQ ID NO: 6968 - protein, 144 aa, Homo sapiens
MAEVQVLVLDGRGHLLGRLAAIVAKQVLLGRKVVVVRCEGINISGNFYRNKLKYLAFLRKRMNTNPSRGPYHFRAPSRIFWRTVRGMLPHKTKRGQAALDRLKVFDGIPPPYGNRPRRTWRRKLTNTQRSSRPTDSWSEPNKDC

SEQ ID NO: 6969 - protein, 135 aa, Homo sapiens [sequence omitted]

SEQ ID NO: 6970 - protein, 135 aa, Homo sapiens [sequence omitted]

SEQ ID NO: 6971 - protein, 227 aa, Homo sapiens
MEPQGYPAFGWDHSLHKRKRLPPVKRSLVYYLKNREVRLQNETSYSRVLHGYAAQQLPSLLKEREFHLGTLNKVFASQWLNHRQVVCGTKCNTLFVVDVQTSQITKIPILKDREPGGVTQQGCGIHAIELNPSRTLLATGGDNPNSLAIYRLPTLDPVCVGDDGHKDWIFSIAWISDTMAVSGSRDGSMGLWEVTDDVLTKSDARHNVSRVPVYAHITHKALKDIPK

SEQ ID NO: 6972 - protein, 517 aa, Homo sapiens
MTRLGTVPRKALEMSCAIQNQLARILAEFEMTLERDVLQPLSRLSEEELPAILKHKKSLQKLVSDWNTLKSRLSQATKNSGSSQGLGGSPGSHSHTTMANKVETLKEEEEELKRKVEQCRDEYLADLYHFVTKEDSYANYFIRLLEIQADYHRRSLSSLDTALAELRENHGQADHSPSMTATHFPRVYGVSLATHLQELGREIALPIEACVMMLLSEGMKEEGLFRLAAGASVLKRLKQTMASDPHSLEEFCSDPHAVAGALKSYLRELPEPLMTFDLYDDWMRAASLKEPGARLQALQEVCSRLPPENLSNLRYLMKFLARLAEEQEVNKMTPSNIAIVLGPNLLWPPEKEGDQAQLDAASVSSIQVVGVVEALIQSADTLFPGDINFNVSGLFSAVTLQDTVSDRLASEELPSTAVPTPATTPAPAPAPAPAPAPALASAATKERTESEVPPRPASPKVTRSPPETAAPVEDMARRSPRGATGRKERFACSYGTDSSLADMFFVRLVNKLFWTKL

SEQ ID NO: 6973 - protein, 305 aa, Homo sapiens; identical to SEQ ID NO: 5213

SEQ ID NO: 6974 - protein, 308 aa, Homo sapiens
MIHDAQMDYYGTRLATCSSDRSVKIFDVRNGGQILIADLRGHEGPVWQVAWAHPMYGNILASCSYDRKVIIWREENGTWEKSHEHAGHDSSVNSVCWAPHDYGLILACGSSDGAISLLTYTGEGQWEVKKINNAHTIGCNAVSWAPAVVPGSLIDHPSGQKPNYIKRFASGGCDNLIKLWKEEEDGQWKEEQKLEAHSDWVRDVAWAPSIGLPTSTIASCSQDGRVFIWTCDDASSNTWSPKLLHKFNDVVWHVSWSITANILAVSGGDNKVTLWKESVDGQWVCISDVNKGQGSVSASVTEGQQNEQ

SEQ ID NO: 6975 - protein, 513 aa, Homo sapiens [sequence omitted]

SEQ ID NO: 6976 - protein, 710 aa, Homo sapiens
MSSVQSQQEQLSQSDPSPSPNSCSSFELIDMDAGSLYEPVSPHWFYCKIIDSKETWIPFNSEDSQQLEEAYSSGKGCNGRVVPTDGGRYDVHLGERMRYAVYWDELASEVRRCTWFYKGDKDNKYVPYSESFSQVLEETYMLAVTLDEWKKKLESPNREIIILHNPKLMVHYQPVAGSDDWGSTPTEQGRAAVKRGVENISVDIHCGEPLQIDHLVFVVHGIGPACDLRFRSIVQCVNDFRSVSLNLLQTHFKKAQENQQIGRVEFLPVNWHSPLHSTGVDVDLQRITLPSINRLRHFTNDTILDVFFYNSPTYCQTIVDTVASEMNRIYTLFLQRNPDFKGGVSIAGHSLGSLILFDILTNQKDSLGDIDSEKDSLNIVMDQGDTPTLEEDLKKLQLSEFFDIFEKEKVDKEALALCTDRDLQEIGIPLGPRKKILNYFSTRKNSMGIKRPAPQPASGANIPKESEFCSSSNTRNGDYLDVGIGQVSVKYPRLIYKPEIFFAFGSPIGMFLTVRGLKRIDPNYRFPTCKGFFNIYHPFDPVAYRIEPMVVPGVEFEPMLIPHHKGRKRMHLELREGLTRMSMDLKNNLLGSLRMAWKSFTRAPYPALQASETPEETEAEPESTSEKPSDVNTEETSVAVKEEVLPINVGMLNGGQRIDYVLQEKPIESFNEYLFALQSHLCYWESEDTVLLVLKEIYQTQGIFLDQPLQ

SEQ ID NO: 6977 - protein, 1116 aa, Homo sapiens; identical to SEQ ID NO: 6025

SEQ ID NO: 6978 - protein, 410 aa, Homo sapiens
MQNIHGKEIDLLRTTVKVPGKRLPRATPATAPGTSPRANGLSVERSNTQLGGGTASGPAEVLSSSPKLDPPPSPHSNRKKHRRKKSTGTPRPDGPSSATEEAEESFEFVVVSLTGQTWHFEASTAEERELWVQSVQAQILASLQGCRSAKDKTRLGNQNAALAVQAVRTVRGNSFCIDCDAPNPDWASLNLGALMCIECSGIHRHLGAHLSRVRSLDLDDWPPELLAVMTAMGNALANSVWEGALGGYSKPGPDACREEKERWIRAKYEQKLFLAPLPSSDVPLGQQLLRAVVEDDLRLLVMLLAHGSKEEVNETYGDGDGRTALHLSSAMANVVFTQLLIWYGVDVRSRDARGLTPLAYARRAGSQECADILIQHGCPGEGCGLAPTPNREPANGTNPSAELHRSPSLL

SEQ ID NO: 6979 - protein, 162 aa, Homo sapiens
MSDSPAGSNAAPESSGSGSGGGGKRPAVPAAVSLLPPADPLRQANRLPIRVLKMLSAHTGHLLHPEYLQPLSSTPVSPIELDAKKSPLALLAQTCSQIGSPGSLSLRNPHTLGLSRYHPYGKSHLSTAGGLAVPSLPTAGPYYSPYALYGQRLASASALGYQ

SEQ ID NO: 6980 - protein, 911 aa, Homo sapiens
MNFQAGGGQSPQQQQSLAAPGGGGAAAQQLVCGGQFGGAGPGAGGGGGPSQQLAGGPPQQFALSNSAAIRAEIQRFESVHPNIYAIYDLIERIEDLALQNQIREHVISIEDSFVNSQEWTLSRSVPELKVGIVGNLSSGKSALVHRYLTGTYVQEESPEGGRFKKEIVVDGQSYLLLIRDEGGPPELQFAAWVDAVVFVFSLEDEISFQTVYNYFLRLCSFRNASEVPMVLVGTQDAISAANPRVIDDSRARKLSTDLKRCTYYETCATYGLNVERVFQDVAQKVVALRKKQQLAIGPCKSLPNSPSHSAVSAASIPAVHINQATNGGGSAFSDYSSSVPSTPSISQRELRIETIAASSTPTPIRKQSKRRSNIFTSRKGADLDREKKAAECKVDSIGSGRAIPIKQGILLKRSGKSLNKEWKKKYVTLCDNGLLTYHPSLHDYMQNIHGKEIDLLRTTVKVPGKRLPRATPATAPGTSPRANGLSVERSNTQLGGGTGAPHSASSASLHSERPLSSSAWAGPRPEGLHQRSCSVSSADQWSEATTSLPPGMQHPASGPAEVLSSSPKLDPPPSPHSNRKKHRRKKSTGTPRPDGPSSATEEAEESFEFVVVSLTGQTWHFEASTAEERELWVQSVQAQILASLQGCRSAKDKTRLGNQNAALAVQAVRTVRGNSFCIDCDAPNPDWASLNLGALMCIECSGIHRHLGAHLSRVRSLDLDDWPPELLAVMTAMGNALANSVWEGALGGYSKPGPDACREEKERWIRAKYEQKLFLAPLPSSDVPLGQQLLRAVVEDDLRLLVMLLAHGSKEEVNETYGDGDGRTALHLSSAMANVVFTQLLIWYGVDVRSRDARGLTPLAYARRAGSQECADILIQHGCPGEGCGLAPTPNREPANGTNPSAELHRSPSLL

SEQ ID NO: 6981 - protein, 352 aa, Homo sapiens; identical to SEQ ID NO: 6708

SEQ ID NO: 6982 - protein, 168 aa, Homo sapiens
MTATLRPYLSAVRATLQAALCLENFSSQVVERHNKPEVEVRSSKELLLQPVTISRNEKEKVLIEGSINSVRVSIAVKQADEIEKILCHKFMRFMMMRAENFFILRRKPVEGYDISFLITNFHTEQMYKHKLVDFVIHFMEEIDKEISEMKLSVNARARIVAEEFLKNF

SEQ ID NO: 6983 - protein, 330 aa, Homo sapiens
MERFMEQVVFKYLRAEPEDHYFLMTEPPLNTPENREYLAEIMFESFNVPGLYIAVQAVLALAASWTSRQVGERTLTGIVIDSGDGVTHVIPVAEGYVIGSCIKHIPIAGRDITYFIQQLLREREVGIPPEQSLETAKAIKEKYCYICPDIVKEFAKYDVDPRKWIKQYTGINAINQKKFVIDVGYERFLGPEIFFHPEFANPDFMESISDVVDEVIQNCPIDVRRPLYKNVVLSGGSTMFRDFGRRLQRDLKRVVDARLRLSEELSGGRIKPKPVEVQVVTHHMQRYAVWFGGSMLASTPEFFQVCHTKKDYEEYGPSICRHNPVFGVMS

SEQ ID NO: 6984 - protein, 297 aa, Homo sapiens
MKTLSPDRIQPHIMTDVPATFTQAECNGDKPPENGQQTITKISEELTDVDSPLPHYRVEPSLEGALTKGSQEERRKLQGNMLLNSSMEDKMLKENPEEKLFIVHKAITDLSLQETSADEMTFREGHQWEKIPLSGSNQEIRRQKERITEQPLKEEEDEDRKNKGHQAAEIEWLGFRKPSQADMLHSKHDEEQKVWDEEIDDDDDDNCNNDEDEVRVIEFKKKHEEVSQFKEEGDASEDSPLSSASSQAVTPDEQPTLGKKSDISRNAYSRYNTISYRKIRKGNTKQRIDEFESMMHL

SEQ ID NO: 6985 - protein, 357 aa, Homo sapiens
MVQPFTTIPFPPPPQNGIPTEYGVPHTQDYAGQTGEHNLTLYGSTQAHGEQSSNSPSTQNGSLTQTEGGAQTDGQQSQTQSSENSESKSTPKRLHVSNIPFRFRDPDLRQMFGQFGKILDVEIIFNERGSKGFGFVTFENSADADRAREKLHGTVVEGRKIEVNNATARVMTNKKMVTPYANGWKLSPVVGAVYGPELYAASSFQADVSLGNDAAVPLSGRGGINTYIPLIIPGFPYPTAATTAAAFRGAHLRGRGRTVYGAVRAVPPTAIPAYPGVVYQDGFYGADLYGGYAAYRYAQPATATAATAAAAAAAAYSDGYGRVYTADPYHALAPAASYGVGAVASLYRGGYSRFAPY

SEQ ID NO: 6986 - protein, 128 aa, Homo sapiens
MVQPFTTIPFPPPPQNGIPTEYGVPHTQDYAGQTGEHNLTLYGSTQAHGEQSSNSPSTQNGSLTTEGGAQTDGQQSQTQSSENSESKSTPKRLHVSNIPFRFRDPDLRQMFGFGKILDVEIIFNERGS

SEQ ID NO: 6987 - protein, 356 aa, Homo sapiens
MQGILLLVFAKYQHLPYIQILSTKSTPTGLFGYWGNKGGVNICLKLYGYYVSIINCHLPPHISNNYQRLEHFDRILEMQNCEGRDIPNILDHDLIIWFGDMNFRIEDFGLHFVRESIKNRCYGGLWEKDQLSIAKKHDPLLREFQEGRLLFPPTYKFDRNSNDYDTSEKKRKPAWTDRILWRLKRQPCAGPDTPIPPASHFSLSLRGYSSHMTYGISDHKPVSGTFDLELKPLVSAPLIVLMPEDLWTVENDMMVSYSSTSDFPSSPWDWIGLYKVGLRDVNDYVSYAWVGDSKVSCSDNLNQVYIDISNIPTTEDEFLLCYYSNSLRSVVGISRPFQIPPGSLREDPLGEAQPQI

SEQ ID NO: 6988 - protein, 583 aa, Homo sapiens; identical to SEQ ID NO: 5936

SEQ ID NO: 6989 - protein, 442 aa, Homo sapiens
MANSFAARIFTTLSDLQTNMANLKVIGIVIGKTDVKGFPDRKNIGSERYTFSFTIRDSPAHFVNAASWGNEDYIKSLSDSFRVGDCVIIENPLIQRKEIEREEKFSPATPSNCKLLLSENHSTVKVCSSYEVDTKLLSLIHLPVKESHDYYSLGDIVANGHSLNGRIINVLAAVKSVGEPKYFTTSDRRKGQRCEVRLYDETESSFAMTCWDNESILLAQSWMPRETVIFASDVRINFDKFRNCMTATVISKTIITTNPDIPEANILLNFIRENKETNVLDDEIDSYFKESINLSTIVDVYTVEQLKGKALKNEGKADPSYGILYAYISTLNIDDETTKVVRNRCSSCGYIVNEASNMCTTCNKNSLDFKSVFLSFHVLIDLTDHTGTLHSCSLTGSVAEETLGCTFVLSHRARSGLKISVLSCKLADPTEASRNLSGQKHV

SEQ ID NO: 6990 - protein, 208 aa, Homo sapiens
MAGTARHDREMAIQAKKKLTTATDPIERLRLQCLARGSAGIKGLGRVFRIMDDDNNRTLDFKEFMKGLNDYAVVMEKEEVEELFRRFDKDGNGTIDFNEFLLTLRPPMSRARKEVIMQAFRKLDKTGDGVITIEDLREVYNAKHHPKYQNGEWSEEQVFRKFLDNFDSPYDKDGLVTPEEFMNYYAGVSASIDTDVYFIIMMRTAWKL

SEQ ID NO: 6991 - protein, 208 aa, Homo sapiens; identical to SEQ ID NO: 6990

SEQ ID NO: 6992 - protein, 262 aa, Homo sapiens
HSYSEGLGHPRVSQALVTFHQQKPIEPRRELLTQPCRQKDPANVDYEDLFLYSNAVAEEAACPVSAPEEASPKPVLCHQSKERKPSAEMNRITTKEATSSCPPKSPLGETRQKLWRSLKMLPERGQRVRQQKSHLATVNLSSLLDVRRSTVISGPGTGKGSQDHSGDPTSGDRGYTDPCVATSLKSPSQPQAPKDRKVPTRKAERSVSCIEVTPGDRSWHQMVVRALSSQESKPEHQGLAEPENDQLPEEYQQPPPFAPGYC

SEQ ID NO: 6993 - protein, 646 aa, Homo sapiens
MSYTGFVQGSETTLQSTYSDTSAQPTCDYGYGTWNSGTNRGYEGYGYGYGYGQDNTTNYGYGMATSHSWEMPSSDTNANTSASGSASADSVLSRINQRLDMVPHLETDMMQGGVYGSGGERYDSYESCDSRAVLSERDLYRSGYDYSELDPEMEMAYEGQYDAYRDQFRMRGNDTFGPRAQGWARDARSGRPMASGYGRMWEDPMGARGQCMSGASRLPSLFSQNIIPEYGMFQGMRGGGAFPGGSRFGFGFGNGMKQMRRTWKTWTTADFRTKKKKRKQGGSPDEPDSKATRTDCSDNSDSDNDEGTEGEATEGLEGTEAVEKGSRVDGEDEEGKEDGREEGKEDPEKGALTTQDENGQTKRKLQAGKKSQDKQKKRQRDRMVERIQFVCSLCKYRTFYEDEMASHLDSKFHKEHFKYVGTKLPKQTADFLQEYVTNKTKKTEELRKTVEDLDGLIHQIYRDQDLTQEIAMEHFVKKVEAAHCAACDLFIPMQFGIIQKHLKTMDHNRNRRLMMEQSKKSSLMVARSILNNKLISKKLERYLKGENPFTDSPEEEKEQEEAEGGALDEGAQGEAAGISEGAEGVPAQPPVPPEPAPGAVSPPPPPPPEEEEEGAVPLLGGALQRQIRGIPGLDVEDDEEGGGGAP

SEQ ID NO: 6994 - protein, 466 aa, Homo sapiens
MRGPNSGTEKGRLVIPEKQGFDFLCMPVFHPRFKREFIQEPAKNRPGPQTRSDLLLSGRDWNTLIVGKLSPWIRPDSKVEKIRRNSEALEVQFIITGTNHHSEKEFCSYLQYLEYLSQNRPPPNAYELFAKGYEDYLQSPLQPLMDNLESQTYEVFEKDPIKYSQYQQAIYKCLLDRVPEEEKDTNVQVLMVLGAGRGPLVNASLRAAKQADRRIKLYAVEKNPNAVVTLENWQFEEWGSQVTVVSSDMREWVAPEKADIIVSELLGSFADNELSPECLDGAQHFLKDDGVSIPGEYTSFLAPISSSKLYNEVRACREKDRDPEAQFEMPYVVRLHNFHQLSAPQPCFTFSHPNRDPMIDNNRYCTLEFPVEVNTVLHGFAGYFETVLYQDITLSIRPETHSPGMFSWFPILFPIKQPITVREGQTICVRFWRCSNSKKVWYEWAVTAPVCSAIHNPTGRSYTIGL

SEQ ID NO: 6995 - protein, 620 aa, Homo sapiens
MRGPNSGTEKGRLVIPEKQGFDFLCMPVFHPRFKREFIQEPAKNRPGPQTRSDLLLSGRDWNTLIVGKLSPWIRPDSKVEKIRRNSEAAMLQELNFGAYLGLPAFLLPLNQEDNTNLARVLTNHIHTGHHSSMFWMRVPLVAPEDLRDDIIENAPTTHTEEYSGEEKTWMWWHNFRTLCDYSKRIAVALEIGADLPSNHVIDRWLGEPIKAAILPTSIFLTNKKGFPVLSKMHQRLIFRLLKLEVQFIITGTNHHSEKEFCSYLQYLEYLSQNRPPPNAYELFAKGYEDYLQSPLQPLMDNLESQTYEVFEKDPIKYSQYQQAIYKCLLDRVPEEEKDTNVQVLMVLGAGRGPLVNASLRAAKQADRRIKLYAVEKNPNAVVTLENWQFEEWGSQVTVVSSDMREWVAPEKADIIVSELLGSFADNELSPECLDGAQHFLKDDGVSIPGEYTSFLAPISSSKLYNEVRACREKDRDPEAQFEMPYVVRLHNFHQLSAPQPCFTFSHPNRDPMIDNNRYCTLEFPVEVNTVLHGFAGYFETVLYQDITLSIRPETHSPGMFSWFPILFPIKQPITVREGQTICVRFWRCSNSKKVWYEWAVTAPVCSAIHNPTGRSYTIGL

SEQ ID NO: 6996 - protein, 756 aa, Homo sapiens
MPSVSKAAAAALSGSPPQTEKPTHYRYLKEFRTEQCPLFSQHKCAQHRPFTCFHWHFLNQRRRRPLRRRDGTFNYSPDVYCSKYNEATGVCPDGDESLLGVLYPLWAPPPVPAPVGAPTVHPFLARWFSHVPWEPAGSADPRASSTPAGGTTWATGLLGDFDACGSQSRECVKGVWWTLLGFRCPYLHRTTGDTERKYHLRYYKTGTCIHETDARGHCVKNGLHCAFAHGPLDLRPPVCDVRELQAQEALQNGQLGGGEGVPDLQPGVLASQAMIEKILSEDPRWQALLPVALLRHRVAHFSDANFVLGSYKTEQCPKPPRLCRQGYACPHYHNSRDRRRNPRRFQYRSTPCPSVKHGDEWGEPSRCDGGDGCQYCHSRTEQQFHPEGPVGSPVSGAFSVFSHAGLVADPSLWYPAEWSWHHVGHSRTINPEGDKPSRLGPAPENIKRGNDFACDGRADAAGMAPHVCVFPIYKSTKCNDMRQTGYCPRGPFCAFAHVEKSLGMVNEWGCHDLHLTSPSSTGSGQPGNAKRRDSPAEGGPRGSEQDSKQGVRAHGVYVFEQNHLAVFAAVHPPAPSVSSSVASSLASSAGSGSSSPTALPAPPARALPLGPASSTVEAVLALEPTPSSPTSSAVQGVAGELGMGSGGQGCWSHVVGALAAVPAWTHSGDLEWDPSTIRTRVNVGGGPAARPAMTLAREPQLLVVGGCPTRNCSGPAASPQQLLDDAGQGGRGERDSSQRPLRPQTTHRQDTRPVPS

SEQ ID NO: 6997 - protein, 182 aa, Homo sapiens
MTPPQQPPPLRSEPGTLGSAASSYSPLGLNGVPGSIWDFVSGSFSPSPSPILSAGPPSSSSASPNGAELARVRRQLDEAKRKIRQWEESWQQVKQVCDAWQREAQEAKERARVADSDRQLALQKKEEVEAQVIFQLRAKQCVACRERAHGAVLRPCQHHILCEPCAATAPECPYCKGQPLQW

SEQ ID NO: 6998 - protein, 147 aa, Homo sapiens
MEGEPPPVEERRRLQEELNEFVESGCRTLEEVTASLGWDLDSLDPGEEEAAEDEVVICPYDSNHHMPKSSLAKHMASCRLRKMGYTKEEEDEMYNPEFFYENVKIPSITLNKDSQFQIIKQARTAVGKDSDCYNQIIGVSIKRNYKI

SEQ ID NO: 6999 - protein, 173 aa, Homo sapiens
MGTFDLWTDYLGLAHLVRALSGKEGPETRLSPQPEPEPMLEPDQKRSLESSPAPERLCSFCKHNGESRAIYQSHVLKDEAGRVLCPILRDYVCPQCGATRERAHTRRFCPLTGQGYTSVYSHTTRNSAGKKLVRPDKAKTQDTGHRRGGGGGAGFRGAGKSEPSPSCSPSMST

SEQ ID NO: 7000 - protein, 573 aa, Homo sapiens
MSAFCLGLVGRASAPAEPDSACCMELPAAAGDAVRSPAAAAALIFPGGSGELELALEEELALLAAGERPSDPGEHPQAEPGSLAEGAGPQPPPSQDPELLSVIRQKEKDLVLAARLGKALLERNQDMSRQYEQMHKELTDKLEHLEQEKHELRRRFENREGEWEGRVSELESDVKQLQDELERQQIHLREADREKSRAVQELSEQNQRLLDQLSRASEVERQLSMQVHALREDFREKNSSTNQHIIRLESLQAEIKMLSDRKRELEHRLSATLEENDLLQGTVEELQDRVLILERQGHDKDLQLHQSQLELQEVRLSCRQLQVKVEELTEERSLQSSAATSTSLLSEIEQSMEAEELEQEREQLRLQLWEAYCQVRYLCSHLRGNDSADSAVSTDSSMDESSETSSAKDVPAGSLRTALNELKRLIQSIVDGMEPTVTLLSVEMTALKEERDRLRVTSEDKEPKEQLQKAIRDRDEAIAKKNAVELELAKCRMDMMSLNSQLLDAIQQKLNLSQQLEAWQDDMHRVIDRQLMDTHLKERSQPAAALCRGHSAGRGDEPSIAEGKRLFSFFRKI

SEQ ID NO: 7001 - protein, 361 aa, Homo sapiens; identical to SEQ ID NO: 5755

SEQ ID NO: 7002 - protein, 1032 aa, Homo sapiens
MAFTNYSSLNRAQLTFEYLHTNSTTHEFLFGALAELVDNARDADATRIDIYAERREDLRGGFMLCFLDDGAGMDPSDAASVIQFGKSAKRTPESTQIGQYGNGLKSGSMRIGKDFILFTKKEDTMTCLFLSRTFHEEEGIDEVIVPLPTWNARTREPVTDNVEKFAIETELIYKYSPFRTEEEVMTQFMKIPGDSGTLVIIFNLKLMDNGEPELDIISNPRDIQMAETSPEGTKPERRSFRAYAAVLYIDPRMRIFIHGHKVQTKRLSCCLYKPRMYKYTSSRFKTRAEQEVKKAEHVARIAEEKAREAESKARTLEVRLGGDLTRDSRVMLRQVQNRAITLRREADVKKRIKEAKQRALKEPKELNFVFGVNIEHRDLDGMFIYNCSRLIKMYEKVGPQLEGGMACGGVVGVVDVPYLVLEPTHNKQDFADAKEYRHLLRAMGEHLAQYWKDIAIAQRGIIKFWDEFGYLSANWNQPPSSELRYKRRRAMEIPTTIQCDLCLKWRTLPFQLSSVEKDYPDTWVCSMNPDPEQDRCEASEQKQKVPLGTFRKDMKTQEEKQKQLTEKIRQQQEKLEALQKTTPIRSQADLKKLPLEVTTRPSTEEPVRRPQRPRSPPLPAVIRNAPSRPPSLPTPRPASQPRKAPVISSTPKLPALAAREEASTSRLLQPPEAPRKPANTLVKTASRPAPLVQQLSPSLLPNSKSPREVPSPKVIKTPVVKKTESPIKLSPATPSRKRSVAVSDEEEVEEEAERRKERCKRGRFVVKEEKKDSNELSDSAGEEDSADLKRAQKDKGLHVEVRVNREWYTGRVTAVEVGKHVVRWKVKFDYVPTDTTPRDRWVEKGSEDVRLMKPPSPEHQSLDTQQEGGEEEVGPVAQQAIAVAEPSTSECLRIEPDTTALSTNHETIDLLVQILRNCLRYFLPPSFPISKKQLSAMNSDELISFPLKEYFKQYEVGLQNLCNSYQSRADSRAKASEESLRTSERKLRETEEKLQKLRTNIVALLQKVQEDIDINTDDELDAYIEDLITKGD

SEQ ID NO: 7003 - protein, 1980 aa, Homo sapiens; identical to SEQ ID NO: 5126

SEQ ID NO: 7004 - protein, 170 aa, Homo sapiens; identical to SEQ ID NO: 5770

SEQ ID NO: 7005 - protein, 96 aa, Homo sapiens
MCHTSCSPACQPTCCIHSPCQASCYVPVSCQSSVCMPVSCTRIVCVAPSCQPSVCVPVSCRPIIYVTPSCQSSGCCQPPCTTALCRPISCSTPSCC

SEQ ID NO: 7006 - protein, 292 aa, Homo sapiens
MAASTMSIRSSAYSDSWQVDDCPESCCEPPCCATSCCAPAPCLTLVCTPVSRVSSPCCQVTCEPSPCQSGCTSSCTPSCCQQSSCQPAYCTSSPCQQACCVPVCCKPVCCVPVCCGASSCCQQSSYQPACCASSSCQPACCVPVCCKPVCCAPTCSEDSYSCCQQSSCQPACCTSSPCQQSYCVPVCCKPVCCKPICCVPVCSGASSLCCQQSGCQPACCTTSCCRPSSSVSLLCRPVCRPACCVPVSSCCAPTSSRQPSYCRQASCVSLLCRPVCSRPACYSFSSGQKSSC

SEQ ID NO: 7007 - protein, 535 aa, Homo sapiens
MKKISLKTLRKSFNLNKSKEETDFMVVQQPSLASDFGKDDSLFGSCYGKDMASCDINGEDEKGGKNRSKSESLMGTLKRRLSAKQKSKGKAGTPSGSSADEDTFSSSSAPIVFKDVRAQRPIRSTSLRSHHYSPAPWPLRPTNSEETCIKMEVRVKALVHSSSPSPALNGVRKDFHDLQSETTCQEQANSLKSSASHNGDLHLHLDEHVPVVIGLMPQDYIQYTVPLDEGMYPLEGSRSYCLDSSSPMEVSAVPPQVGGRAFPEDESQVDQDLVVAPEIFVDQSVNGLLIGTTGVMLQSPRAGHDDVPPLSPLLPPMQNNQIQRNFSGLTGTEAHVAESMRCHLNFDPNSAPGVARVYDSVQSSGPMVVTSLTEELKKLAKQGWYWGPITRWEAEGKLANVPDGSFLVRDSSDDRYLLSLSFRSHGKTLHTRIEHSNGRFSFYEQPDVEGHTSIVDLIEHSIRDSENGAFCYSRSRLPGSATYPVRLTNPVSRFMQVRSLQYLCRFVIRQYTRIDLIQKLPLPNKMKDYLQEKHY

SEQ ID NO: 7008 - protein, 418 aa, Homo sapiens
MAASSLEQKLSRLEAKLKQENREARRRIDLNLDISPQRPRPTLQLPLANDGGSRSPSSESSPQHPTPPARPRHMLGLPSTLFTPRSMESIEIDQKLQEIMKQTGYLTIGGQRYQAEINDLENLGEMGSGTCGQVWKMRFRKTGHVIAVKQMRRSGNKEENKRILMDLDVVLKSHDCPYIVQCFGTFITNTDVFIAMELMGTCAEKLKKRMQGPIPERILGKMTVAIVKALYYLKEKHGVIHRDVKPSNILLDERGQIKLCDFGISGRLVDSKAKTRSAGCAAYMAPERIDPPDPTKPDYDIRADVWSLGISLVELATGQFPYKNCKTDFEVLTKVLQEEPPLLPGHMGFSGDFQSFVKDCLTKDHRKRPKYNKLLEHSFIKRYETLEVDVASWFKDVMAKTESAASGVLSQPHLPFFR

SEQ ID NO: 7009 - protein, 320 aa, Homo sapiens; identical to SEQ ID NO: 5744

SEQ ID NO: 7010 - protein, 578 aa, Homo sapiens [sequence omitted]

SEQ ID NO: 7011 - protein, 873 aa, Homo sapiens
MNQRSHLGTTYLDTAKGAVETFMKLRARDPASRGDRYMLVTFEEPPYAIKAGWKENHATFMNELKNLQAEGLTTLGQSLRTAFDLLNLNRLVTGIDNYGQGRNPFFLEPAIIITITDGSKLTTTSGVQDELHLPLNSPLPGSELTKEPFRWDQRLFALVLRLPGTMSVESEQLTGVPLDDSAITPMCEVTGGRSYSVCSPRMLNQCLESLVQKVQSGVVINFEKAGPDPSPVEDGQPDISRPFGSQPWHSCHKLIYVRPNPKTGVPIGHWPVPESFWPDQNSPTLPAASHPVVKFSCTDCEPMVIDKLPFDKYELEPSPLTQFILERKSPQTCWQVYVSNSAKYSELGHPFGYLKASTALNCVNLFVMPYNYPVLLPLLDDLFKVHKAKPTLKWRQSFESYLKTMPPYYLGPLKKAVRMMGAPNLIADSMEYGLSYSVISYLKKLSQQAKIESDRVIGSVGKKVVQETGIKVRSRSHGLSMAYRKDFQQLLQGISEDVPHRLLDLNMKEYTGFQVALLNKDLKPQTFRNAYDIPRRNLLDHLTRMRSNLLKSTRRFLKGQDEDQVHSVPIAQMGNYQEYLKQVPSPLRELDPDQPRRLHTFGNPFKLDKKGMMIDEADEFVAGPQNKHKRPGEPNMQGIPKRRRCMSPLLRGRQQNPVVNNHIGGKGPPAPTTQAQPDLIKPLPLHKISETTNDSIIHDVVENHVADQLSSDITPNAMDTEFSASSPASLLERPTNHMEALGHDHLGTNDLTVGGFLENHEEPRDKEQCAEENIPASSLNKGKKLMHCRSHEEVNTELKAQIMKEIRKPGRKYERIFTLLKHVQGSLQTRLIFLQNVIKEASRFKKRMLIEQLENFLDEIHRRANQINHINSN

SEQ ID NO: 7012 - protein, 779 aa, Homo sapiens
MADYSNKLYYQLEQETGIQTGYTRTGSIFLAQTQDRLISLKRINAGLNVIGIPSEIISPKKVAELHHLLNVHDLVGAMHVPEDAVVSSADVALALASAASQNGVQIYDRTSVLHVMVKKGQVTGVETDKGQIECQYFVNCAGQWAYELGLSNEEPVSIPLHACEHFYLLTRPLETPLQSSTPTIVDADGRIYIRNWQGGILSGGFEKNPKPIFTEGKNQLEIQNLQEDWDHFEPLLSSLLRRMPELETLEIMKLVNCPETFTPDMRCIMGESPAVQGYFVLAGMNSAGLSFGGGAGKYLAEWMVHGYPSENVWELDLKRFGALQSSRTFLRHRVMEVMPLMYDLKVPRWDFQTGRQLRTSPLYDRLDAQGARWMEKHGFERPKYFVPPDKDLLALEQSKTFYKPDWFDIVESEVKCCKEAVCVIDMSSFTKFEITSTGDQALEVLQYLFSNDLDVPVGHIVHTGMLNEGGGYENDCSIARLNKRSFFMISPTDQQVHCWAWLKKHMPKDSNLLLEDVTWKYTALNLIGPRAVDVLSELSYAPMTPDHFPSLFCKEMSVGYANGIRVMSMTHTGEPGFMLYIPIEYALHVYNEVMSVGQKYGIRNAGYYALRSLRIEKFFAFWGQDINNLTTPLECGRESRVKLEKGMDFIGRDALLQQKQNGVYKRLTMFILDDHDSDLDLWPWWGEPIYRNGQYVGKTTSSAYSYSLERHVCLGFVHNFSEDTGEEQVVTADFINRGEYEIDIAGYRFQAKAKLYPVASLFTQKRRKDDMELSDLHGK

SEQ ID NO: 7013 - protein, 396 aa, Homo sapiens
MATRVEEAARGRGGGAEEATEAGRGGRRRSPRQKLEESRSVQKQMKILQKKQAQIVKEKVHLQSEHSKAILARSKLESLCRELQRHNKTLKEENMQQAREEEERRKEATAHFQITLNEIQAQLEQHDIHNAKLRQENIELGEKLKKLIEQYALREEHIDKVFKHKELQQQLVDAKLQQTTQLIKEADEKHQREREFLLKEATESRHKYEQMKQQEVQLKQQLSLYMDKFEEFQTTMAKSNELFTTFRQEMEKMTKKIKKLEKETIIWRTKWENNNKALLQMAEEKTVRDKEYKALQIKLERLEKLCRALQTERNELNEKVEVLKEQVSIKAAIKAANRDLATPVMQPCTALDSHKELNTSSKRALGAHLEAEPKSQRSAVQKPPSTGSAPAIESVD

SEQ ID NO: 7014 - protein, 480 aa, Homo sapiens; identical to SEQ ID NO: 6357

SEQ ID NO: 7015 - protein, 1256 aa, Homo sapiens
MAHFSSEDQAMLQAMLRRLFQSVKEKITGAPSLECAEEILLHLEETDENFHNYEFVKYLRQHIGNTLGSMIEEEMEKCTSDRNQGEECGYDTVVQQVTKRTQESKEYKEMMHYLKNIMIAVVESMINKFEEDETRNQERQKKIQKEKSHSYRTDNCSDSDSSLNQSYKFCQGKLQLILDQLDPGQPKEVRYEALQTLCSAPPSDVLNCENWTTLCEKLTVSLSDPDPVFSDRILKFCAQTFLLSPLHMTKEIYTSLAKYLESYFLSRENHIPTLSAGVDITNPNMTRLLKKVRLLNEYQKEAPSFWIRHPEKYMEEIVESTLSLLTVKHNQSHVVSQKILDPIYFFALVDTKAVWFKKWMHAHYSRTTVLRLLETKYKSLVTTAIQQCVQYFEMCKTRKADETLGHSKHCRNKQKTFYYLGQELQYIYFIHSLCLLGRLLIYKQGRKLFPIKLKNKKGLVSLIDLLVLFTQLIYYSPSCPKMTSAAHSENYSPASMVTEVLWILSDQKECAVECLYNNIVIETLLQPIHNLMKGNEASPNCSETALIHIAGILARIASVEEGLILLLYGANMNSSEESPTGAHIIAQFSKKLLDEDISIFSGSEMLPVVKGAFISVCRHIYSTCEGLQVLITYNLHESIAKAWKKTSLLSERIPTPVEGSDSVSSVSQESQNIMAWEDNLLDDLLHFAATPKGLLLLQRTGAINECVTFIFNRYAKKLQVSRHKKFGYGVLVTRVASTAAGGIALKKSGFINELITELWSNLEYGRDDVRVTHAATPVDPIDRSCQKSFLALVNLLSYPAIYELVRNQDLPNKTEYSLREVPTCVIDIIDRLIILNSEAKIRSLFNYEQSHIFGLRDFIIDGLSVERNHVLVRINLVGGPLERILPPRLLEKSDNPYPWPMFSSYPLPNCYLSDITRNAGIKQDNDLDKLLLCLKISDKQTEWIENCQRQFCKMMKAKPDIISGEALIELLEKFVLHLTESPSECYFPSVEYTATDANVKNESLSSVQQLGIKMTVRYGKFLSLLKDGAENDLTWVLKHCERFLKQQQTSIKSSLLCLQGNYAGHDWFVSSLFMIMLGDKEKTFQFLHQFSRLLTSAFLWLPRLHISSYLPNDTVESGIHPVYFCSTHYIEMLLKAELPLVFSAFHMSGFAPSQICLQWITQCFWNYLDWIEICHYIATCVFLGPDYQVYICIAVFKHLQQDILQHTQTQDLQVFLKEEALHGFRVSDYFEYMEILEQNYRTVLLRDMRNIRLQST

SEQ ID NO: 7016 - protein, 203 aa, Homo sapiens
MATPYVTDETGGKYIASTQRPDGTWRKQRRVKEGYVPQEEVPVYENKYVKFFKSKPELPPGLSPEATAPVTPSRPEGGEPGLSKTAKRNLKRKEKRRQQQEKGEAEALSRTLDKVSLEETAQLPSAPQGSRAAPTAASDQPDSAATTEKAKKIKNLKKKLRQVEELQQRIQAGEVSQPSKEQLEKLARRRALEEELEDLELGL

SEQ ID NO: 7017 - protein, 242 aa, Homo sapiens; identical to SEQ ID NO: 6632

SEQ ID NO: 7018 - protein, 245 aa, Homo sapiens; identical to SEQ ID NO: 5192

SEQ ID NO: 7019 - protein, 339 aa, Homo sapiens
MMDSQLVAGVAFKKTFSYAGFEMQPKKYHNPKIALLNVELELKAEKDNAEIRVHTVEDYQAIVDAEWNILYDKLEKIHHSGAKVVLSKLPIGDVATQYFADRDMFCAGRVPEEDLKRTMMACGGSIQTSVNALSADVLGRCQVFEETQIGGERYNFFTGCPKAKTCTFILRGGAEQFMEETERSLHDAIMIVRRAIKNDSVVAGGGAIEMELSKYLRDYSRTIPGKQQLLIGAYAKALEIIPRQLCDNAGFDATNILNKLRARHAQGGTWYGVDINNEDIADNFEAFVWEPAMVRINALTAASEAACLIVSVDETIKNPRSTVDAPTAAGRGRGRGRPH

SEQ ID NO: 7020 - protein, 255 aa, Homo sapiens; identical to SEQ ID NO: 5089

SEQ ID NO: 7021 - protein, 146 aa, Homo sapiens
MVNSCCGSVCSDQGCDQGLCQETCCRPSCCQTTCCCPSCVVSSCCRPSCSQTTCCQTTCCRPSCCHPVCCQTTCRPSCGVSSCCRPLCCQTTCHPSCGMSSCCRPLCCQTTCRPSCGVSSCCRPLCCQTTCCRATCCRPSCCGSSC

SEQ ID NO: 7022 - protein, 431 aa, Homo sapiens; identical to SEQ ID NO: 6528

SEQ ID NO: 7023 - protein, 156 aa, Homo sapiens
MGCCGCSGGCGSGCGGCGSGSGGCGSGCGGCGSSCCVPICCCKPVCCCVPACSCSSCGSCGGSKGGCGSCGSSKGGCGSCGCSQSNCCKPCCSSSGCGSFCCQSSCSKPCCCQSSCCQSSCCKPCCCQSSCCQSSCFKPCCCQSSCCVPVCCQCKI

SEQ ID NO: 7024 - protein, 202 aa, Homo sapiens
MGCCGCSGGCGSGCGGCGSGCGGCGSGCGGYGSGCGGCGSSCCVPVCCCKPVCCCVPACSCSSCGSCGGSKGDCGSCGGSKGGCGSCGGSKGGCGSCGGSKGGCGSCGGSKGGCGSCGGSKGGCGSCGGSKGGCGSCGCSQCNCCKPCCCSSGCGSCCQSSCCNPCCCQSSCCVPVCCQSSCCKPCCCQSSCCVPVCCQCKI

SEQ ID NO: 7025 - protein, 165 aa, Homo sapiens
MGCCGCSEGCGSGCGGCGSGCGGCGSGCGGCGSSCCVPVCCCKPVCCCVPACSCSSCGSCGGSKGGCGSCGGSKGGCGSCGGSKGGCGSCGCSQCSCYKPCCCSSGCGSSCCQSSCCKPCCCQSSCCKPCCCSSGCGSSCCQSSCCNPCCSQSSCCVPVCCQCKI

SEQ ID NO: 7026 - protein, 1034 aa, Homo sapiens
MASVFMCGVEDLLFSGSRFVWNLTVSTLRRWYTERLRACHQVLRTWCGLQDVYQMTEGRHCQVHLLDDRRLELLVQPKLLARELLDLVASHFNLKEKEYFGITFIDDTGQQNWLQLDHRVLDHDLPKKPGPTILHFAVRFYIESISFLKDKTTVELFFLNAKACVHKGQIEVESETIFKLAAFILQEAKGDYTSDENARKDLKTLPAFPTKTLQEHPSLAYCEDRVIEHYLKIKGLTRGQAVVQYMKIVEALPTYGVHYYAVKDKQGLPWWLGISYKGIGQYDIQDKVKPRKLFQWKQLENLYFREKKFAVEVHDPRRISVSRRTFGQSGLFVQTWYANSSLIKSIWVMAISQHQFYLDRKQSKAKIPSARSLDEIAMDLTETGTQRASKLVTLETKSQFIMASNGSLISSGSQDSEVSEEQKREKILELKKKEKLLQEKLLKKVEELKKICLREAELTGKMPKEYPLNIGEKPPQVRRRVGTAFKLDDNLLPSEEDPALQELESNFLIQQKLVEAAKKLANEPDLCKTVKKKRKQDYTDAMKKLQEIENAINEYRIRCGKKPSQKATVLPEDIIPSESSSLSDTTTYDDPSDAFTFPGQRSSSVPHSPRILPPKSLGIERIHFRKSSINEQFVDTRQSREMLSTHSSPYKTLERRPQGGRSMPTTPVLTRNAYSSSHLEPESSSQHCRQRSGSLESQSHLLSEMDSDKPFFSLSKSQRSSSTEILDDGSSYTSQSSTEYYCVTPVTGPYYTTQTLDTRTRGRRRSKKQNVSTSNSGSMPNLAQKDSLRNGVYSKSQEPPSSSYYIAGYTPYAECDFYYSGGYVYENDTEGQYSVNPSYRSSAHYGYERQRDYSRSFHEDEVDRVPHNPYATLRLPRKAAAKSEHITKNIHKALVAEHLRGWYQRASGQKDQGHSPQTSFDSDRGSQRCLGFAGLQVPCSPSSRASSYSSVSSTNASGNWRTQLTIGLSDYETPAHSSYTSCYGNVYNPLPSPSRQYTEISQLDGTDGNQLEDNLESSEQRLFWHEDSKPGTLV

SEQ ID NO: 7027 - protein, 166 aa, Homo sapiens
MLSQSCNLDPLTETYGIPFYLQYLAHWPEYFIVAEAPGGELMGYIMGKAEGSVAREEWHGHVTALSVAPEFRRLGLAAKLMELLEEISERKGGFFVDLFVRVSNQVAVNMYKQLGYSVYRTVIEYYSASNGEPDEDAYDMRKALSRDTEKKSIIPLPHPVRPEDIE

SEQ ID NO: 7028 - protein, 132 aa, Homo sapiens; identical to SEQ ID NO: 6620

SEQ ID NO: 7029 - protein, 124 aa, Homo sapiens; identical to SEQ ID NO: 5720

SEQ ID NO: 7030 - protein, 111 aa, Homo sapiens
LMDLDSGDVKRRVHLFETQRRTKEEDPIIPFSDGPIISKWGAISRSSRTGYHTTDPVQATASQGSATKPISVSGGVHMATRPHHQHTMLKGTDSLLLIYLVIESIPVLGTF

SEQ ID NO: 7031 - protein, 132 aa, Homo sapiens; identical to SEQ ID NO: 6620

SEQ ID NO: 7032 - protein, 124 aa, Homo sapiens; identical to SEQ ID NO: 5720

SEQ ID NO: 7033 - protein, 345 aa, Homo sapiens
MLPNTGRLAGCTVFITGASRGIGKAIALKAAKDGANIVIAAKTAQPHPKLLGTIYTAAEEIEAVGGKALPCIVDVRDEQQISAAVEKAIKKFGAYTIAKYGMSMYVLGMAEEFKGEIAVNALWPKTAIHTAAMDMLGGPGIESQCRKVDIIADAAYSIFQKPKSFTGNFVIDENILKEEGIENFDVYAIKPGHPLQPDFFLDEYPEAVSKKVESTGAVPEFKEEKLQLQPKPRSGAVEETFRIVKDSLSDDVVKATQAIYLFELSGEDGGTWFLDLKSKGGNVGYGEPSDQADVVMSMTTDDFVKMFSGKLKPTMAFMSGKLKIKGNMALAIKLEKLMNQMNARL

SEQ ID NO: 7034 - protein, 418 aa, Homo sapiens
MLPNTGRLAGCTVFITGASRGIGKAIALKAAKDGANIVIAAKTAQPHPKLLGTIYTAAEEIEAVGGKALPCIVDVRDEQQISAAVEKAIKKFGGIDILVNNASAISLTNTLDTPTKRLDLMMNVNTRGTYLASKACIPYLKKSKVAHILNISPPLNLNPVWFKQHCAYTIAKYGMSMYVLGMAEEFKGEIAVNALWPKTAIHTAAMDMLGGPGIESQCRKVDIIADAAYSIFQKPKSFTGNFVIDENILKEEGIENFDVYAIKPGHPLQPDFFLDEYPEAVSKKVESTGAVPEFKEEKLQLQPKPRSGAVEETFRIVKDSLSDDVVKATQAIYLFELSGEDGGTWFLDLKSKGGNVGYGEPSDQADVVMSMTTDDFVKMFSGKLKPTMAFMSGKLKIKGNMALAIKLEKLMNQMNARL

SEQ ID NO: 7035 - protein, 358 aa, Homo sapiens
MPGCELPVGTCPDMCPAAERAQREREHRLHRLEVVPGCRQDPPRADPQRAVKEYSRPAAGKPRPPPSQLRPPSVLLATVRYLAGEVAESADIARAEVASFVADRLRAVLLDLALQGAGDAEAAVVLEAALATLLTVVARLGPDAARGPADPVLLQAQVQEGFGSLRRCYARGAGPHPRQPAFQGLFLLYNLGSVEALHEVLQLPAALRACPPLRKALAVDAAFREGNAARLFRLLQTLPYLPSCAVQCHVGHARREALARFARAFSTPKGQTLPLGFMVNLLALDGLREARDLCQAHGLPLDGEERVVFLRGRYVEEGLPPASTCKVLVESKLRGRTLEEVVMAEEEDEGTDRPGSPA

SEQ ID NO: 7036 - protein, 49 aa, Homo sapiens
MSSCVSSQPSSNRAAPQDELGGRGSSSSESQKPCEALRGLSSLSIHLGM

SEQ ID NO: 7037 - protein, 865 aa, Homo sapiens
MPAVSLPPKENALFKRILRCYEHKQYRNGLKFCKQILSNPKFAEHGETLAMKGLTLNCLGKKEEAYELVRRGLRNDLKSHVCWHVYGLLQRSDKKYDEAIKCYRNALKWDKDNLQILRDLSLLQIQMRDLEGYRETRYQLLQLRPAQRASWIGYAIAYHLLEDYEMAAKILEEFRKTQQTSPDKVDYEYSELLLYQNQVLREAGLYREALEHLCTYEKQICDKLAVEETKGELLLQLCRLEDAADVYRGLQERNPENWAYYKGLEKALKPANMLERLKIYEEAWTKYPRGLVPRRLPLNFLSGEKFKECLDKFLRMNFSKGCPPVFNTLRSLYKDKEKVAIIEELVVGYETSLKSCRLFNPNDDGKEEPPTTLLWVQYYLAQHYDKIGQPSIALEYINTAIESTPTLIELFLVKAKIYKHAGNIKEAARWMDEAQALDTADRFINSKCAKYMLKANLIKEAEEMCSKFTREGTSAVENLNEMQCMWFQTECAQAYKAMNKFGEALKKCHEIERHFIEITDDQFDFHTYCMRKITLRSYVDLLKLEDVLRQHPFYFKAARIAIEIYLKLHDNPLTDENKEHEADTANMSDKELKKLRNKQRRAQKKAQIEEEKKNAEKEKQQRNQKKKKDDDDEEIGGPKEELIPEKLAKVETPLEEAIKFLTPLKNLVKNKIETHLFAFEIYFRKEKFLLMLQSVKRAFAIDSSHPWLHECMIRLFNTVCESKDLSDTVRTVLKQEMNRLFGATNPKNFNETFLKRNSDSLPHRLSAAKMVYYLDPSSQKRAIELATTLDESLTNRNLQTCMEVLEALYDGSLGDCKEAAEIYRANCHKLFPYALAFMPPGYEEDMKITVNGDSSAEAEELANEI

SEQ ID NO: 7038 - protein, 598 aa, Homo sapiens; identical to SEQ ID NO: 5577

SEQ ID NO: 7039 - protein, 605 aa, Homo sapiens
MGGCFSKPKPVELKIEVVLPEKERGKEELSASGKGSPRAYQGNGTARHFHTEERLSTPHPYPSPQDCVEAAVCHVKDLENGQMREVELGWGKVLLVKDNGEFHALGHKCPHYGAPLVKGVLSRGRVRCPWHGACFNISTGDLEDFPGLDSLHKFQVKIEKEKVYVRASKQALQLQRRTKVMAKCISPSAGYSSSTNVLIVGAGAAGLVCAETLRQEGFSDRIVLCTLDRHLPYDRPKLSKSLDTQPEQLALRPKEFFRAYGIEVLTEAQVVTVDVRTKKVVFKDGFKLEYSKLLLAPGSSPKTLSCKGKEVENVFTIRTPEDANRVVRLARGRNVVVVGAGFLGMEVAAYLTEKAHSVSVVELEETPFRRFLGERVGRALMKMFENNRVKFYMQTEVSELRGQEGKLKEVVLKSSKVVRADVCVVGIGAVPATGFLRQSGIGLDSRGFIPVNKMMQTNVPGVFAAGDAVTFPLAWRNNRKVNIPHWQMAHAQGRVAAQNMLAQEAEMSTVPYLWTAMFGKSLRYAGYGEGFDDVIIQGDLEELKFVAFYTKGDEVIAVASMNYDPIVSKVAEVLASGRAIRKREVELFVLHSKTGDMSWLTGKGS

SEQ ID NO: 7040 - protein, 457 aa, Homo sapiens
MNQPCNSMEPRVMDDDMLKLAVGDQGPQEEAGQLAKQEGILFKDVLSLQLDFRNILRIDNLWQFENLRKLQLDNNIIEKIEGLENLAHLVWLDLSFNNIETIEGLDTLVNLEDLSLFNNRISKIDSLDALVKLQVLSLGNNRIDNMMNIIYLRRFKCLRTLSLSRNPISEAEDYKMFICAYLPDLMYLDYRRIDDHTKKLAEAKHQYSIDELKHQENLMQAQLEDEQAQREELEKHKTAFVEHLNGSFLFDSMYAEDSEGNNLSYLPGVGELLETYKDKFVIICVNIFEYGLKQQEKRKTELDTFSECVREAIQENQEQGKRKIAKFEEKHLSSLSAIREELELPNIEKMILECSADISELFDALMTLEMQLVEQLEETINMFERNIVDMVGLFIENVQSLMAQCRDLENHHHEKLLEISISTLEKIVEGDLDEDLPNDLRAGRFQKFNYVEASGTF

SEQ ID NO: 7041 - protein, 457 aa, Homo sapiens; identical to SEQ ID NO: 7040

SEQ ID NO: 7042 - protein, 523 aa, Homo sapiens; identical to SEQ ID NO: 5355

SEQ ID NO: 7043 - protein, 523 aa, Homo sapiens; identical to SEQ ID NO: 5355

SEQ ID NO: 7044 - protein, 613 aa, Homo sapiens; identical to SEQ ID NO: 5032

SEQ ID NO: 7045 - protein, 129 aa, Homo sapiens; identical to SEQ ID NO: 6440

SEQ ID NO: 7046 - protein, 129 aa, Homo sapiens; identical to SEQ ID NO: 6440

SEQ ID NO: 7047 - protein, 1377 aa, Homo sapiens
MVPGEENQLVPKEDVFWRCRQNIFDEMKKKFLQIENAAEEPRVLCIIQDTTNSKTVNERITLNLPASTPVRKLFEDVANKVGYINGTFDLVWGNGINTADMAPLDHTSDKSLLDANFEPGKKNFLHLTDKDGEQPQILLEDSSAGEDSVHDRFIGPLPREGSGGSTSDYVSQSYSYSSILNKSETGYVGLVNQAMTCYLNSLLQTLFMTPEFRNALYKWEFEESEEDPVTSIPYQLQRLFVLLQTSKKRAIETTDVTRSFGWDSSEAWQQHDVQELCRVMFDALEQKWKQTEQADLINELYQGKLKDYVRCLECGYEGWRIDTYLDIPLVIRPYGSSQAFASVEEALHAFIQPEILDGPNQYFCERCKKKCDARKGLRFLHFPYLLTLQLKRFDFDYTTMHRIKLNDRMTFPEELDMSTFIDVEDEKSPQTESCTDSGAENEGSCHSDQMSNDFSNDDGVDEGICLETNSGTEKISKSGLEKNSLIYELFSVMVHSGSAAGGHYYACIKSFSDEQWYSFNDQHVSRITQEDIKKTHGGSSGSRGYYSSAFASSTNAYMLIYRLKDPARNAKFLEVDEYPEHIKNLVQKERELEEQEKRQREIERNTCKIKLFCLHPTKQVMMENKLEVHKDKTLKEAVEMAYKMMDLEEVIPLDCCRLVKYDEFHDYLERSYEGEEDTPMGLLLGGVKSTYMFDLLLETRKPDQVFQSYKPGEVMVKVHVVDLKAESVAAPITVRAYLNQTVTEFKQLISKAIHLPAETMRIVLERCYNDLRLLSVSSKTLKAEGFFRSNKVFVESSETLDYQMAFADSHLWKLLDRHANTIRLFVLLPEQSPVSYSKRTAYQKAGGDSGNVDDDCERVKGPVGSLKSVEAILEESTEKLKSLSLQQQQDGDNGDSSKSTETSDFENIESPLNERDSSASVDNRELEQHIQTSDPENFQSEERSDSDVNNDRSTSSVDSDILSSSHSSDTLCNADNAQIPLANGLDSHSITSSRRTKANEGKKETWDTAEEDSGTDSEYDESGKSRGEMQYMYFKAEPYAADEGSGEGHKWLMVHVDKRITLAAFKQHLEPFVGVLSSHFKVFRVYASNQEFESVRLNETLSSFSDDNKITIRLGRALKKGEYRVKVYQLLVNEQEPCKFLLDAVFAKGMTVRQSKEELIPQLREQCGLELSIDRFRLRKKTWKNPGTVFLDYHIYEEDINISSNWEVFLEVLDGVEKMKSMSQLAVLSRRWKPSEMKLDPFQEVVLESSSVDELREKLSEISGIPLDDIEFAKGRGTFPCDISVLDIHQDLDWNPKVSTLNVWPLYICDDGAVIFYRDKTEELMELTDEQRNELMKKESSRLQKTGHRVTYSPARGSEKALKIYLDGAPNKDLTQD

SEQ ID NO: 7048 - protein, 199 aa, Homo sapiens
MRTADREARPGLPSLLLLLLAGAGLSAASPPAAPRFNVSLDSVPELRWLPVLRHYDLDLVRAAMAQVIGDRVPKWVHVLIGKVVLELERFLPQPFTGEIRGMCDFMNLSLADCLLVNLAYESSVFCTSIVAQDSRGHIYHGRNLDYPFGNVLRKLTVDVQFLKNGQIAFTGTTFIGYVGLWTGQSPHKFTVSGDERDPH

SEQ ID NO: 7049 - protein, 323 aa, Homo sapiens
MRTADREARPGLPSLLLLLLAGAGLSAASPPAAPRFNVSLDSVPELRWLPVLRHYDLDLVRAAMAQVIGDRVPKWVHVLIGKVVLELERFLPQPFTGEIRGMCDFMNLSLADCLLVNLAYESSVFCTSIVAQDSRGHIYHGRNLDYPFGNVLRKLTVDVQFLKNGQIAFTGTTFIGYVGLWTGQSPHKFTVSGDERDKGWWWENAIAALFRRHIPVSWLIRATLSESENFEAAVGKLAKTPLIADVYYIVGGTSPREGVVITRNRDGPADIWPLDPLNGAWFRVETNYDHWKPAPKEDDRRTSAIKALNATGQANLSLEALFQ

SEQ ID NO: 7050 - protein, 1512 aa, Homo sapiens
MAAAAGNRASSSGFPGARATSPEAGGGGGALKASSAPAAAAGLLREAGSGGRERADWRRRQLRKVRSVELDQLPEQPLFLAASPPASSTSPSPEPADAAGSGTGFQPVAVPPPHGAASRGGAHLTESVAAPDSGASSPAAAEPGEKRAPAAEPSPAAAPAGREMENKETLKGLHKMDDRPEERMIREKLKATCMPAWKHEWLERRNRRGPVVVKPIPVKGDGSEMNHLAAESPGEVQASAASPASKGRRSPSPGNSPSGRTVKSESPGVRRKRVSPVPFQSGRITPPRRAPSPDGFSPYSPEETNRRVNKVMRARLYLLQQIGPNSFLIGGDSPDNKYRVFIGPQNCSCARGTFCIHLLFVMLRVFQLEPSDPMLWRKTLKNFEVESLFQKYHSRRSSRIKAPSRNTIQKFVSRMSNSHTLSSSSTSTSSSENSIKDEEEQMCPICLLGMLDEESLTVCEDGCRNKLHHHCMSIWAEECRRNREPLICPLCRSKWRSHDFYSHELSSPVDSPSSLRAAQQQTVQQQPLAGSRRNQESNFNLTHYGTQQIPPAYKDLAEPWIQVFGMELVGCLFSRNWNVREMALRRLSHDVSGALLLANGESTGNSGGSSGSSPSGGATSGSSQTSISGDVVEACCSVLSMVCADPVYKVYVAALKTLRAMLVYTPCHSLAERIKLQRLLQPVVDTILVKCADANSRTSQLSISTLLELCKGQAGELAVGREILKAGSIGIGGVDYVLNCILGNQTESNNWQELLGRLCLIDRLLLEFPAEFYPHIVSTDVSQAEPVEIRYKKLLSLLTFALQSIDNSHSMVGKLSRRIYLSSARMVTTVPHVFSKLLEMLSVSSSTHFTRMRRRLMAIADEVEIAEAIQLGVEDTLDGQQDSFLQASVPNNYLETTENSSPECTVHLEKTGKGLCATKLSASSEDISERLASISVGPSSSTTTTTTTTEQPKPMVQTKGRPHSQCLNSSPLSHHSQLMFPALSTPSSSTPSVPAGTATDVSKHRLQGFIPCRIPSASPQTQRKFSLQFHRNCPENKDSDKLSPVFTQSRPLPSSNIHRPKPSRPTPGNTSKQGDPSKNSMTLDLNSSSKCDDSFGCSSNSSNAVIPSDETVFTPVEEKCRLDVNTELNSSIEDLLEASMPSSDTTVTFKSEVAVLSPEKAENDDTYKDDVNHNQKCKEKMEAEEEEALAIAMAMSASQDALPIVPQLQVENGEDIIIIQQDTPETLPGHTKAKQPYREDTEWLKGQQIGLGAFSSCYQAQDVGTGTLMAVKQVTYVRNTSSEQEEVVEALREEIRMMSHLNHPNIIRMLGATCEKSNYNLFIEWMAGGSVAHLLSKYGAFKESVVINYTEQLLRGLSYLHENQIIHRDVKGANLLIDSTGQRLRIADFGAAARLASKGTGAGEFQGQLLGTIAFMAPEVLRGQQYGRSCDVWSVGCAIIEMACAKPPWNAEKHSNHLALIFKIASATTAPSIPSHLSPGLRDVALRCLELQPQDRPPSRELLKHPVFRTTW

SEQ ID NO: 7051 - protein, 757 aa, Homo sapiens
ADGGDSQAFRCTSCGHAGTTPAPREALSPADAHVGRGFAEREPIPAQGLLVLAVLSDGAGDHIRQRLLPPLLQIVCKGLEDPSQVVRNAALFALGQFSENLQPHISSYSREVMPLLLAYLKSVPLGHTHHLAKACYALENFVENLGPKVQPYLPELMECMLQLLRNPSSPRAKELAVSALGAIATAAQASLLPYFPAIMEHLREFLLTGREDLQPVQIQSLETLGVLARAVGEPMRPLAEECCQLGLGLCDQVDDPDLRRCTYSLFAALSGLMGEGLAPHLEQITTLMLLSLRSTEGIVPQYDGSSSFLLFDDESDGEEEEELMDEDVEEEDDSEISGYSVENAFFDEKEDTCAAVGEISVNTSVAFLPYMESVFEEVFKLLECPHLNVRKAAHEALGQFCCALHKACQSCPSEPNTAALQAALARVVPSYMQAVNRERERQVVMAVLEALTGVLRSCGTLTLKPPGRLAELCGVLKAVLQRKTACQDTDEEEEEEDDDQAEYDAMLLEHAGEAIPALAAAAGGDSFAPFFAGFLPLLVCKTKQGCTVAEKSFAVGTLAETIQGLGAASAQFVSRLLPVLLSTAQEADPEVRSNAIFGMGVLAEHGGHPAQEHFPKLLGLLFPLLARERHDRVRDNICGALARLLMASPTRKPEPQVLAALLHALPLKEDLEEWVTIGRLFSFLYQSSPDQVIDVAPELLRICSLILADNKIPPDTKAALLLLLTFLAKQHTDSFQAALGSLPVDKAQELQAVLGLS

SEQ ID NO: 7052 - protein, 603 aa, Homo sapiens
MGVIPEGPLWVSGSDDNLSGTSGMEVDDRVSALEQRLQLQEDELAVLKAALADALRRLRACEEQGAALRARGTPKGRAPPRLGTTASVCQLLKGLPTRTPLNGSGPPRRVGGYATSPSSPKKEATSGRSSVRRYLSPERLASVRREDPRSRTTSSSSNCSAKKEGKTKEVIFSVEDGSVKMFLRGRPVPMMIPDELAPTYSLDTRSELPSCRLKLEWVYGYRGRDCRANLYLLPTGEIVYFVASVAVLYSVEEQRQRHYLGHNDDIKCLAIHPDMVTIATGQVAGTTKEGKPLPPHVRIWDSVSLSTLHVLGLGVFDRAVCCVGFSKSNGGNLLCAVDESNDHMLSVWDWAKETKVVDVKCSNEAVLVATFHPTDPTVLITCGKSHIYFWTLEGGSLSKRQGLFEKHEKPKYVLCVTFLEGGDVVTGDSGGNLYVWGKGGNRITQAVLGAHDGGVFGLCALRDGTLVSGGGRDRRVVLWGSDYSKLQEVEVPEDFGPVRTVAEGHGDTLYVGTTRNSILQGSVHTGFSLLVQGHVEELWGLATHPSRAQFVTCGQDKLVHLWSSDSHQPLWSRIIEVESRSVTQAGGQWHDLGSLQPPPPGFK

SEQ ID NO: 7053 - protein, 330 aa, Homo sapiens
MAEGGGPEPGEQERRSSGPRPPSARDLQLALAELYEDEVKCKSSKSNRPKATVFKSAAPPQRFYSSEHEYSGLNIVRPSTGKIVNELFKEAREHGAVPLNEATRASGDDKSKSFTGGGYRLGSSFCKRSEYIYGENQLQDVQILLKLWSNGFSLDDGELRPYNEPTNAQFLESVKRGEIPLELQRLVHGGQVNLDMEDHQDQEYIKPRLRFKAFSGEGQKLGSLTPEIVSTPSSPEEEDKSILNAVVLIDDSVPTTKIQIRLADGSRLIQRFNSTHRILDVRNFIVQSRPEFAALDFILVTSFPNKELTDESLTLLEADILNTVLLQQLK

SEQ ID NO: 7054 - protein, 687 aa, Homo sapiens
MDGGALTDTSLTDSYFSTSFIGVNGFGSPVETKYPLMQRMTNSSSSPSLLNDSAKPYSAHDPLTSPASSLFNDFGALNISQRRKTPNPTASEFIPKGGSTSRLSNVSQSNMSAFSQVFSHPSMGSPATAGLAPGMSLSAGSSPLHSPKITPHTSPAPRRRSHTPNPASYMVPSSASTSVNNPVSQTPSSGQVIQKETVGGTTYFYTDTTPAPLTGMVFPNYHIYPPTAPHVAYMQPKANAPSFFMADELRQELINRHLITMAQIDQADMPAVPTEVDSYHSLFPLEPLPPPNRIQKSSNFGYITSCYKAVNSKDDLPYCLRRIHGFRLVNTKCMVLVDMWKKIQHSNIVTLREVFTTKAFAEPSLVFAYDFHAGGETMMSRHFNDPNADAYFTKRKWGQHEGPLPRQHAGLLPESLIWAYIVQLSSALRTIHTAGLACRVMDPTKILITGKTRLRVNCVGVFDVLTFDNSQNNNPLALMAQYQQADLISLGKVVLALACNSLAGIQRENLQKAMELVTINYSSDLKNLILYLLTDQNRMRSVNDIMPMIGARFYTQLDAAQMRNDVIEEDLAKEVQNGRLFRLLAKLGTINERPEFQKDPTWSETGDRYLLKLFRDHLFHQVTEAGAPWIDLSHIISCLNKLDAGVPEKISLISRDEKSVLVVTYSDLKRCFENTFQELIAAANGQL

SEQ ID NO: 7055 - protein, 2318 aa, Homo sapiens
MDGVSSEANEENDNIERPVRRRHSSILKPPRSPLQDLRGGNERVQESNALRNKKNSRRVSFADTIKVFQTESHMKIVRKSEMEETETGENLLLIQNKKLEDNYCEITGMNTLLSAPIHTQMQQKEFSIIEHTRERKHANDQTVIFSDENQMDLTSSHTVMITKGLLDNPISEKSTKIDTTSFLANLKLHTEDSRMKKEVNFSVDQNTSSENKIDFNDFIKRLKTGKCSAFPDVPDKENFEIPIYSKEPNSASSTHQMHVSLKEDENNSNITRLFREKDDGMNFTQCHTANIQTLIPTSSETNSRESKGNDITIYGNDFMDLTFNHTLQILPATGNFSEIENQTQNAMDVTTGYGTKASGNKTVFKSKQNTAFQDLSINSADKIHITRSHIMGAETHIVSQTCNQDARILAMTPESIYSNPSIQGCKTVFYSSCNDAMEMTKCLSNMREEKNLLKHDSNYAKMYCNPDAMSSLTEKTIYSGEENMDITKSHTVAIDNQIFKQDQSNVQIAAAPTPEKEMMLQNLMTTSEDGKMNVNCNSVPHVSKERIQQSLSNPLSISLTDRKTELLSGENMDLTESHTSNLGSQVPLAAYNLAPESTSESHSQSKSSSDECEEITKSRNEPFQRSDIIAKNSLTDTWNKDKDWVLKILPYLDKDSPQSADCNQEIATSHNIVYCGGVLDKQITNRNTVSWEQSLFSTTKPLFSSGQFSMKNHDTAISSHTVKSVLGQNSKLAEPLRKSLSNPTPDYCHDKMIICSEEEQNMDLTKSHTVVIGFGPSELQELGKTNLEHTTGQLTTMNRQIAVKVEKCGKSPIEKSGVLKSNCIMDVLEDESVQKPKFPKEKQNVKIWGRKSVGGPKIDKTIVFSEDDKNDMDITKSYTIEINHRPLLEKRDCHLVPLAGTSETILYTCRQDDMEITRSHTTALECKTVSPDEITTRPMDKTVVFVDNHVELEMTESHTVFIDYQEKERTDRPNFELSQRKSLGTPTVICTPTEESVFFPGNGESDRLVANDSQLTPLEEWSNNRGPVEVADNMELSKSATCKNIKDVQSPGFLNEPLSSKSQRARGSSLKLKNDKTIVFSENHKNDMDITQSCMVEIDNESALEDKEDFHLAGASKTILYSCGQDDMEITRSHTTALECKTLLPNEIAIRPMDKTVLFTDNYSDLEVTDSHTVFIDCQATEKILEENPKFGIGKGKNLGVSFPKDNSCVQEIAEKQALAVGNKIVLHTEQKQQLFAATNRTTNEIIKFHSAAMDEKVIGKVVDQACTLEKAQVESCQLNNRDRRNVDFTSSHATAVCGSSDNYSCLPNVISCTDNLEGSAMLLCDKDEEKANYCPVQNDLAYANDFASEYYLESEGQPLSAPCPLLEKEEVIQTSTKGQLDCVITLHKDQDLIKDPRNLLANQTLVYSQDLGEMTKLNSKRVSFKLPKDQMKVYVDDIYVIPQPHFSTDQPPLPKKGQSSINKEEVILSKAGNKSLNIIENSSAPICENKPKILNSEEWFAAACKKELKENIQTTNYNTALDFHSNSDVTKQVIQTHVNAGEAPDPVITSNVPCFHSIKPNLNNLNGKTGEFLAFQTVHLPPLPEQLLELGNKAHNDMHIVQATEIHNINIISSNAKDSRDEENKKSHNGAETTSLPPKTVFKDKVRRCSLGIFLPRLPNKRNCSVTGIDDLEQIPADTTDINHLETQPVSSKDSGIGSVAGKLNLSPSQYINEENLPVYPDEINSSDSINIETEEKALIETYQKEISPYENKMGKTCNSQKRTWVQEEEDIHKEKKIRKNEIKFSDTTQDREIFDHHTEEDIDKSANSVLIKNLSRTPSSCSSSLDSIKADGTSLDFSTYRSSQMESQFLRDTICEESLREKLQDGRITIREFFILLQVHILIQKPRQSNLPGNFTVNTPPTPEDLMLSQYVYRPKIQIYREDCEARRQKIEELKLSASNQDKLLVDINKNLWEKMRHCSDKELKAFGIYLNKIKSCFTKMTKVFTHQGKVALYGKLVQSAQNEREKLQIKIDEMDKILKKIDNCLTEMETETKNLEDEEKNNPVEEWDSEMRAAEKELEQLKTEEEELQRNLLELEVQKEQTLAQIDFMQKQRNRTEELLDQLSLSEWDVVEWSDDQAVFTFVYDTIQLTITFEESVVGFPFLDKRYRKIVDVNFQSLLDEDQAPPSSLLVHKLIFQYVEEKESWKKTCTTQHQLPKMLEEFSLVVHHCRLLGEEIEYLKRWGPNYNLMNIDINNNELRLLFSSSAAFAKFEITLFLSAYYPSVPLPSTIQNHVGNTSQDDIATILSKVPLENNYLKNVVKQIYQDLFQDCHFYH

SEQ ID NO: 7056 - protein, 237 aa, Homo sapiens
MGCCGCSGGCGSGCGGRGSGCGGCGSGCGGCGSGCGGCGSGCGGCGGCGSGCAGCGGCGSGCCVPVCCCKPMCCCVPACSCSSCGKGGCGSCGGSKRGCVSCGVSKGACGSCGGSKGGCGSCGGSKGGCGSCGGSKGGCGSCGGSKGGCGSYGCSQSSCCKPCCCSSGCGSSCCQSSCCKPYCCQSSCCKPYCCQSSCCKPCSCFSGCGSSCCQSSCYKPCCCQSSCCVPVCCQCKI

SEQ ID NO: 7057 - protein, 238 aa, Homo sapiens
MGCSGCSGGCGSSCGGCGSSCGGCGSGYGGCGSGCCVPVCCCKPVCCCVPACSCSSCGSCGGSKGVCGSCGGCKGGCGSCGGSKGGCGSSCCVPVCCSSSCGSCGGSKGVCGFRGGSKGGCGSCGCSQCSCYKPCCCSSGCGSSCCQSSCCKPSCSQSSCCKPCCSQSSCCKPCCCSSGCGSSCCQSSCCKPCCSQSSCCKPCCCSSGCGSSCCQSSCCKPCSSQSSCCVPICCQCKI

SEQ ID NO: 7058 - protein, 490 aa, Homo sapiens; identical to SEQ ID NO: 5369

SEQ ID NO: 7059 - protein, 1943 aa, Homo sapiens
LLTSVLMPSFGYFIRSPEKREPIALIRKSDVSRGNLEKEMAHLNHDLYSGDLNEQSQAQLSEGSITLQVEAVESTSQVDENDVTLTADKGKTEDTFFMSNKPQRYKDKLPDSGDSMLRISTIASAIAEASVNTDPSQLAAMIKALSNKTRDKTFQEDEKQKDYSHVRHFLPNDLEKSNGSNALDMEKYLKKTEVSRYESALENFSRASMSDTWDLSLPKEQTTQDIHPVDLSATSVSVRAPEENTAAIVYVENGESENQESFRTINSSNSVTNRENNSAVVDVKTCSIDNKLQDVGNDEKATSISTPSDSYSSVRNPRITSLCLLKDCEEIRDNRENQRQNECVSEISNSEKHVTFENHRIVSPKNSDLKNTSPEHGGRGSEDEQESFRPSTSPLSHSSPSEISGTSSSGCALESFGSAAQQQQPPCEQELSPLVCSPAGVSRLTYVSEPESSYPTTATDDALEDRKSDITSELSTTIIQGSPAALEERAMEKLREKVPFQNRGKGTLSSIIQNNSDTRKATETTSLSSKPEYVKPDFRWSKDPSSKSGNLLETSEVGWTSNPEELDPIRLALLGKSGLSCQVGSATSHPVSCQEPIDEDQRISPKDKSTAGREFSGQVSHQTTSENQCTPIPSSTVHSSVADMQNMPAAVHALLTQPSLSAAPFAQRYLGTLPSTGSTTLPQCHAGNATVCGFSGGLPYPAVAGEPVQNSVAVGICLGSNIGSGWMGTSSLCNPYSNTLNQNLLSTTKPFPVPSVGTNCGIEPWDSGVTSGLGSVRVPEELKLPHACCVGIASQTLLSVLNPTDRWLQVSIGVLSISVNGEKVDLSTYRCLVFKNKAIIRPHATEEIKVLFIPSSPGVFRCTFSVASWPCSTDAETIVQAEALASTVTLTAIAESPVIEVETEKKDVLDFGDLTYGGWKALPLKLINRTHATVPIRLIINANAVAWRCFTFSKESVRAPVEVAPCADVVTRLAGPSVVNHMMPASYDGQDPEFLMIWVLFHSPKKQISSSDILDSAEEFSAKVDIEVDSPNPTPVLRSVSLRARAGIARIHAPRDLQTMHFLAKVASSARGSQHLPLKNAGNIEVYLDIKVPEQGSHFSVDPKNLLLKPGEEHEVIVSFTPKDPEACEERILKIFVQPFGPQYEVVLKGEVISSGSKPLSPGPCLDIPSILSNKQFLAWGGVPLGRTQLQKLALRNNSASTTQHLRLLIRGQDQDCFQLQNTFGSEQRLTSNCEIRIHPKEDIFISVLFAPTRLSCMLARLEIKQLGNRSQPGIKFTIPLSGYGGTSNLILEGVKKLSDSYMVTVNGLVPGKESKIVFSVRNTGSRAAFVKAVGFKDSQKKVLLDPKVLRIFPDKFVLKERTQENVTLIYNPSDRGINNKTATELSTVYLFGGDEISRQQYRRALLHKPEMIKQILPEHSVLQNINFVEAFQDELLVTEVYDLPQRPNDVQLFYGSMCKIILSVIGEFRDCISSREFLQPSSKASLESTSDLGASGKHGGNVSLDVLPVKGPQGSPLLSRAARPPLDQLASEEPWTVLPEHLILVAPSPCDMAKTGRFQIVNNSVRLLRFELCWPAHCLTVTPQHGCVAPESKLQILVSPNSSLSTKQSMFPWSGLIYIHCDDGQKKIVKVQIREDLTQVELLTRLTSKPFGILSPVSEPSVSHLVKPMTKPPSTKVEIRNKSITFPTTEPGETSESCLELENHGTTDVKWHLSSLAPPYVKGVDESGDVFRATYAAFRCSPISGLLESHGIQKVSITFLPRGRGDYAQFWDVECHPLKEPHMKHTLRFQLSGQSIEAENEPENACLSTDSLIKIDHLVKPRRQAVSEASARIPEQLDVTARGVYAPEDVYRFRPTSVGESRTLKVNLRNNSFITHSLKFLSPREPFYVKHSKYSLRAQHYINMPVQFKPKSAGKFEALLVIQTDEGKSIAIRLIGEALGKN

SEQ ID NO: 7060 - protein, 36 aa, Homo sapiens
MCYYGNYYGGYGYGGLGCGYGSCCGCGFRRLGCGYG

SEQ ID NO: 7061 - protein, 174 aa, Homo sapiens
MSYNCCSGNFSSRSCGDYLRYPASSRGFSYPSNLVYSTDLCSPSTCQLGSSLYRGCQEICWEPTSCQTSYVESSPCQTSCYRAASLLCSPCKTTYSGSLGFGSSSCRSLGYGSRSCYSVGCGSSGVRSLGYGSCGFPSLGYGSGFCRPTYLASRSCQSPCYRPAYGSTFCRSTC

SEQ ID NO: 7062 - protein, 107 aa, Homo sapiens
MGKKRTKGKTVPIDDSSETLEPVCRHIRKGLEQGNLKKALVNVEWNICQDCKTDNKVKDKAEEETEEKPSVWLCLKCGHQGCGRNSQEQHALKHYLTPRSEPHCLVL

SEQ ID NO: 7063 - protein, 822 aa, Homo sapiens
MGKKRTKGKTVPIDDSSETLEPVCRHIRKGLEQGNLKKALVNVEWNICQDCKTDNKVKDKAEEETEEKPSVWLCLKCGHQGCGRNSQEQHALKHYLTPRSEPHCLVLSLDNWSVWCYVCDNEVQYCSSNQLGQVVDYVRKQASITTPKPEKDNGNIELENKKLEKESKNEQEREKKENMAKENPPMNSPCQITVKGLSNLGNTCFFNAVMQNLSQTPVLRELLKEVKMSGTIVKIEPPDLALTEPLEINLEPPGPLTLAMSQFLNEMQETKKGVVTPKELFSQVCKKAVRFKGYQQQDSQELLRYLLDGMRAEEHQRVSKGILKAFGNSTEKLDEELKNKVKDYEKKKSMPSFVDRIFGGELTSMIMCDQCRTVSLVHESFLDLSLPVLDDQSGKKSVNDKNLKKTVEDEDQDSEEEKDNDSYIKERSDIPSGTSKHLQKKAKKQAKKQAKNQRRQQKIQGKVLHLNDICTIDHPEDSEYEAEMSLQGEVNIKSNHISQEGVMHKEYCVNQKDLNGQAKMIESVTDNQKSTEEVDMKNINMDNDLEVLTSSPTRNLNGAYLTEGSNGEVDISNGFKNLNLNAALHPDEINIEILNDSHTPGTKVYEVVNEDPETAFCTLANREVFNTDECSIQHCLYQFTRNEKLRDANKLLCEVCTRRQCNGPKANIKGERKHVYTNAKKQMLISLAPPVLTLHLKRFQQAGFNLRKVNKHIKFPEILDLAPFCTLKCKNVAEENTRVLYSLYGVVEHSGTMRSGHYTAYAKARTANSHLSNLVLHGDIPQDFEMESKGQWFHISDTHVQAVPTTKVLNSQAYLLFYERIL

SEQ ID NO: 7064 - protein, 823 aa, Homo sapiens; identical to SEQ ID NO: 5605

SEQ ID NO: 7065 - protein, 388 aa, Homo sapiens
MDPIRSFCGKLRSLASTLDCETARLQRALDGEESDFEDYPMRILYDLHSEVQTLKDDVNILLDKARLENQEGIDFIKATKVLMEKNSMDIMKIREYFQKYGYSPRVKKNSVHEQEAINSDPELSNCENFQKTDVKDDLSDPPVASSCISEKSPRSPQLSDFGLERYIVSQVLPNPPQAVNNYKEEPVIVTPPTKQSLVKVLKTPKCALKMDDFECVTPKLEHFGISEYTMCLNEDYTMGLKNARNNKSEEAIDTESRLNDNVFATPSPIIQQLEKSDAEYTNSPLVPTFCTPGLKIPSTKNSIALVSTNYPLSKTNSSSNDLEVEDRTSLVLNSDTCFENLTDPSSPTISSYENLLRTPTPPEVTKIPEDILQKFQWIYPTQKLNKMR

SEQ ID NO: 7066 - protein, 450 aa, Homo sapiens; identical to SEQ ID NO: 5432

SEQ ID NO: 7067 - protein, 1125 aa, Homo sapiens
MTVEQNVLQQSAAQKHQQTFLNQLREITGINDTQILQQALKDSNGNLELAVAFLTAKNAKTPQQEETTYYQTALPGNDRYISVGSQADTNVIDLTGDDKDDLQRAIALSLAESNRAFRETGITDEEQAISRVLEASIAENKACLKRTPTEVWRDSRNPYDRKRQDKAPVGLKNVGNTCWFSAVIQSLFNLLEFRRLVLNYKPPSNAQDLPRNQKEHRNLPFMRELRYLFALLVGTKRKYVDPSRAVEILKDAFKSNDSQQQDVSEFTHKLLDWLEDAFQMKAEEETDEEKPKNPMVELFYGRFLAVGVLEGKKFENTEMFGQYPLQVNGFKDLHECLEAAMIEGEIESLHSENSGKSGQEHWFTELPPVLTFELSRFEFNQALGRPEKIHNKLEFPQVLYLDRYMHRNREITRIKREEIKRLKDYLTVLQQRLERYLSYGSGPKRFPLVDVLQYALEFASSKPVCTSPVDDIDASSPPSGSIPSQTLPSTTEQQGALSSELPSTSPSSVAAISSRSVIHKPFTQSRIPPDLPMHPAPRHITEEELSVLESCLHRWRTEIENDTRDLQESISRIHRTIELMYSDKSMIQVPYRLHAVLVHEGQANAGHYWAYIFDHRESRWMKYNDIAVTKSSWEELVRDSFGGYRNASAYCLMYINDKAQFLIQEEFNKETGQPLVGIETLPPDLRDFVEEDNQRFEKELEEWDAQLAQKALQEKLLASQKLRESETSVTTAQAAGDPEYLEQPSRSDFSKHLKEETIQIITKASHEHEDKSPETVLQSKPENTTSQPLSNQRVVEVAIPHVGKFMIESKEGGYDDEIMMTPNMQGIIMAIGKSRSVYDRCGPEAGFFKAIKLEYARLVKLAQEDTPPETDYRLHHVVVYFIQNQAPKKIIEKTLLEQFGDRNLSFDERCHNIMKVAQAKLEMIKPEEVNLEEYEEWHQDYRKFRETTMYLIIGLENFQRESYIDSLLFLICAYQNNKELLSKGLYRGHDEELISHYRRECLLKLNEQAAELFESGEDREVNNGLIIMNEFIVPFLPLLLVDEMEEKDILAVEDMRNRWCSYLGQEMEPHLQEKLTDFLPKLLDCSMEIKSFHEPPKLPSYSTHELCERFARIMLSLSRTPADGR

SEQ ID NO: 7068 - protein, 535 aa, Homo sapiens
MDLRQACRTPSRDEAGVELLMTYFIQLGFVESRFFPPTRQMGLLFTWYDSLTGVPVSQQNLLLEKASVLFNTGALYTQIGTRCDRQTQAGLESAIDAFQRAAGVLNYLKDTFTHTPSYDMSPAMLSVLVKMMLAQAQESVFEKISLPGIRNEFFMLVKVAQEAAKVGEVYQQLHAAMSQAPVKENIPYSWASLACVKAHHYAALAHYFTAILLIDHQVKPGTDLDHQEKCLSQLYDHMPEGLTPLATLKNDQQRRQLGKSHLRRAMAHHEESVREASLCKKLRSIEVLQKVLCAAQERSRLTYAQHQEEDDLLNLIDAPSVVAKTEQEVDIILPQFSKLTVTDFFQKLGPLSVFSANKRWTPPRSIRFTAEEGDLGFTLRGNAPVQVHFLDPYCSASVAGAREGDYIVSIQLVDCKWLTLSEVMKLLKSFGEDEIEMKVVSLLDSTSSMHNKSATYSVGMQKTYSMICLAIDDDDKTDKTKKISKKLSFLSWGTNKNRQKSASTLCLPSVGAARPQVKKKLPSPFSLLNSDSSWY

SEQ ID NO: 7069 - protein, 983 aa, Homo sapiens
MAPRLQLEKAAWRWAETVRPEEVSQEHIETAYRIWLEPCIRGVCRRNCKGNPNCLVGIGEHIWLGEIDENSFHNIDDPNCERRKKNSFVGLTNLGATCYVNTFLQVWFLNLELRQALYLCPSTCSDYMLGDGIQEEKDYEPQTICEHLQYLFALLQNSNRRYIDPSGFVKALGLDTGQQQDAQEFSKLFMSLLEDTLSKQKNPDVRNIVQQQFCGEYAYVTVCNQCGRESKLLSKFYELELNIQGHKQLTDCISEFLKEEKLEGDNRYFCENCQSKQNATRKIRLLSLPCTLNLQLMRFVFDRQTGHKKKLNTYIGFSEILDMEPYVEHKGGSYVYELSAVLIHRGVSAYSGHYIAHVKDPQSGEWYKFNDEDIEKMEGKKLQLGIEEDLAEPSKSQTRKPKCGKGTHCSRNAYMLVYRLQTQEKPNTTVQVPAFLQELVDRDNSKFEEWCIEMAEMRKQSVDKGKAKHEEVKELYQRLPAGAEPYEFVSLEWLQKWLDESTPTKPIDNHACLCSHDKLHPDKISIMKRISEYAADIFYSRYGGGPRLTVKALCKECVVERCRILRLKNQLNEDYKTVNNLLKAAVKGSDGFWVGKSSLRSWRQLALEQLDEQDGDAEQSNGKMNGSTLNKDESKEERKEEEELNFNEDILCPHGELCISENERRLVSKEAWSKLQQYFPKAPEFPSYKECCSQCKILEREGEENEALHKMIANEQKTSLPNLFQDKNRPCLSNWPEDTDVLYIVSQFFVEEWRKFVRKPTRCSPVSSVGNSALLCPHGGLMFTFASMTKEDSKLIALIWPSEWQMIQKLFVVDHVIKITRIEVGDVNPSETQYISEPKLCPECREGLLCQQQRDLREYTQATIYVHKVVDNKKVMKDSAPELNVSSSETEEDKEEAKPDGEKDPDFNQIMHAFSVAPFDQNLSIDGKILSDDCATLGTLGVIPESVILLKADEPIADYAAMDDVMQVCMPEEGFKGTGLLGH

SEQ ID NO: 7070 - protein, 245 aa, Homo sapiens
MSVCSSDLSYGSRVCLPGSCDSCSDSWQVDDCPESCCEPPCCAPAPCLSLVCTPVSRVSSPCCRVTCEPSPCQSGCTSSCTPSCCQQSSCQPACCTSSPCQQACCVPVCCKTVCCKPVCCMPVCCGPSSSCCQQSSCQPACCISSPCQQSCCVPVCCKPICCVPVCSGASSLCCQQSSCQPACCTTSCCRPSSSVSLLCRPVCRPARRVPVPSCCVPTSSCQPSCGRLASCGSLLCRPTCSRLAC

SEQ ID NO: 7071 - protein, 365 aa, Homo sapiens
MAASTMSVCSSDLSYGSRVCLPGSCDSCSDSWQVDDCPESCCEPPCCAPAPCLSLVCTPVSRVSSPCCPVTCEPSPCQSGCTSSCTPSCCQQSSCQLACCASSPCQQACCVPVCCKTVCCKPVCCVSVCCGDSSCCQQSSCQSACCTSSPCQQACCVPVCCKPVCSGISSSCCQQSSCVSCVSSPCCQAVCEPSPCQSGCTSSCTPSCCQQSSCQPTCCTSSPCQQACCVPVCCVPVCCVPTCSEDSSSCCQQSSCQPACCTSSPCQHACCVPVCSGASTSCCQQSSCQPACCTASCCRPSSSVSLLCHPVCKSTCCVPVPSCGASASSCQPSCCRTASCVSLLCRPMCSRPACYSLCSGQKSSC

SEQ ID NO: 7072 - protein, 271 aa, Homo sapiens
MAACTMSVCSSACSDSWRVDDCPESCCEPPCGTAPCLTLVCTPVSCVSSPCCQAACEPSPCQSGCTSSCTPSCCQPACCASSPCQQACCVPVCCKPVCCLPTCSKDSSSCCQQSSCQPTCCASSSCQQSCCVPVCCKPVCCVPTCSEDSSSCCQHSSCQPTCCTSSPCQQSCYVPVCCKPVCFKPICCVPVCSGASTSCCQQSSCQPACCTTSCCRPSSSVSLLCRPICRPACCVPISSCCAPASSYQASCCRPASCVSLLCRPACSRLAC

SEQ ID NO: 7073 - protein, 401 aa, Homo sapiens
MSVCSSDLSYSSRVCLPGSCDSCSDSWQVDDCPESCCEPPCCAPSCCAPAPCLSLVCTPVSRVSSPCCPVTCEPSPCQSGCTSSCTPSCCQQSSCQLACCASSPCQQACCVPVCCKTVCCKPVCCVPVCCGDSSCCQQSSCQSACCTSSPCQQACCVPICCKPVCSGISSSCCQQSSCVSCVSSPCCQAVCEPSPCQSGCISSCTPSCCQQSSCQPACCTSSSCQQACCVPVCCKTVCCKPVCSEDSSSCCQQSSCQPACCTSSPCQQACCVPVCCKPVCCKPVGSVPICSGASSLCCQQSSCQPACCTSSQSQQGCCVPVCCKPVSCVPVCSGASSSCCQQSSCQPACCTTSCCRPSSSVSLLCRPVCRPACCVPVPSCCAPTSSCQPSCCRPASCVSLL

SEQ ID NO: 7074 - protein, 282 aa, Homo sapiens
MAASTMSVCSSACSDSWQVDACPESCCEPHCCALSCCAPAPCLTLVCTPVSRVSSPCCQAACEPSPCQSGCTSSCTPSCCQQSSCQPACCTSSPCQQACCVPVCCKPVCCLPTCSKDSSSCCQQSSCQPTCCASSSSQQSCCVPVCCKPVCYVPTCSEDSSSCCQQSSCHPACCTSSPCQQACCVPVRCKPVCCKPICCVPVCSGASTSCCQQSSCQPACCTTSCCRPSSSVSLLCRPVCRPACCMPVSSCCAPASSCQASCCRPASCVSLLCRPACSRPAC

SEQ ID NO: 7075 - protein, 296 aa, Homo sapiens
MASSPLPGPNDILLASPSSAFQPDTLSQPRPGHANLKPNQVGQVILYGIPIVSLVIDGQERLCLAQISNTLLKNFSYNEIHNRRVALGITCVQCTPVQLEILRRAGAMPISSRRCGMITKREAERLCKSFLGENRPPKLPDNFAFDVSHECAWGCRGSFIPARYNSSRAKCIKCSYCNMYFSPNKFIFHSHRTPDAKYTQPDAANFNSWRRHLKLTDKSPQDELVFAWEDVKAMFNGGSRKRALPQPGAHPACHPLSSIRTRSIAFSSQTLMLLEEIFGEKDQEDYMRINEDNIWL

SEQ ID NO: 7076 - protein, 1785 aa, Homo sapiens
VKKIHRHRLSPATEKGAASSGEGDKDPPPPAHEDIAVKGTATAAGTGPGTGAAAAAAAAVPPPHPAAAAAAAAAAAAAAAAAVPPPHPNIRALQTQAPQQIPRGPVQQPLEDRIFTPAVSAVYSTVTQVARQPGTPTPSPYSAHEINKGHPNLAATPPGHASSPGLSQTPYPSGQNAGPTTLVYPQTPQTMNSQPQTRSPVIFSPSQFFQRPQIQPPRATIPNSSPSIRPGAQTPTAVYQANQHIMMVNHLPMPYPVPQGPQYCIPQYRHSGPPYVGPPQQYPVQPPGPGPFYPGPGPGDFPNAYGTPFYPSQPVYQSAPIIVPTQQQPPPAKREKKTIRIRDPNQGGKDITEEIMSGGGSRNPTPPIGRPTSTPTPPQLPSQVPEHSPVVYGTVESAHLAASTPVTAASDQKQEEKPKPDPVLKSPSPVLRLVLSGEKKEQEGQTSETTAIVSIAELPLPPSPTTVSSVARSTIAAPTSSALSSQPIFTTAIDDRCELSSPREDTIPIPSLTSCTETSDPLPTNENDDDICKKPCSVAPNDIPLVSSTNLINEINGVSEKLSATESIVEIVKQEVLPLTLELEILENPPEEMKLECIPAPITPSTVPSFPPTPPTPPASPPHTPVIVPAAATTVSSPSAAITVQRVLEEDESIRTCLSEDAKEIQNKIEVEADGQTEEILDSQNLNSRRSPVPAQIAITVPKTWKKPKDRTRTTEEMLEAELELKAEEELSIDKVLESEQDKMSQGFHPERDPSDLKKVKAVEENGEEAEPVRNGAESVSEGEGIDANSGSTDSSGDGVTFPFKPESWKPTDTEGKKQYDREFLLDFQFMPACIQKPEGLPPISDVVLDKINQPKLPMRTLDPRILPRGPDFTPAFADFGRQTPGGRGVPLLNVGSRRSQPGQRREPRKIITVSVKEDVHLKKAENAWKPSQKRDSQADDPENIKTQELFRKVRSILNKLTPQMFNQLMKQVSGLTVDTEERLKGVIDLVFEKAIDEPSFSVAYANMCRCLVTLKVPMADKPGNTVNFARGSLLLNRCQKEFEKDKADDDVFEKKQKELEAASAPEERTRLHDELEEAKDKARRRSIGNIKFIGELFKLKMLTEAIMHDCVVKLLKNHDEESLECLCRLLTTIGKDLDFEKAKPRMDQYFNQMEKIVKERKTSSRIRFMLQDVIDLRLCNWVSRRADQGPKTIEQIHKEAKIEEQEEQRKVQQLMTKEKRRPGVQRVDEGGWNTVQGAKNSRVLDPSKFLKITKPTIDEKIQLVPKAQLGSWGKGSSGGAKASETDALRSSASSLNRFSALQPPAPSGSTPSTPVEFDSRRTLTSRGSMGREKNDKPLPSATARPNTFMRGGSSKDLLDNQSQEEQRREMLETVKQLTGGVDVERNSTEAERNKTRESAKPEISAMSAHDKAALSEEELEARGSSKSIIDEFLHINDFKEAMQCVEELNAQGLLHVFVRVGVESTLERSQITRDHMGQLLYQLVQSEKLSKQDFFKGFSETLELADDMAIDIPHIWLYLAELVTPMLKEGGISMRELTIEFSKPLLPVGRAGVLLSEILHLLCKQMSHKKVGALWREADLSWKDFLPEGEDVHNFLLEQKLDFIESDSPCSSEALSKKELSAEELYKRLEKLIIEDKANDEQIFDWVEANLDEIQMSSPTFLRALMTAVCKAAIIADSSTFRVDTAVIKQRVPILLKYLDSDTEKELQALYALQASIVKLDQPANLLRMFFDCLYDEEVISEDAFYKWESSKDPAEQNGKGVALKSVTAFFTWLREAEEESEDN

SEQ ID NO: 7077 - protein, 1585 aa, Homo sapiens; identical to SEQ ID NO: 4948

SEQ ID NO: 7078 - protein, 1028 aa, Homo sapiens
MASEAVKVVVRCRPMNQRERELRCQPVVTVDCARAQCCIQNPGAADEPPKQFTFDGAYHVDHVTEQIYNEIAYPLVEGVTEGYNGTIFAYGQTGSGKSFTMQGLPDPPSQRGIIPRAFEHVFESVQCAENTKFLVRASYLEIYNEDVRDLLGADTKQKLELKEHPEKGVYVKGLSMHTVHSVAQCEHIMETGWKNRSVGYTLMNKDSSRSHSIFTISIEMSAVDERGKDHLRAGKLNLVDLAGSERQSKTGATGERLKEATKINLSLSALGNVISALVDGRCKHVPYRDSKLTRLLQDSLGGNTKTLMVACLSPADNNYDETLSTLRYANRAKNIRNKPRINEDPKDALLREYQEEIKKLKAILTQQMSPSSLSALLSRQVPPDPVQVEEKLLPQPVIQHDVEAEKQLIREEYEERLARLKADYKAEQESRARLEEDITAMRNSYDVRLSTLEENLRKETEAVLQVGVLYKAEVMSRAEFASSAEYPPAFQYETVVKPKVFSTTDTLPSDDVSKTQVSSRFAELPKVEPSKSEISLGSSESSSLEETSVSEAFPGPEEPSNVEVSMPTEESRSRYFLDECLGQEAAGHLLGEQNYLPQEEPQEVPLQGLLGLQDPFAEVEAKLARLSSTVARTDAPQADVPKVPVQVPAPTDLLEPSDARPEAEAADDFPPRPEVDLASEVALEVVRTAEPGVWLEAQAPVALVAQPEPLPATAGVKRESVGMEVAVLTDDPLPVVDQQQVLARLQLLEQQVVGGEQAKNKDLKEKHKRRKRYADERRKQLVAALQNSDEDSGDWVLLNVYDSIQEEVRAKSKLLEKMQRKLRAAEVEIKDLQSEFQLEKIDYLATIRRQERDSMLLQQLLEQVQPLIRRDCNYSNLEKILRESCWDEDNGFWKIPHPVITKTSLPVVSTGPQNKPARKTSAADNGEPNMEDDRYRLMLSRSNSENIASNYFRSKRASQILSTDARKSLTHHNSPPGLSCPLSNNSAIPPTQAPEMPQPRPFRLESLDIPFTKAKRKKSKSNFGSEPL

SEQ ID NO: 7079 - protein, 306 aa, Homo sapiens
MRQHDTRNGRIVLISGRRSFCSIFSVLPYRDSTQVGDLKLDGGRQSTGAVSLKEIIGLEGVELGADGKTVSYTQFLLPTNAFGARRNTIDSTSSFSQFRNLSHRSLSIGRASGTQGSLDTGSDLGDFMDYDPNLLDDPQWPCGKHKRVLIFPSYMTTVIDYVKPSDLKKDMNETFKEKFPHIKLTLSKIRSLKREMRKLAQEDCGLEEPTVAMAFVYFEKLALKGKLNKQNRKLCAGACVLLAAKIGSDLKKHEVKHLIDKLEEKFRLNRRELIAFEFPVLVALEFALHLPEHEVMPHYRRLVQSS

SEQ ID NO: 7080 - protein, 939 aa, Homo sapiens
MAAQPPRGIRLSALCPKFLHTNSTSHTWPFSAVAELIDNAYDPDVNAKQIWIDKTVINDHICLTFTDNGNGMTSDKLHKMLSFGFSDKVTMNGHVPVGLYGNGFKSGSMRLGKDAIVFTKNGESMSVGLLSQTYLEVIKAEHVVVPIVAFNKHRQMINLAESKASLAAILEHSLFSTEQKLLAELDAIIGKKGTRIIIWNLRSYKNATEFDFEKDKYDIRIPEDLDEITGKKGYKKQERMDQIAPESDYSLRAYCSILYLKPRMQIILRGQKVKTQLVSKSLAYIERDVYRPKFLSKTVRITFGFNCRNKDHYGIMMYHRNRLIKAYEKVGCQLRANNMGVGVVGIIECNFLKPTHNKQDFDYTNEYRLTITALGEKLNDYWNEMKVKKNTEYPLNLPVEDIQKRPDQTWVQCDACLKWRKLPDGMDQLPEKWYCSNNPDPQFRNCEVPEEPEDEDLVHPTYEKTYKKTNKEKFRIRQPEMIPRINAELLFRPTALSTPSFSSPKESVPRRHLSEGTNSYATRLLNNHQVPPQSEPESNSLKRRLSTRSSILNAKNRRLSSQFENSVYKGDDDDEDVIILEENSTPKPAVDHDIDMKSEQSHVEQGGVQVEFVGDSEPCGQTGSTSTSSSRCDQGNTAATQTEVPSLVVKKEETVEDEIDVRNDAVILPSCVEAEAKIHETQETTDKSADDAGCQLQELRNQLLLVTEEKENYKRQCHMFTDQIKVLQQRILEMNDKYVKKETCHQSTETDAVFLLESINGKSESPDHMVSQYQQALEEIERLKKQCSALQHVKAECSQCSNNESKSEMDEMAVQLDDVFRQLDKCSIERDQYKSEVELLEMEKSQIRSQCEELKTEVEQLKSTNQQTATDVSTSSNIEESVNHMDGESLKLRSLRVNVGQLLAMIVPDLDLQQVNYDVDVVDEILGQVVEQMSEISST

SEQ ID NO: 7081 - protein, 382 aa, Homo sapiens; identical to SEQ ID NO: 6681

SEQ ID NO: 7082 - protein, 1685 aa, Homo sapiens
MSLPFYQRCHQHYDLSYRNKDVRSTVSHYQREKKRSAVYTQGSTAYSSRSSAAHRRESEAFRRASASSSQQQASQHALSSEVSRKAASAYDYGSSHGLTDSSLLLDDYSSKLSPKPKRAKHSLLSGEEKENLPSDYMVPIFSGRQKHVSGITDTEEERIKEAAAYIAQRNLLASEEGITTSKQSTASKQTTASKQSTASKQSTASKQSTASRQSTASRQSVVSKQATSALQQEETSEKKSRKVVIREKAERLSLRKTLEETETYHAKLNEDHLLHAPEFIIKPRSHTVWEKENVKLHCSIAGWPEPRVTWYKNQVPINVHANPGKYIIESRYGMHTLEINGCDFEDTAQYRASAMNVKGELSAYASVVVKRYKGEFDETRFHAGASTMPLSFGVTPYGYASRFEIHFDDKFDVSFGREGETMSLGCRVVITPEIKHFQPEIQWYRNGVPLSPSKWVQTLWSGERATLTFSHLNKEDEGLYTIRVRMGEYYEQYSAYVFVRDADAEIEGAPAAPLDVKCLEANKDYIIISWKQPAVDGGSPILGYFIDKCEVGTDSWSQCNDTPVKFARFPVTGLIEGRSYIFRVRAVNKMGIGFPSRVSEPVAALDPAEKARLKSRPSAPWTGQIIVTEEEPSEGIVPGPPTDLSVTEATRSYVVLSWKPPGQRGHEGIMYFVEKCEAGTENWQRVNTELPVKSPRFALFDLAEGKSYCFRVRCSNSAGVGEPSEATEVTVVGDKLDIPKAPGKIIPSRNTDTSVVVSWEESKDAKELVGYYIEASVAGSGKWEPCNNNPVKGSRFTCHGLVTGQSYIFRVRAVNAAGLSEYSQDSEAIEVKAAIGGGVSPDVCPALSDEPGGLTASRGRVHEASPPTFQKDALLGSKPNKPSLPSSSQNLGQTEVSKVSETVQEELTPPPQKAAPQGKSKSDPLKKKTDRAPPSPPCDITCLESFRDSMVLGWKQPDKIGGAEITGYYVNYREVIDGVPGKWREANVKAVSEEAYKISNLKENMVYQFQVAAMNMAGLGAPSAVSECFKCEEWTIAVPGPPHSLKCSEVRKDSLVLQWKPPVHSGRTPVTGYFVDLKEAKAKEDQWRGLNEAAIKNVYLKVRGLKEGVSYVFRVRAINQAGVGKPSDLAGPVVAETRPGTKEVVVNVDDDGVISLNFECDKMTPKSEFSWSKDYVSTEDSPRLEVESKGNKTKMTFKDLGMDDLGIYSCDVTDTDGIASSYLIDEEELKRLLALSHEHKFPTVPVKSELAVEILEKGQVRFWMQAEKLSGNAKVNYIFNEKEIFEGPKYKMHIDRNTGIIEMFMEKLQDEDEGTYTFQLQDGKATNHSTVVLVGDVFKKLQKEAEFQRQEWIRKQGPHFVEYLSWEVTGECNVLLKCKVANIKKETHIVWYKDEREISVDEKHDFKDGICTLLITEFSKKDAGIYEVILKDDRGKDKSRLKLVDEAFKELMMEVCKKIALSATDLKIQSTAEGIQLYSFVTYYVEDLKVNWSHNGSAIRYSDRVKTGVTGEQIWLQINEPTPNDKGKYVMELFDGKTGHQKTVDLSGQAYDEAYAEFQRLKKSLLFQKDRARVLGGLPDVVTIQEGKALNLTCNVWGDPPPEVSWLKNEKALASDDHCNLKFEAGRTAYFTINGVSTADSGKYGLVVKNKYGSETSDFTVSVFIPEEEARMAALESLKGGKKAK

SEQ ID NO: 7083 - protein, 1151 aa, Homo sapiens [sequence omitted]

SEQ ID NO: 7084 - protein, 139 aa, Homo sapiens
MGGGERYNIPAPQSRNVSKNQQQLNRQKTKEQNSQMKIVHKKKERGHGYNSSAAAWQAMQNGGKNKNFPNNQSWNSSLSGPRLLFKSQANQNYAGAKFSEPPSPSVLPKPPSHWVPVSFNPSDKEIMTFQLKTLLKVQV

SEQ ID NO: 7085 - protein, 327 aa, Homo sapiens
MKEMLAKDLEESQGGKSSEVLSATELRVQLAQKEQELARAKEALQAMKADRKRLKGEKTDLVSQMQQLYATLESREEQLRDFIRNYEQHRKESEDAVKALAKEKDLLEREKWELRRQAKEATDHATALRSQLDLKDNRMKELEAELAMAKQSLATLTKDVPKRHSLAMPGETVLNGNQEWVVQADLPLTAAIRQSQQTLYHSHPPHPADRQAVRVSPCHSRQPSVISDASAAEGDRSSTPSDINSPRHRTHSLCNGDSPGPVQKNLHNPIVQSLEDLEDQKRKKKKEKMGFGSISRVFARGKQRKSLDPGLFDGTAPDYYIEEDADW

SEQ ID NO: 7086 - protein, 327 aa, Homo sapiens; identical to SEQ ID NO: 7085

SEQ ID NO: 7087 - protein, 202 aa, Homo sapiens
MDEQALLGLNPNADSDFRQRALAYFEQLKISPDAWQVCAEALAQRTYSDDHVKFFCFQVLEHQVKYKYSELTTVQQQLIRETLISWLQAQMLNPQPEKTFIRNKAAQVFALLFVTEYLTKWPKFFFDILSVVDLNPRGVDLYLRILMAIDSELVDRDVVHTSEEARRNTLIKDTMREQCIPNLVESWYQILQNYQFTNSEVT

SEQ ID NO: 7088 - protein, 600 aa, Homo sapiens
MSRVAKYRRQVSEDPDIDSLLETLSPEEMEELEKELDVVDPDGSVPVGLRQRNQTEKQSTGVYNREAMLNFCEKETKKLMQREMSMDESKQVETKTDAKNGEERGRDASKKALGPRRDSDLGKEPKRGGLKKSFSRDRDEAGGKSGEKPKEEKIIRGIDKGRVRAAVDKKEAGKDGRGEERAVATKKEEEKKGSDRNTGLSRDKDKKREEMKEVAKKEDDEKVKGERRNTDTRKEGEKMKRAGGNTDMKKEDEKVKRGTGNTDTKKDDEKVKKNEPLHEKEAKDDSKTKTPEKQTPSGPTKPSEGPAKVEEEAAPSIFDEPLERVKNNDPEMTEVNVNNSDCITNEILVRFTEALEFNTVVKLFALANTRADDHVAFAIAIMLKANKTITSLNLDSNHITGKGILAIFRALLQNNTLTELRFHNQRHICGGKTEMEIAKLLKENTTLLKLGYHFELAGPRMTVTNLLSRNMDKQRQKRLQEQRQAQEAKGEKKDLLEVPKAGAVAKGSPKPSPQPSPKPSPKNSPKKGGAPAAPPPPPPPLAPPLIMENLKNSLSPATQRKMGDKVLPAQEKNSRDQLLAAIRSSNLKQLKKLELPLLLQ

SEQ ID NO: 7089 - protein, 66 aa, Homo sapiens
MIGTTEVPCCGPSATWALRWSDQITLPSLPWTMSSLWCIPLKGMLATCPVSLLEHAYSNALRGWKP

SEQ ID NO: 7090 - protein, 706 aa, Homo sapiens
MATANFGKIQIGIYVEIKRSDGRIHQAMVTSLNEDNESVTVEWIENGDTKGKEIDLESIFSLNPDLVPDEEIEPSPETPPPPASSAKVNKIVKNRRTVASIKNDPPSRDNRVVGSARARPSQFPEQSSSAQQNGSVSDISPVQAAKKEFGPPSRRKSNCVKEVEKLQEKREKRRLQQQELREKRAQDVDATNPNYEIMCMIRDFRGSLDYRPLTTADPIDEHRICVCVRKRPLNKKETQMKDLDVITIPSKDVVMVHEPKQKVDLTRYLENQTFRFDYAFDDSAPNEMVYRFTARPLVETIFERGMATCFAYGQTGSGKTHTMGGDFSGKNQDCSKGIYALAARDVFLMLKKPNYKKLELQVYATFFEIYSGKVFDLLNRKTKLRVLEDGKQQVQVVGLQEREVKCVEDVLKLIDIGNSCRTSGQTSANAHSSRSHAVFQIILRRKGKLHGKFSLIDLAGNERGADTSSADRQTRLEGAEINKSLLALKECIRALGRNKPHTPFRASKLTQVLRDSFIGENSRTCMIATISPGMASCENTLNTLRYANRVKELTVDPTAAGDVRPIMHHPPNQIDDLETQWGVGSSPQRDDLKLLCEQNEEEVSPQLFTFHEAVSQMVEMEEQVVEDHRAVFQESIRWLEDEKALLEMTEEVDYDVDSYATQLEAILEQKIDILTELRDKVKSFRAALQEEEQASKQINPKRPRAL

SEQ ID NO: 7091 - protein, 426 aa, Homo sapiens; identical to SEQ ID NO: 5381

SEQ ID NO: 7092 - protein, 331 aa, Homo sapiens
MLRCGQMIFAQALVCRHLGRDWRWTQRKRQPDSYFSVLNAFIDRKDSYYSIHQIAQMGVGEGKSIGQWYGPNTVAQVLKKLAVFDTWSSLAVHIAMDNTVVMEEIRRLCRTSVPCAGATAFPADSDRHCNGFPAGAEVTNRPSPWRPLVLLIPLRLGLTDINEAYVETLKHCFMMPQSLGVIGGKPNSAHYFIGYVGEELIYLDPHTTQPAVEPTDGCFIPDESFHCQHPPCRMSIAELDPSIAVGFFCKTEDDFNDWCQQVKKLSLLGGALPMFELVELQPSHLACPDVLNLSLGESCQVQVGSLGDSSDVERLERFFDSEDEDFEILSL

SEQ ID NO: 7093 - protein, 486 aa, Homo sapiens; identical to SEQ ID NO: 4931

SEQ ID NO: 7094 - protein, 1024 aa, Homo sapiens; identical to SEQ ID NO: 6026

SEQ ID NO: 7095 - protein, 112 aa, Homo sapiens
MDDKASVGKISVSSDSVSTLNSEDFVLVSRQGDETPSTNNGSDDEKTGLKIVGNGSEQQLQKELADVLMDPPMDDQPGEKELVKRSQLDGEGDGPLSNQLSASSTINPVPLV

SEQ ID NO: 7096 - protein, 146 aa, Homo sapiens
MLKEDCASELKVHLAKSLPLPSSVNRPRIDLIVFVVNLHSKYSLQNTEESLRHVDASFFLGKVCFLATGAGRESHCSIHRHTVVKLAHTYQSPLLYCDLEVEGFRATMAQRLVRVLQICAGHVPGVSALNLLSLLRSSEGPSLEDL

SEQ ID NO: 7097 - protein, 400 aa, Homo sapiens
MASDTQAVPDVSGRSRARRYAEWSSGLRSGRAGGGETSVERRRTCAFDTLEAFLIMDGEDIPDFSSLKEETAYWKELSLKYKQSFQEARDELVEFQEGSRELEAELEAQLVQAEQRNRDLQADNQRLKYEVEALKEKLEHQYAQSYKQVSVLEDDLSQTRAIKEQLHKYVRELEQANDDLERAKRATIVSLEDFEQRLNQAIERNAFLESELDEKESLLVSVQRLKDEARDLRQELAVRERQQEVTRKSAPSSPTLDCEKMDSAVQASLSLPATPVGKGTENTFPSPKAIPNGFGTSPLTPSARISALNIVGDLLRKVGALESKLAACRNFAKDQASRKSYISGNVNCGVLNGNGTKFSRSGHTSFFDKGAVNGFDPAPPPPGLGSSRPSSAPGMLPLSV

SEQ ID NO: 7098 - protein, 232 aa, Homo sapiens
MTPPQQPPPLRSEPGTLGSAASSYSPLGLNGVPGSIWDFVSGSFSPSPSPILSAGPPSSSSASPNGAELARVRRQLDEAKRKIRQWEESWQQVKQVCDAWQREAQEAKERARVADSDRQLALQKKEEVEAQVKQLQEELEGLGVASTLPGLRGCGDIGTIPLPKLHSLQSQLRLDLEAVDGVIFQLRAKQCVACRERAHGAVLRPCQHHILCEPCAATAPECPYCKGQPLQW

SEQ ID NO: 7099 - protein, 498 aa, Homo sapiens
MLPWPPALAMPMPTEGTPPPLSGTPIPVPAYFRHAEPGFSLKRPRGLSRSLPPPPPAKGSIPISRLFPAAPGWHQLQPRRVSFRGEASETLQSPGYDPSRPESFFQQSFQRLSRLGHGSYGEVFKVRSKEDGRLYAVKRSMSPFRGPKDRARKLAEVGSHEKVGQHPCCVRLEQAWEEGGILYLQTELCGPSLQQHCEAWGASLPEAQVWGYLRDTLLALAHLHSQGLVHLDVKPANIFLGPRGRCKLGDFGLLVELGTAGAGEVQEGDPRYMAPELLQGSYGTAADVFSLGLTILEVACNMELPHGGEGWQQLRQGYLPPEFTAGLSSELRSVLVMMLEPDPKLRATAEALLALPVLRQPRAWGVLWCMAAEALSRGWALWQALLALLCWLWHGLAHPASWLQPLGPPATPPGSPPCSLLLDSSLSSNWDDDSLGPSLSPEAVLARTVGSTSTPRSRCTPRDALDLSDINSEPPRGSFPSFEPRNLLSLFEDTLDPT

SEQ ID NO: 7100 - protein, 1050 aa, Homo sapiens; identical to SEQ ID NO: 4953

SEQ ID NO: 7101 - protein, 120 aa, Homo sapiens
MSIGVPIKVLHEAEGHIVTCETNTGEVYRGKLIEAEDNMNCQMSNITVTYRDGRVAQLEQVYIRGSKIRFLILPDMLKNAPMLKSMKNKNQGSGAGRGKAAILKAQGYLSSLEWVLVHIC

SEQ ID NO: 7102 - protein, 393 aa, Homo sapiens; identical to SEQ ID NO: 6238

SEQ ID NO: 7103 - protein, 75 aa, Homo sapiens
MSPQKRVKNVQAQNRTSQGSSSFQTTLSAWKVKQDPSNSKNISKHGQNNPVGDYEHADDQAEEDALQMAVGYFEK

SEQ ID NO: 7104 - protein, 331 aa, Homo sapiens
MAFVTRQFMRSVSSSSTASASAKKIIVKHVTVIGGGLMGAGIAQVAAATGHTVVLVDQTEDILAKSKKGIEESLRKVAKKKFAENLKAGDEFVEKTLSTIATSTDAASVVHSTDLVVEAIVENLKVKNELFKRLDKFAAEHTIFASNTSSLQITSIANATTRQDRFAGLHFFNPVPVMKLVEVIKTPMTSQKTFESLVDFSKALGKHPVSCKDTPGFIVNRLLVPYLMEAIRLYERDFQTCGDSNSGLGFSLKGDASKEDIDTAMKLGAGYPMGPFELLDYVGLDTTKFIVDGWHEMDAENPLHQPSPSLNKLVAENKFGKKTGEGFYKYK

SEQ ID NO: 7105 - protein, 426 aa, Homo sapiens; identical to SEQ ID NO: 5381

SEQ ID NO: 7106 - protein, 429 aa, Homo sapiens
MPNVLLPPKESNLFKRILKCYEQKQYKNGLKFCKMILSNPKFAEHGETLAMKGLTLNCLGKKEEAYEFVRKGLRNDVKSHVCWHVYGLLQRSDKKYDEAIKCYRNALKLDKDNLQILRDLSLLQIQMRDLEGYRETRYQLLQLRPTQRASWIGYAIAYHLLKDYDMALKLLEEFRQTQQVPPNKIDYEYSELILYQNQVMREADLLQESLEHIEMYEKQICDKLLVEEIKGEILLKLGRLKEASEVFKNLIDRNAENWCYYEGLEKALQISTLEERLQIYEEISKQHPKAITPRRLPLTLVPGERFRELMDKFLRVNFSKGCPPLFTTLKSLYYNTEKVSIIQELVTNYEASLKTCDFFSPYENGEKEPPTTLLWVQYFLAQHFDKLGQYSLALDYINAAIASTPTLIELFYMKAKIYKVKSESCFLSS

SEQ ID NO: 7107 - protein, 119 aa, Homo sapiens
MDKNIGEQLNKAYEAFRQACMDRDSAVKELQQKTENYEQRIREQQEQLSLQQTIIDKLKSQLLLVNSTQDNNYGCVPLLEDSETRKNNLTLDQPQDKVISGIAREKLPKVDIASAESSI

SEQ ID NO: 7108 - protein, 232 aa, Homo sapiens; identical to SEQ ID NO: 7098

SEQ ID NO: 7109 - protein, 486 aa, Homo sapiens; identical to SEQ ID NO: 4931

SEQ ID NO: 7110 - protein, 1024 aa, Homo sapiens; identical to SEQ ID NO: 6026

SEQ ID NO: 7111 - protein, 588 aa, Homo sapiens; identical to SEQ ID NO: 5480

SEQ ID NO: 7112 - protein, 221 aa, Homo sapiens
MLKNKGHSSKKDNLAVNAVALQDHILHDLQLRNLSVADHSKTQVQKKENKSLKRDTKAIIDTGLKKTTQCPKLEDSEKEYVLDPKPPPLTLAQKLGLIGPPPPPLSSDEWEKVKQRSLLQGDSVQPCPICKEEFELRPQVLLSCSHVFHKACLQAFEKFTNKKTCPLCRKNQYQTRVIHDGARLFRIKCVTRIQAYWRGCVVRKWYRNLRKTVPPTDAKLR

SEQ ID NO: 7113 - protein, 299 aa, Homo sapiens; identical to SEQ ID NO: 5075

SEQ ID NO: 7114 - protein, 730 aa, Homo sapiens
MEDLFETFQDEMGFSNMEDDGPEEEERVAEPQANFNTPQALRFEELLANLLNEQHQIAKELFEQLKMKKPSAKQQKEVEKVKPQCKEVHQTLILDPAQRKRLQQQMQQHVQLLTQIHLLATCNPNLNPEASSTRICLKELGTFAQSSIALHHQYNPKFQTLFQPCNLMGAMQLIEDFSTHVSIDCSPHKTVKKTANEFPCLPKQVAWILATSKVFMYPELLPVCSLKAKNPQDKILFTKAEDNKYLLTCKTARQLTVRIKNLNMNRAPDNIIKFYKKTKQLPVLGKCCEEIQPHQWKPPIEREEHRLPFWLKASLPSIQEELRHMADGAREVGNMTGTTEINSDQGLEKDNSELGSETRYPLLLPKGVVLKLKPVADRFPKKAWRQKRSSVLKPLLIQPSPSLQPSFNPGKTPAQSTHSEAPPSKMVLRIPHPIQPATVLQTVPGVPPLGVSGGESFESPAALPAMPPEARTSFPLSESQTLLSSAPVPKVMMPSPASSMFRKPYVRRRPSKRRGARAFRCIKPAPVIHPASVIFTVPATTVKIVSLGGGCNMIQPVNAAVAQSPQTIPIATLLVNPTSFPCPLNQPLVASSVSPLIVSGNSVNLPIPSTPEDKAHMNVDIACAVADGENAFQGLEPKLEPQELSPLSATVFPKVEHSPGPPPVDKQCQEGLSENSAYRWTVVKTEEGRQALEPLPQGIQESLNNSSPGDLEEVVKMEPEDATEEISGFL

SEQ ID NO: 7115 - protein, 520 aa, Homo sapiens
MFVSDFRKEFYEVVQSQRVLLFVASDVDALCACKILQALFQCDHVQYTLVPVSGWQELETAFLEHKEQIKLLIKQDDDLEVPAYEDIFRDEEEDEEHSGNDSDGSEPSEKRTRLEEEIVEQTMRRRQRREWEARRRDILFDYEQYEYHGTSSAMVMFELAWMLSKDLNDMLWWAIVGLTDQWVQDKITQMKYVTDVGVLQRHVSRHNHRNEDEENTLSVDCTRISFEYDLRLVLYQHWSLHDSLCNTSYTAARFKLWSVHGQKRLQEFLADMGLPLKQVKQKFQAMDISLKENLREMIEESANKFGMKDMRVQTFSIHFGFKHKFLASDVVFATMSLMESPEKDGSGTDHFIQALDSLSRSNLDKLYHGLELAKKQLRATQQTIASCLCTNLVISQGPFLYCSLMEGTPDVMLFSRPASLSLLSKHLLKSFVCSTKNRRCKLLPLVMAAPLSMEHGTVTVVGIPPETDSSDRKNFFGRAFEKAAESTSSRMLHNHFDLSVIELKAEDRSKFLDALISLLS

SEQ ID NO: 7116 - protein, 188 aa, Homo sapiens; identical to SEQ ID NO: 5612

SEQ ID NO: 7117 - protein, 393 aa, Homo sapiens
MDAATLTYDTLRFAEFEDFPETSEPVWILGRKYSIFTEKDEILSDVASRLWFTYRKNFPAIGGTGPTSDTGWGCMLRCGQMIFAQALVCRHLGRDWRWTQRKRQPDSYFSVLNAFIDRKDSYYSIHQIAQMGVGEGKSIGQWYGPNTVAQVLKKLAVFDTWSSLAVHIAMDNTVVMEEIRRLCRTSVPCAGATAFPADSDRHCNGFPAGAEVTNRPSPWRPLVLLIPLRLGLTDINEAYVETLKHCFMMPQSLGVIGGKPNSAHYFIGYVGEELIYLDPHTTQPAVEPTDGCFIPDESFHCQHPPCRMSIAELDPSIAVGFFCKTEDDFNDWCQQVKKLSLLGGALPMFELVELQPSHLACPDVLNLSLDSSDVERLERFFDSEDEDFEILSL

SEQ ID NO: 7118 - protein, 259 aa, Homo sapiens; identical to SEQ ID NO: 5295

SEQ ID NO: 7119 - protein, 283 aa, Homo sapiens
MIPPQEASARRREIEDKLKQEEETLSFIRDSLEKSDQLTKNMVSILSSFESRLMKLENSIIPVHKQTENLQRLQENVEKTLSCLDHVISYYHVASDTEKIIREGPTGRLEEYLGSMAKIQKAVEYFQDNSPDSPELNKVKLLFERGKEALESEFRSLMTRHSKVVSPVLILDLISGDDDLEAQEDVTLEHLPESVLQDVIRISRWLVEYGRNQDFMNVYYQIRSSQLDRSIKGLKEHFHKSSSSSGVPYSPAIPNKRKDTPTKKPVKRPGEPPSWPISATARG

SEQ ID NO: 7120 - protein, 706 aa, Homo sapiens
MNEAMATDSPRRPSRCTGGVVVRPQAVTEQSYMESVVTFLQDVVPQAYSGTPLTEEKEKIVWVRFENADLNDTSRNLEFHEIHSTGNEPPLLIMIGYSDGMQVWSIPISGEAQELFSVRHGPIRAARILPAPQFGAQKCDNFAEKRPLLGVCKSIGSSGTSPPYCCVDLYSLRTGEMVKSIQFKTPIYDLHCNKRILVVVLQEKIAAFDSCTFTKKFFVTSCYPCPGPNMNPIALGSRWLAYAENKLIRCHQSRGGACGDNIQSYTATVISAAKTLKSGLTMVGKVVTQLTGTLPSGVTEDDVAIHSNSRRSPLVPGIITVIDTETVGEGQVLVSEDSDSDGIVAHFPAHEKPVCCMAFNTSGMLLVTTDTLGHDFHVFQILTHPWSSSQCAVHHLYTLHRGETEAKVQDICFSHDCRWVVVSTLRGTSHVFPINPYGGQPCVRTHMSPRVVNRMSRFQKSAGLEEIEQELTSKQGGRCSPVPGLSSSPSGSPLHGKLNSQDSYNNFTNNNPGNPRLSPLPSLMVVMPLAQIKQPMTLGTITKRTGPYLFGAGCFSIKAPWSYIMTKYIFYIKPPNKVKPPPQISPSKSMGGEFCVAAIFGTSRSWFANNAGLKREKDQSKQVVVESLYIISCYGTLVEHMMEPRPLSTAPKISDDTPLEMMTSPRASWTLVRTPQWNELQPPFNANHPLLLAADAVQYYQFLLAG

SEQ ID NO: 7121 - protein, 604 aa, Homo sapiens
MGGCFSKPKPGAALPTVELKIEVVLPEKERGKEELSASGKGSPRAYQGNGTARHFHTEERLSTPHPYPSPQDCVEAAVCHVKDLENGQMREVELGWGKVLLVKDNGEFHALGHKCPHYGAPLVKGVLSRGRVRCPWHGACFNISTGDLEDFPGLDSLHKFQVKIEKEKVYVRASKQALQLQRRTKVMAKCISPSAGYSSSTNVLIVGAGAAGLVCAETLRQEGFSDRIVLCTLDRHLPYDRPKLSKSLDTQPEQLALRPKEFFRAYGIEVLTEAQVVTVDVRTKKVVFKDGFKLEYSKLLLAPGSSPKTLSCKGKEVENVFTIRTPEDANRVVRLARGRNVVVVGAGFLGMEVAAYLTEKAHSVSVVELEETPFRRFLGERVGRALMKMFENNRVKFYMQTEVSELRGQEGKLKEVVLKSSKVVRADVCVVGIGAVPATGFLRQSGIGLDSRGFIPVNKMMQTNVPGVFAAGDAVTFPLAWRNNRKVNIPHWQMAHAQGRVAAQNMLAQEAEMSTVPYLWTAMFGKSLRYAGYGEGFDDVIIQGDLEELKFVAFYTKGDEVIAVASMNYDPIVSKVAEVLASGRAIRKREVETGDMSWLTGKGS

SEQ ID NO: 7122 - protein, 247 aa, Homo sapiens
MSTAAVPELKQISRVEAMRLGPGWSHSCHAMLYAANPGQLFGRIPMRFSVLMQMRFDGLLGFPGGFVDRRFWSLEDGLNRVLGLGLGCLRLTEADYLSSHLTEGPHRVVAHLYARQLTLEQLHAVEISAVHSRDHGLEVGPPPGPRPPPRGLALAPWKAPMGNTSPEGPLAGLGRVSLSPAMGWGEGSGAGRPGKEGRGWGPALGLPQGCVTSALLPAIANPGSGGVGSVGRKGWGRSGDCLGSWET

SEQ ID NO: 7123 - protein, 445 aa, Homo sapiens; identical to SEQ ID NO: 5097

SEQ ID NO: 7124 - protein, 444 aa, Homo sapiens
FRVPAAGRRCPLARGARRPPDSACGRFPPDPGSPPEEEDADLSEREESWLLAEREENQEAEFPGLRRAVQLNLSRPIEEQGPLDVIIHKLTDVILEADQNDSQSLELVHRFQEYIDAHPETIVLDPLPAIRTLLDRSKSYELIRKIEAYMEDDRICSPPFMELTSLCGDDTMRLLEKNGLTFPFICKTRVAHGTNSHEMAIVFNQEGLNAIQPPCVVQNFINHNAVLYKVFVVGESYTVVQRPSLKNFSAGTSDRESIFFNSHNVSKPESSSVLTELDKIEGVFERPSDEVIRELSRALRQALGVSLFGIDIIINNQTGQHAVIDINAFPGYEGVSEFFTDLLNHIATVLQGQSTAMAATGDVALLRHSKLLAEPAGGLVGERTCSASPGCCGSMMGQDAPWKAEADAGGTAKLPHQRLGCNAGVSPSFQQHCVASLATKASSQ

SEQ ID NO: 7125 - protein, 287 aa, Homo sapiens
MCGRRRRQRAALLSHWDPTLSSDWDGERTAPQCLLRIKRDIMSIYKEPPPGMFVVPDTVDMTKIHALITGPFDTPYEGGFFLFVFRCPPDYPIHPPRVKLMTTGNNTVRFNPNFYRNGKVCLSILGTWTGPAWSPAQSISSVLISIQSLMTENPYHNEPGFEQERHPGDSKNYNECIRHETIRVAVCDMMEGKCPCPEPLRGVMEKSFLEYYDFYEVACKDRLHLQGQTMQDPFGEKRGHFDYQSLLMRLGLIRQKVLERLHNENAEMDSDSSSSGTETDLHGSLRV

SEQ ID NO: 7126 - protein, 283 aa, Homo sapiens
PPCSLISDCCAGNQRDSVGVGPSEPGCYPCPGPNMNPIALGSRWLAYAENKLIRCHQSRGGACGDNIQSYTATVISAAKTLKSGLTMVGKVVTQLTGTLPSGVTEDDVAIHSNSRRSPLVPGIITVIDTETVGEGQVLVSEDSDSDGIVAHFPAHEKPVCCMAFNTSGMLLVTTDTLGHDFHVFQILTHPWSSSQCAVHHLYTLHRGETEAKVQDICFSHDCRWVVVSTLRGTSHVFPINPYGGQPCVRTHMSPRVVNRMSRFQKSAGLEEIEQELTSKQGGR

SEQ ID NO: 7127 - protein, 744 aa, Homo sapiens
MSAANPETPNSTISREASTQSSSAAASQGWVLPEGKIVPNTVFVGGIDARMDETEIGSCFGRYGSVKEVKIITNRTGVSKGYGFVSFVNDVDVQKIVGSQIHFHGKKLKLGPAIRKQKLCARHVQPRPLVVNPPPPPQFQNVWRNPNTETYLQPQITPNPVTQHVQSAANPETPNSTISREASTQSSSAAASQGWVLPEGKIVPNTVFVGGIDARMDETEIGSCFGRYGSVKEVKIITNRTGVSKGYGFVSFVNDVDVQKIVGSQIHFHGKKLKLGPAIRKQKLCARHVQPRPLVVNPPPPPQFQNVWRNPNTETYLQPQITPNPVTQHVQSAANPETPNSTISREASTQSSSAAASQGWVLPEGKIVPNTVFVGGIDARMDETEIGSCFGRYGSVKEVKIITNRTGVSKGYGFVSFVNDVDVQKIVGSQIHFHGKKLKLGPAIRKQKLCARHVQPRPLVVNPPPPPQFQNVWRNPNTETYLQPQITPNPVTQHVQAYSAYPHSPGQVITGCQLLVYNYQEYPTYPDSAFQVTTGYQLPVYNYQPFPAYPRSPFQVTAGYQLPVYNYQAFPAYPNSPFQVATGYQFPVYNYQPFPAYPSSPFQVTAGYQLPVYNYQAFPAYPNSPFQVATGYQFPVYNYQAFPAYPNSPVQVTTGYQLPVYNYQAFPAYPSSPFQVTTGYQLPVYNYQAFPAYPNSAVQVTTGYQFHVYNYQMPPQCPVGEQRRNLWTEAYKWWYLVCLIQRRD

SEQ ID NO: 7128 - protein, 362 aa, Homo sapiens; identical to SEQ ID NO: 5396

SEQ ID NO: 7129 - protein, 709 aa, Homo sapiens
MADAGIRRVVPSDLYPLVLGFLRDNQLSEVANKFAKATGATQQDANASSLLDIYSFWLKSAKVPERKLQANGPVAKKAKKKASSSDSEDSSEEEEEVQGPPAKKAAVPAKRVGLPPGKAAAKASESSSSEESSDDDDEEDQKKQPVQKGVKPQAKAAKAPPKKAKSSDSDSDSSSEDEPPKNQKPKITPVTVKAQTKAPPKPARAAPKIANGKAASSSSSSSSSSSSDDSEEEKAAATPKKVWTITSVRAETVPKKQVVAKAPVKAATTPTRKSSSSEDSSSDEEEEQKKPMKNKPGPYSSVPPPSAPPPKKSLGTQPPKKAVEKQQPVESSEDSSDESDSSSEEEKKPPTKAVVSKATTKPPPAKKAAESSSDSSDSDSSEDDEAPSKPAGTTKNSSNKPAVTTKSPAVKPAAAPKQPVGGGQKLLTRKADSSSSEEESSSSEEEKTKKMVATTKPKATAKAALSLPAKQAPQGSRDSSSDSDSSSSEEEEEKTSKSAVKKKPQKVAGGAAPSKPASAKKGKAESSNSSSSDDSSEEEEEKLKGKGSPRPQAPKANGTSALTAQNGKAAKNSEEEEEEKKKAAVVVSKSGSLKKRKQNEAAKEAETPQAKKIKLQTPNTFPKRKKGEKRASSPFRRVREEEIEVDSRVADNSFDAKRGAAGDWGERANQVLKFTKGKSFRHEKTKKKRGSYRGGSISVQVNSIKFDSE

SEQ ID NO: 7130 - protein, 185 aa, Homo sapiens; identical to SEQ ID NO: 6123

SEQ ID NO: 7131 - protein, 587 aa, Homo sapiens; identical to SEQ ID NO: 5895

SEQ ID NO: 7132 - protein, 365 aa, Homo sapiens
MKELWCVMDWAVPGLLGSGTYFKKQFSDPVEHGQRHTATKRELATGRKAMQRLAKKMSGWFLRRTKTLIKDQLPKKEDRMVYCSLTDFQKAVYQTVLETEDVTLILQSSEPCTCRSGQKRRNCCYKTNSHGETVKTLYLSYLTVLQKVANHVALLQAASTSKQQETLIKRICDQVFSRFPDFVQKSKDAAFETLSDPKYSGKMKVLQQLLNHCRKNRDKVLLFSFSTKLLDVLQQYCMASGLDYRRLDGSTKSEERLKIVKEFNSTQDVNICLVSTMAGGLGLNFVGANVVVLFDPTWNPANDLQAIDRTQTHCRRERDAEPLSSAPGLQNGSENAVPYPWWCCVTGASISCWRCEICRIQDVLE

SEQ ID NO: 7133 - protein, 367 aa, Homo sapiens
MEKKKMVTQGNQEPTTTPDAMVQPFTTIPFPPPPQNGIPTEYGVPHTQDYAGQTGEHNLTLYGSTQAHGEQSSNSPSTQNGSLTQTEGGAQTDGQQSQTQSSENSESKSTPKRLHVSNIPFRFRDPDLRQMFGQFGKILDVEIIFNERGSKGFGFVTFENSADADRAREKLHGTVVEGRKIEVNNATARVMTNKKMVTPYANGWKLSPVVGAVYGPELYAASSFQADVSLGNDAAVPLSGRGGINTYIPLIIPGFPYPTAATTAAAFRGAHLRGRGRTVYGAVRAVPPTAIPAYPGVDMQPTDMHSLLLQPQPPLLQPLQPLTVTVMAGCTQPTPTMPLPLPLAMELALWRVYTEVATADLPPTEVT

SEQ ID NO: 7134 - protein, 587 aa, Homo sapiens; identical to SEQ ID NO: 5895

SEQ ID NO: 7135 - protein, 380 aa, Homo sapiens
MDAATLTYDTLRFAEFEDFPETSEPVWILGRKYSIFTEKDEILSDVASRLWFTYRKNFPAIGGTGPTSDTGWGCMLRCGQMIFAQALVCRHLGRDWRWTQRKRQPDSYFSVLNAFIDRKDSYYSIHQIAQMGVGEGKSIGQWYGPNTVAQVLKKLAVFDTWSSLAVHIAMDNTVVMEEIRRLCRTSVPCAGATAFPADSDRHCNGFPAGAEVTNRPSPWRPLVLLIPLRLGLTDINEAYVETLKHCFMMPQSLGVIGGKPNSAHYFIGYVGEELIYLDPHTTQPAVEPTDGCFIPDESFHCQHPPCRMSIAELDPSIAVGFFCKTEDDFNDWCQQVKKLSLLGGALPMFELVELQPSHLACPDVLNLSLGESCQVQILLM

SEQ ID NO: 7136 - protein, 707 aa, Homo sapiens
MIPPQEASARRREIEDKLKQEEETLSFIRDSLEKSDQLTKNMVSILSSFESRLMKLENSIIPVHKQTENLQRLQENVEKTLSCLDHVISYYHVASDTEKIIREGPTGRLEEYLGSMAKIQKAVEYFQDNSPDSPELNKVKLLFERGKEALESEFRSLMTRHSKVVSPVLILDLISGDDDLEAQEDVTLEHLPESVLQDVIRISRWLVEYGRNQDFMNVYYQIRSSQLDRSIKGLKEHFHKSSSSSGVPYSPAIPNKRKDTPTKKPVKRPGTIRKAQNLLKQYSQHGLDGKKGGSNLIPLEGHEHDFRVKHLSEALNDKHGPLAGRDDMLDVETDAYIHCVSAFVKLAQSEYQLLADIIPEHHQKKTFDSLIQDALDGLMLEGENIVSAARKAIVRHDFSTVLTVFPILRHLKQTKPEFDQVLQGTAASTKNKLPGLITSMETIGAKALEDFADNIKNDPDKEYNMPKDGTVHELTSNAILFLQQLLDFQETAGAMLASQETSSSATSYSSEFSKRLLSTYICKVLGNLQLNLLSKSKVYEDPALSAIFLHNNYNYILKSLEKSELIQLVAVTQKTAERSYREHIEQQIQTYQRSWLKVTDYIAEKNLPVFQPGVKLRDKERQIIKERFKGFNDGLEELCKIQKAWAIPDTEQRDRIRQAQKTIVKETYGAFLQKFGSVPFTKNPEKYIKYGVEQVGDMIDRLFDTSA

SEQ ID NO: 7137 - protein, 341 aa, Homo sapiens; identical to SEQ ID NO: 5889

SEQ ID NO: 7138 - protein, 495 aa, Homo sapiens
MAGVGRSGGPWGRTRGGRSGRLGVSLGALSSLPLEELPRPLCCRRCRRHFGFALRGETIPVSVAGSASSQFAPLALHLSLLLSRISASRLTRWPPPDKREGSAVDPGKRRSLAATPSSSLPCTLIALGLRHEKEANELMEDLFETFQDEMGFSNMEDDGPEEEERVAEPQANFNTPQALRFEELLANLLNEQHQIAKELFEQLKMKKPSAKQQKEVEKVKPQCKEVHQTLILDPAQRKRLQQQMQQHVQLLTQIHLLATCNPNLNPEASSTRICLKELGTFAQSSIALHHQYNPKFQTLFQPCNLMGAMQLIEDFSTHVSIDCSPHKTVKKTANEFPCLPKQVAWILATSKVFMYPELLPVCSLKAKNPQDKILFTKAEDNLLALGLKHFEGTEFLNPLISKYLLTCKTARQLTVRIKNLNMNRAPDNIIKFYKKTKQLPVLGKCCEEIQPHQWKPPIEREEHRLPFWLKVQPSSSKSVGGRRSLKVLREYQGLP

SEQ ID NO: 7139 - protein, 59 aa, Homo sapiens
MAAPGALLVMGVSGSGNWDGNSMMLMIITRRKIEGRWEKAYRSMTRTGFHGSVTCMTFY

SEQ ID NO: 7140 - protein, 68 aa, Homo sapiens
MGETEGKKDEADYKRLQTFPLVRHSDMPEEMRVETMELCVTACEKFSNNNEVLPAVQAAPRAFDGPCG

SEQ ID NO: 7141 - protein, 816 aa, Homo sapiens; identical to SEQ ID NO: 6220

SEQ ID NO: 7142 - protein, 372 aa, Homo sapiens; identical to SEQ ID NO: 5421

SEQ ID NO: 7143 - protein, 159 aa, Homo sapiens
MIPPQEASARRREIEDKLKQEEETLSFIRDSLEKSDQLTKNMVSILSSFESRLMKLENSIIPVHKQTENLQRLQENVEKTLSCLDHVISYYHVASDTEKIIREGPTGRLEEYLGSMAKIQKAVEYFQDNSPDSPELNKVVRGPQNNVRSLGISVSALVS

SEQ ID NO: 7144 - protein, 80 aa, Homo sapiens
MASEELQKDLEEVKVLLEKATRKRVRDALTAEKSKIETEIKNKMQQKSQKKAELLDNEKPAAVVAPITTGYTDGISQISL

SEQ ID NO: 7145 - protein, 201 aa, Homo sapiens
MPSETLWEIAKAEVEKRGINGSEGDGAEIAEKFVFFIGSKNGGKTTIILRCLDRDEPPKPTLALEYTYGRRAKGHNTPKDIAHFWELGGGTSLLDLISIPITGDTLRTFSLVLVLDLSKPNDLWPTMENLLQATKSHVDKVIMKLGKTNAKAVSEMRQKIWNNMPKDHPVSCCLGLLLESLVPFIVNDNITNNFFRFLCMT

SEQ ID NO: 7146 - protein, 466 aa, Homo sapiens
MSYRPVVSPVMSLTRRCMRSRTSMRTDAVFLILYKELYYRHIYAKVSGGPSLEQRFESYYNYCNLFNYILNADGPAPLELPNQWLWDIIDEFIYQFQSFSQYRCKTAKKSEEEIDFLRSNPKIWNVHSVLNVLHSLVDKSNINRQLEVYTSGGDPESVAGEYGRHSLYKMLGYFSLVGLLRLHSLLGDYYQAIKVLENIELNKKSMYSRVPECQVTTYYYVGFAYLMMRRYQDAIRVFANILLYIQRTKSMFQRTTYKYEMINKQNEQMHALLAIALTMYPMRIDESIHLQLREKYGDKMLRMQKGDPQVYEELFSYSCPKFLSPVVPNYDNVHPNYHKEPFLQQLKVFSDEVQQQAQLSTIRSFLKLYTTMPVAKLAGFLDLTEQEFRIQLLVFKHKMKNLVWTSGISALDGEFQSASEVDFYIDKDMIHIADTKVARRYGDFFIRQIHKFEELNRTLKKMGQRP

SEQ ID NO: 7147 - protein, 198 aa, Homo sapiens
MSRAVTIAEAFCHILFRIISEILMRMLEEQCLFPLPEPQDLFQASQMKFEDFQKDLRKLKKDLKACEVEAGKVYQVSSKEHMQPFKENMEQFIIQAKIDQEAEENSLTETHKCFLETTAYFFMKPKLGEKEVSPNAFFSIWHEFSSDFKDFWKKENKLLLQERVKEAEEVCRQKKGKSLYKIKPRHDSGIKAKISMKT

SEQ ID NO: 7148 - protein, 146 aa, Homo sapiens
MEPTRDCPLFGGAFSAILPMGAIDVSDLRPVPDNQEVFCHPVTDQSLIVELLELQAHVRGEAAARYHFEDVGGVQGARAVHVESVQPLSLENLALRGRCQEAWVLSGKQQIAKENQQVAKDVTLHQALLRLPQYQTDLLLTFNQPP

SEQ ID NO: 7149 - protein, 527 aa, Homo sapiens
MSLCGARANAKMMAAYNGGTSAAAAGHHHHHHHHLPHLPPPHLHHHHHPQHHLHPGSAAAVHPVQQHTSSAAAAAAAAAAAAAMLNPGQQQPYFPSPAPGQAPGPAAAAPAQVQAAAAATVKAHHHQHSHHPQQQLDIEPDRPIGYGAFGVVWSVTDPRDGKRVALKKMPNVFQNLVSCKRVFRELKMLCFFKHDNVLSALDILQPPHIDYFEEIYVVTELMQSDLHKIIVSPQPLSSDHVKVFLYQILRGLKYLHSAGILHRDIKPGNLLVNSNCVLKICDFGLARVEELDESRHMTQEVVTQYYRAPEILMGSRHYSNAIDIWSVGCIFAELLGRRILFQAQSPIQQLDLITDLLGTPSLEAMRTACEGAKAHILRGPHKQPSLPVLYTLSSQATHEAVHLLCRMLVFDPSKRISAKDALAHPYLDEGRLRYHTCMCKCCFSTSTGRVYTSDFEPVTNPKFDDTFEKNLSSVRQVKEIIHQFILEQQKGNRVPLCINPQSAAFKSFISSTVAQPSEMPPSPLVWE

SEQ ID NO: 7150 - protein, 913 aa, Homo sapiens
MNEAMATDSPRRPSRCTGGVVVRPQAVTEQSYMESVVTFLQDVVPQAYSGTPLTEEKEKIVWVRFENADLNDTSRNLEFHEIHSTGNEPPLLIMIGYSDGMQVWSIPISGEAQELFSVRHGPIRAARILPAPQFGAQKCDNFAEKRPLLGVCKSIGSSGTSPPYCCVDLYSLRTGEMVKSIQFKTPIYDLHCNKRILVVVLQEKIAAFDSCTFTKKFFVTSCYPCPGPNMNPIALGSRWLAYAENKLIRCHQSRGGACGDNIQSYTATVISAAKTLKSGLTMVGKVVTQLTGTLPSGVTEDDVAIHSNSRRSPLVPGIITVIDTETVGEGQVLVSEDSDSDGIVAHFPAHEKPVCCMAFNTSGMLLVTTDTLGHDFHVFQILTHPWSSSQCAVHHLYTLHRGETEAKVQDICFSHDCRWVVVSTLRGTSHVFPINPYGGQPCVRTHMSPRVVNRMSRFQKSAGLEEIEQELTSKQGGRCSPVPGLSSSPSGSPLHGKLNSQDSYNNFTNNNPGNPRLSPLPSLMVVMPLAQIKQPMTLGTITKRTGKVKPPPQISPSKSMGGEFCVAAIFGTSRSWFANNAGLKREKDQSKQVVVESLYIISCYGTLVEHMMEPRPLSTAPKISDDTPLEMMTSPRASWTLVRTPQWNELQPPFNANHPLLLAADAVQYYQFLLAGLVPPGSPGPITRHGSYDSLASDHSGQEDEEWLSQVEIVTHTGPHRRLWMGPQFQFKTIHPSGQTTVISSSSSVLQSHGPSDTPQPLLDFDTDDLDLNSLRIQPVRSDPVSMPGSSRPVSDRRGVSTVIDAASGTFDRSVTLLEVCGSWPEGFGLRHMSSMEHTEEGLRERLADAMAESPSRDVVGSGTELQREGSIETLSNSSGSTSGSIPRNFDGYRSPLPTNESQPLSLFPTGFP

SEQ ID NO: 7151 - protein, 719 aa, Homo sapiens; identical to SEQ ID NO: 5328

SEQ ID NO: 7152 - protein, 107 aa, Homo sapiens
MSVLRPLDKLPGLNTATILLVGTEDALLQQLADSMLKEDCASELKVHLAKSLPLPSSVNRPRIDLIVFVVNLHSKYSLQNTEESLRHVDASFFLGKVCFLATGGGRL

SEQ ID NO: 7153 - protein, 532 aa, Homo sapiens
MFVLGIPLCPALSFSGGDDSQTQLFVSSKDVIKEIEDFDSLEALRLEGNTVGVEAARVIAKALEKKSELKRCHWSDMFTGRLRTEIPPALISLGEGLITAGAQLVELDLSDNAFGPDGVQGFEALLKSSACFTLQELKLNNCGMGIGGGKVIGTLEEVHMPQNGINHPGITALAQAFAVNPLLRVINLNDNTFTEKGAVAMAETLKTLRQVEVINFGDCLVRSKGAVAIADAIRGGLPKLKELNLSFCEIKRDAALAVAEAMADKAELEKLDLNGNTLGEEGCEQLQEVLEGFNMAKVLASLSDDEDEEEEEEGEEEEEEAEEEEEEDEEEEEEEEEEEEEEPQQRGQGEKSATPSRKILDPNTGEPAPVLSSPPPADVSTFLAFPSPEKLLRLGPKSSVLIAQQTDTSDPEKVVSAFLKVSSVFKDEATVRMAVQDAVDALMQKAFNSSSFNSNTFLTRLLVHMGLLKSEDKVKAIANLYGPLMALNHMVQQDYFPKALAPLLLAFVTKPNSALESCSFARHSLLQTLYKV

SEQ ID NO: 7154 - protein, 460 aa, Homo sapiens; identical to SEQ ID NO: 5990

SEQ ID NO: 7155 - protein, 188 aa, Homo sapiens; identical to SEQ ID NO: 5612

SEQ ID NO: 7156 - protein, 530 aa, Homo sapiens
MNKTNQVYAANEDHNSQFIDDYSSSDESLSVSHFSFSKQSHRAAIRDRTSFSSKLPSHNKKNSTFIPRKPMKCSNEKVVNQEQSYESMDKFLDGVQEVAYIHSNQNVIGSSKAENHMSRWAAHDVFELKQFSQLPANIAVCSSKTYKEKVDADTLPHTKKGQQPSEGSISLPLYISNPVNQKKKKVYHTNQTTFIIGETPKGIRRKQFEEMASYFNSSSVNEFAKHITNATSEERQKMLRDFYASQYPEVKEFFVDSVSQFNNSSFEKGEQRTRKKSDKRESLIKPRLSDSETLSFKDSTNKISQVCSLKTYKRKSVKFQNHISYREEVFFNDAETKKSPVSSTQEIDSGKNSQASEDTVTSRSLNSESETRERRLENTMKDQQDLTRTGISRKEPLLKLENKKIENPVLENTSVISLLGDTSILDDLFKSHGNSPTQLPKKVLSGPMEKAKQRPKDFWDILNEQNDESLSKLTDLAVIETLCEKAPLAAPFKRREEPATSLWKSNEKFLWKKFSPSDTDENATNTQSTT

SEQ ID NO: 7157 - protein, 362 aa, Homo sapiens
MTGHTRSSLPRCTGIVLLIKLRFSERLTGHLHAQGTPPYVINLDPAVHEVPFPANIDIRDTVKYKEVMKQYGLGPNGGIVTSLNLFATRFDQVMKFIEKAQNMSKYVLIDTPGQIEVFTWSASGTIITEALASSFPTVVIYVMDTSRSTNPVTFMSNMLYACSILYKTKLPFIVVMNKTDIIDHSFAVEWMQDFEAFQDALNQETTYVSNLTRSMSLVLDEFYSSLRVVGVSAVLGTGLDELFVQVTSAAEEYEREYRPEYERLKKSLANAESQQQREQLERLRKDMGSVALDAGTAKDSLSPVLHPSDLILTRGTLDEEDEEADSDTDDIDHRVTEESHEEPAFQNFMQESMAQYWKRNNK

SEQ ID NO: 7158 - protein, 445 aa, Homo sapiens; identical to SEQ ID NO: 5667

SEQ ID NO: 7159 - protein, 134 aa, Homo sapiens
MSENAAPGLISELLLQRGTTKVATGLVLNRDQRLAWAENSIDFISRELCAHSIRKLQAHVLLIKAVHGYFDSRQNYSEKESLSFMIDTMKSTLKEQFQFVEVPGNHCVHMSEPQHVASIISSFLQCTHMLPAQL

SEQ ID NO: 7160 - protein, 106 aa, Homo sapiens
MSSKGSSTDGRTDLANGSLSSSPEEMSGAEEGRETSSGIEVEASDLSLSLTGDDGGPNRTSTESRGTDTESSGEDKDSDSMEDTGHYSINDENRVHDRSEEEEEEE

SEQ ID NO: 7161 - protein, 329 aa, Homo sapiens; identical to SEQ ID NO: 5296

SEQ ID NO: 7162 - protein, 744 aa, Homo sapiens
MATANFGKIQIGIYVEIKRSDGRIHQAMVTSLNEDNESVTVEWIENGDTKGKEIDLESIFSLNPDLVPDEEIEPSPETPPPPASSAKVNKIVKNRRTVASIKNDPPSRDNRVVGSARARPSQFPEQSSSAQQNGSVSDISPVQAAKKEFGPPSRRKSNCVKEVEKLQEKREKRRLQQQELREKRAQDVDATNPNYEIMCMIRDFRGSLDYRPLTTADPIDEHRICVCVRKRPLNKKETQMKDLDVITIPSKDVVMVHEPKQKVDLTRYLENQTFRFDYAFDDSAPNEMVYRFTARPLVETIFERGMATCFAYGQTGSGKTHTMGGDFSGKNQDCSKGIYALAARDVFLMLKKPNYKKLELQVYATFFEIYSGKVFDLLNRKTKLRVLEDGKQQVQVVGLQEREVKCVEDVLKLIDIGNSCRTSGQTSANAHSSRSHAVFQIILRRKGKLHGKFSLIDLAGNERGADTSSADRQTRLEGAEINKSLLALKECIRALGRNKPHTPFRASKLTQVLRDSFIGENSRTCMIATISPGMASCENTLNTLRYANRVKEFGISPSDIPFSQGSGSRPDLSPSYEYDDFSPSVTRVKELTVDPTAAGDVRPIMHHPPNQIDDLETQWGVGSSPQRDDLKLLCEQNEEEVSPQLFTFHEAVSQMVEMEEQVVEDHRAVFQESIRWLEDEKALLEMTEEVDYDVDSYATQLEAILEQKIDILTELRDKVKSFRAALQEEEQASKQINPKRPRAL

SEQ ID NO: 7163 - protein, 566 aa, Homo sapiens; identical to SEQ ID NO: 4930

SEQ ID NO: 7164 - protein, 265 aa, Homo sapiens; identical to SEQ ID NO: 4884

SEQ ID NO: 7165 - protein, 935 aa, Homo sapiens
MNEAMATDSPRRPSRCTGGVVVRPQAVTEQSYMESVVTFLQDVVPQAYSGTPLTEEKEKIVWVRFENADLNDTSRNLEFHEIHSTGNEPPLLIMIGYSDGMQVWSIPISGEAQELFSVRHGPIRAARILPAPQFGAQKCDNFAEKRPLLGVCKSIGSSGTSPPYCCVDLYSLRTGEMVKSIQFKTPIYDLHCNKRILVVVLQEKIAAFDSCTFTKKFFVTSCYPCPGPNMNPIALGSRWLAYAENKLIRCHQSRGGACGDNIQSYTATVISAAKTLKSGLTMVGKVVTQLTGTLPSGVTEDDVAIHSNSRRSPLVPGIITVIDTETVGEGQVLVSEDSDSDGIVAHFPAHEKPVCCMAFNTSGMLLVTTDTLGHDFHVFQILTHPWSSSQCAVHHLYTLHRGETEAKVQDICFSHDCRWVVVSTLRGTSHVFPINPYGGQPCVRTHMSPRVVNRMSRFQKSAGLEEIEQELTSKQGGRCSPVPGLSSSPSGSPLHGKLNSQDSYNNFTNNNPGNPRLSPLPSLMVVMPLAQIKQPMTLGTITKRTGKVKPPPQISPSKSMGGEFCVAAIFGTSRSWFANNAGLKREKDQSKQVVVESLYIISCYGTLVEHMMEPRPLSTAPKISDDTPLEMMTSPRASWTLVRTPQWNELQPPFNANHPLLLAADAVQYYQFLLAGLVPPGSPGPITRHGSYDSLASDHSGQEDEEWLSQVEIVTHTGPHRRLWMGPQFQFKTIHPSGQTTVISSSSSVLQSHGPSDTPQPLLDFDTDDLDLNSLRIQPVRSDPVSMPGSSRPVSDRRGVSTVIDAASGTFDRSVTLLEVCGSWPEGFGLRHMSSMEHTEEGLRERLADAMAESPSRDVVGSGTDTALDVAVKTFPPERHVAVKCFELQREGSIETLSNSSGSTSGSIPRNFDGYRSPLPTNESQPLSLFPTGFP

SEQ ID NO: 7166 - protein, 204 aa, Homo sapiens
MEAAGSPAATETGKYIASTQRPDGTWRKQRRVKEGYVPQEEVPVYENKYVKFFKSKPELPPGLSPEATAPVTPSRPEGGEPGLSKTAKRNLKRKEKRRQQQEKGEAEALSRTLDKVSLEETAQLPSAPQGSRAAPTAASDQPDSAATTEKAKKIKNLKKKLRQVEELQQRIQAGEVSQPSKEQLEKLARRRALEEELEDLELGL

SEQ ID NO: 7167 - protein, 220 aa, Homo sapiens
MSSGNYQQSEALSKPTFSEEQASALVESVFGLKVSKVRPLPSYDDQNFHVYVSKTKDGPTEYVLKISNTKASKNPDLIEVQNHIIMFLKAAGFPTASVCHTKGDNTASLVSVDSGSEIKSYLVRLLTYLPGRPIAELPVSPQLLYEIGKLAAKLDKTLQRFHHPKLSSLHRENFIWNLKNVPLLEKYLYALGQNRNREIVEHVIHLFKEEVMTKLSHFRE

SEQ ID NO: 7168 - protein, 200 aa, Homo sapiens
MSSDSMDQPRNPCENEPLTPGYHGFPARDSQGNQEPTTTPDAMVQPFTTIPFPPPPQNGIPTEYGVPHTQDYAGQTGEHNLTLYGSTQAHGEQSSNSPSTQNGSLTQTEGGAQTDGQQSQTQSSENSESKSTPKRLHVSNIPFRFRDPDLRQMFGQFGKILDVEIIFNERGSKGFGFVTFENSADADRAREKLHGTVVEG

SEQ ID NO: 7169 - protein, 128 aa, Homo sapiens
MAPAKKGGEKKKGRSAINEVVTREYTINIHKRIHGVGFKKRAPRALKEIRKFAMKEMGTPDVRIDTRLNKAVWAKGIRNVPYRIRVRLSRKRNEDEDSPNKLYTLVTYVPVTTFKISVLNSVTVAKSP

SEQ ID NO: 7170 - protein, 130 aa, Homo sapiens
MAPAKKGGEKKKGRSAINEVVTREYTINIHKRIHGVGFKKRAPRALKEIRKFAMKEMGTPDVRIDTRLNKAVWAKGIRNVPYRIRVRLSRKRNEDEDSPNKLYTLVTYVPVTTFKSLQNDDLFKTDCHHQ

SEQ ID NO: 7171 - protein, 507 aa, Homo sapiens
MWLTSYPSPNFPVSVLQNGVKMTNEAPKGLRANIIRSYLMDPISDPEFFGSCKKPEEFKKLLYGLCFFHALVQERRKFGPLGWNIPYEFNETDLRISVQQLHMFLNQYEELPYEALRYMTGECNYGGRVTDDWDRRTLRSILNKFFNPELVENSDYKFDSSGIYFVPPSGDHKSYIEYTKTLPLTPAPEIFGMNANADITKDQSETQLLFDNILLTQSRSAGAGAKSSDEVVNEVASDILGKLPNNFDIEAAMRRYPTTYTQSMNTVLVQEMGRFNKLLKTIRDSCVNIQKAIKGLAVMSTDLEEVVSSILNVKIPEMWMGKSYPSLKPLGSYVNDFLARLKFLQQWYEVGPPPVFWLSGFFFTQAFLTGAQQNYARKYTIPIDLLGFDYEVMEDKEYKHPPEDGVFIHGLFLDGASWNRKIKKLAESHPKILYDTVPVMWLKPCKRADIPKRPSYVAPLYKTSERRGVLSTTGHSTNFVIAMTLPSDQPKEHWIGRGVALLCQLNS

SEQ ID NO: 7172 - protein, 560 aa, Homo sapiens
MAASAKRKQEEKHLKMLRDMTGLPHNRKCFDCDQRGPTYVNMTVGSFVCTSCSGSLRGLNPPHRVKSISMTTFTQQEIEFLQKHGNEVCKQIWLGLFDDRSSAIPDFRDPQKVKEFLQEKYEKKRWYVPPEQAKVVASVHASISGSSASSTSSTPEVKPLKSLLGDSAPTLHLNKGTPSQSPVVGRSQGQQQEKKQFDLLSDLGSDIFAAPAPQSTATANFANFAHFNSHAAQNSANADFANFDAFGQSSGSSNFGGFPTASHSPFQPQTTGGSAASVNANFAHFDNFPKSSSADFGTFNTSQSHQTASAVSKVSTNKAGLQTADKYAALANLDNIFSAGQGGDQGSGFGTTGKAPVGSVVSVPSQSSASSDKYAALAELDSVFSSAATSSNAYTSTSNASSNVFGTVPVVASAQTQPASSSVPAPFGATPSTNPFVAAAGPSVASSTNPFQTNARGATAATFGTASMSMPTGFGTPAPYSLPTSFSGSFQQPAFPAQAAFPQQTAFSQQPNGFAAFGQTKPVVTPFGQVAAAGVSSNPFMTGAPTGQFPTGSSSTNPFL

SEQ ID NO: 7173 - protein, 800 aa, Homo sapiens; identical to SEQ ID NO: 6467

SEQ ID NO: 7174 - protein, 47 aa, Homo sapiens
MDDQQALNSIMQDLAVLHKASRPALSLQETRKAKSSSPKKQNDVRVK

SEQ ID NO: 7175 - protein, 423 aa, Homo sapiens
MVSFMNNQKQQKPTLSGQRFKTRKRDEKERFDPTQFQDCIIQGLTETGTDLEAVAKFLDASGAKLDYRRYAETLFDILVAGGMLAPGGTLADDMMRTDVCVFAAQEDLETMQAFAQVFNKLIRRYKYLEKGFEDEVKKLLLFLKGFSESERNKLAMLTGVLLANGTLNASILNSLYNENLVKEGVSAAFAVKLFKSWINEKDINAVAASLRKVSMDNRLMELFPANKQSVEHFTKYFTEAGLKELSEYVRNQQTIGARKELQKELQEQMSRGDPFKDIILYVKEEMKKNNIPEPVVIGIVWSSVMSTVEWNKKEELVAEQAIKHLKQYSPLLAAFTTQGQSELTLLLKIQEYCYDNIHFMKAFQKIVVLFYKAEVLSEEPILKWYKDAHVAKGKSVFLEQMKKFVEWLKNAEEESESEAEEGD

SEQ ID NO: 7176 - protein, 372 aa, Homo sapiens; identical to SEQ ID NO: 4942

SEQ ID NO: 7177 - protein, 303 aa, Homo sapiens
MMDVSGVGFPSKVPWKKMSAEELENQYCPSRWVVRLGAEEALRTYSQIGIEATTRARATRKSLLHVPYGDGEGEKVDIYFPDESSEALPFFLFFHGGYWQSGSKDESAFMVHPLTAQGVAVVIVAYGIAPKGTLDHMVDQVTRSVAFVQKRYPSNKGIYLCGHSAGAHLAAMMLLADWTKHGVTPNLRGFFLVSGVFDLEPIVYTSQNVALQLTLEDAQRNSPQLKVAQAQPVDPTCRVLVVVGQFDSPEFHRQSWEFYQTLCQGEWKASFEELHDVDHFEIVENLTQKDNVLTQIILKTIFQ

SEQ ID NO: 7178 - protein, 227 aa, Homo sapiens
MALHDMEDFTFDGTKRLSVNYVKGILQPTDTCDIWDKIWNFQAKPDDLLISTYPKAGTTWTQEIVELIQNEGDVEKSKRAPTHQRFPFLEMKIPSLGSVCWGSWHEHVKGWWEAKDKHRILYLFYEDMKKNPKHEIQKLAEFIGKKLDDKVLDKIVHYTSFDVMKQNPMANYSSIPAEIMDHSISPFMRKGAVGDWKKHFTVAQNERFDEDYKKKMTDTRLTFHFQF

SEQ ID NO: 7179 - protein, 121 aa, Homo sapiens
MAPAKKGGEKKKGRSAINEVVTREYTINIHKRIHGVGFKKRAPRALKEIRKFAMKEMGTPDVRIDTRLNKAVWAKGIRNVPYRIRVRLSRKRNEDEDSPNKLYTLVTYVPVTTFKSKFSIP

SEQ ID NO: 7180 - protein, 88 aa, Homo sapiens
LSFRADSAHASMVNVPKTRRTFCKKCGKHQPHKVTQYKKGKDSLYAQGKRRYDRKQSGYGGQTKPIFRKKLHQNCIEPNLPPRAQQSP

SEQ ID NO: 7181 - protein, 193 aa, Homo sapiens; identical to SEQ ID NO: 4761

SEQ ID NO: 7182 - protein, 1378 aa, Homo sapiens
MSLERELRQLSKAKAKAQRAGQRREEAALCHQLGELLAGHGRYAEALEQHWQELQLRERADDPLGCAVAHRKIGERLAEMEDYPAALQHQHQYLELAHSLRNHTELQRAWATIGRTHLDIYDHCQSRDALLQAQAAFEKSLAIVDEELEGTLAQGELNEMRTRLYLNLGLTFESLQQTALCNDYFRKSIFLAEQNHLYEDLFRARYNLGTIHWRAGQHSQAMRCLEGARECAHTMRKRFMESECCVVIAQVLQDLGDFLAAKRALKKAYRLGSQKPVQRAAICQNLQHVLAVVRLQQQLEEAEGRDPQGAMVICEQLGDLFSKAGDFPRAAEAYQKQLRFAELLDRPGAERAIIHVSLATTLGDMKDHHGAVRHYEEELRLRSGNVLEEAKTWLNIALSREEAGDAYELLAPCFQKALSCAQQAQRPQLQRQVLQHLHTVQLRLQPQEAPETETRLRELSVAEDEDEEEEAEEAAATAESEALEAGEVELSEGEDDTDGLTPQLEEDEELQGHLGRRKGSKWNRRNDMGETLLHRACIEGQLRRVQDLVRQGHPLNPRDYCGWTPLHEACNYGHLEIVRFLLDHGAAVDDPGGQGCEGITPLHDALNCGHFEVAELLLERGASVTLRTRKGLSPLETLQQWVKLYRRDLDLETRQKARAMEMLLQAAASGQDPHSSQAFHTPSSLLFDPETSPPLSPCPEPPSNSTRLPEASQAHVRVSPGQAAPAMARPRRSRHGPASSSSSSEGEDSAGPARPSQKRPRCSATAQRVAAWTPGPASNREAATASTSRAAYQAAIRGVGSAQSRLGPGPPRGHSKALAPQAALIPEEECLAGDWLELDMPLTRSRRPRPRGTGDNRRPSSTSGSDSEESRPRARAKQVRLTCMQSCSAPVNAGPSSLASEPPGSPSTPRVSEPSGDSSAAGQPLGPAPPPPIRVRVQVQDHLFLIPVPHSSDTHSVAWLAEQAAQRYYQTCGLLPRLTLRKEGALLAPQDLIPDVLQSNDEVLAEVTSWDLPPLTDRYRRACQSLGQGEHQQVLQAVELQGLGLSFSACSLALDQAQLTPLLRALKLHTALRELRLAGNRLGDKCVAELVAALGTMPSLALLDLSSNHLGPEGLRQLAMGLPGQATLQSLEELDLSMNPLGDGCGQSLASLLHACPLLSTLRLQACGFGPSFFLSHQTALGSAFQDAEHLKTLSLSYNALGAPALARTLQSLPAGTLLHLELSSVAAGKGDSDLMEPVFRYLAKEGCALAHLTLSANHLGDKAVRDLCRCLSLCPSLISLDLSANPEISCASLEELLSTLQKRPQGLSFLGLSGCAVQGPLGLGLWDKIAAQLRELQLCSRRLCAEDRDALRQLQPSRPGPGECTLDHGSKLFFRRL

SEQ ID NO: 7183 - protein, 405 aa, Homo sapiens
MNYQQQLANSAAIRAEIQRFESVHPNIYSIYELLERVEEPVLQNQIREHVIAIEDAFVNSQEWTLSRSVPELKVGIVGNLASGKSALVHRYLTGTYVQEESPEGGRFKKEIVVDGQSYLLLIRDEGGPPEAQFAMWVDAVIFVFSLEDEISFQTVYHYYSRMANYRNTSEIPLVLVGTQDAISSANPRVIDDARARKLSNDLKRCTYYETCATYGLNVERVFQDVAQKIVATRKKQQLSIGPCKSLPNSPSHSSVCSAQVSAVHISQTSNGGGSLSDYSSSVPSTPSTSQKELRIDVPPTANTPTPVRKQSKRRSNLFTSRKGSDPDKEKKGLESRADSIGSGRAIPIKQGLPFFVLALTASTYLRPAGARARQSSPWPGPRGGQTSPHCAEGPQSAQLSGAMMN

SEQ ID NO: 7184 - protein, 413 aa, Homo sapiens; identical to SEQ ID NO: 4779

SEQ ID NO: 7185 - protein, 213 aa, Homo sapiens
MGPLAAVELFYDVLSPYSWLGFEILCRYQNIWNINLQLRPSLITGIMKDSGNKPPGLLPRKGLYMANDLKLLRHHLQIPIHFPKDFLSVMLEKGSLSAMRFLTAVNLEHPEMLEKASRELWMRVWSRAAEKAGMSAEQAQGLLEKIATPKVKNQLKETTEAACRYGAFGLPITVAHVDGQTHMLFGSDRMELLAHLLGEKWMGPIPPAVNARL

SEQ ID NO: 7186 - protein, 1400 aa, Homo sapiens
MADTDLFMECEEEELEPWQKISDVIEDSVVEDYNSVDKTTTVSVSQQPVSAPVPIAAHASVAGHLSTSTTVSSSGAQNSDSTKKTLVTLIANNNAGNPLVQQGGQPLILTQNPAPGLGTMVTQPVLRPVQVMQNANHVTSSPVASQPIFITTQGFPVRNVRPVQNAMNQVGIVLNVQQGQTVRPITLVPAPGTQFVKPTVGVPQVFSQMTPVRPGSTMPVRPTTNTFTTVIPATLTIRSTVPQSQSQQTKSTPSTSTTPTATQPTSLGQLAVQSPGQSNQTTNPKLVSIASFVTVKRPGVTGENSNEVAKLVNTLNTIPSLGQSPGPVVVSNNSSAHGSQRTSGPESSMKVTSSIPVFDLQDGGRKICPRCNAQFRVTEALRGHMCYCCPEMVEYQKKGKSLDSEPSVPSAAKPPSPEKTAPVASTPSSTPIPALSPPTKVPEPNENVGDAVQTKLIMLVDDFYYGRDGGKVAQLTNFPKVATSFRCPHCTKRLKNNIRFMNHMKHHVELDQQNGEVDGHTICQHCYRQFSTPFQLQCHLENVHSPYESTTKCKICEWAFESEPLFLQHMKDTHKPGEMPYVCQVCQYRSSLYSEVDVHFRMIHEDTRHLLCPYCLKVFKNGNAFQQHYMRHQKRNVYHCNKCRLQFLFAKDKIEHKLQHHKTFRKPKQLEGLKPGTKVTIRASRGQAAVPVSSNDTPPSALQEAAPLTSSMDPLPVFLYPPVQRSIQKRAVRKMSVMGRQTCLECSFEIPDFPNHFPTYVHCSLCRYSTCCSRAYANHMINNHVPRKSPKYLALFKNSVSGIKLACTSCTFVTSVGDAMAKHLVFNPSHRSSSILPRGLTWIAHSRHGQTRDRVHDRNVKNMYPPPSFPTNKAATVKSAGATPAEPEELLTPLAPALPSPASTATPPPTPTHPQALALPPLATEGAECLNVDDQDEGSPVTQEPELASGGGGSGGVGKKEQLSVKKLRVVLFALCCNTEQAAEHFRNPQRRIRRWLRRFQASQGENLEGKYLSFEAEEKLAEWVLTQREQQLPVNEETLFQKATKIGRSLEGGFKISYEWAVRFMLRHHLTPHARRAVAHTLPKDVAENAGLFIDFVQRQIHNQDLPLSMIVAIDEISLFLDTEVLSSDDRKENALQTVGTGEPWCDVVLAILADGTVLPTLVFYRGQMDQPANMPDSILLEAKESGYSDDEIMELWSTRVWQKHTACQRSKGMLVMDCHRTHLSEEVLAMLSASSTLPAVVPAGCSSKIQPLDVCIKRTVKNFLHKKWKEQAREMADTACDSDVLLQLVLVWLGEVLGVIGDCPELVQRSFLVASVLPGPDGNINSPTRNADMQEELIASLEEQLKLSGEHSESSTPRPRSSPEETIEPESLHQLFEGESETESFYGFEEADLDLMEI

SEQ ID NO: 7187 - protein, 465 aa, Homo sapiens; identical to SEQ ID NO: 4947

SEQ ID NO: 7188 - protein, 1069 aa, Homo sapiens
MYLLDGSGEPASPPADAMPRGTPPRKTVYRISVTMVRKEQLAAPGSGGPDPRPVRRPRPARSPDAPGRLEEEAEEAEGAEEPEGPRPRAWDFRTFRTRSTGQLELGRLRPCARGLEPADLAGSAPAEEEGRGSPASGSPDVEGARAAPLRRSLSFRHWSGPEAPQGRTLGGGRRHSSSGSLAWAPCDEAAAGTTLEPATATQPASEKRNTLDVGEVLSKNDALSDLERWERSKSKNRTLDNSDLQRLERARAAAGAGAASEHRLLRFFSGIFARRDGGPGGGPSPRSGASRPRGYFSLRRAPAEAHSSSAESIDGSPRRDAFVNSQEWTLSRSVPELKVGIVGNLASGKSALVHRYLTGTYVQEESPEGGRFKKEIVVDGQSYLLLIRDEGGPPEAQFAMWVDAVIFVFSLEDEISFQTVYHYYSRMANYRNTSEIPLVLVGTQDAISSANPRVIDDARARKLSNDLKRCTYYETCATYGLNVERVFQDVAQKIVATRKKQQLSIGPCKSLPNSPSHSSVCSAQVSAVHISQTSNGGGSLSDYSSSVPSTPSTSQKELRIDVPPTANTPTPVRKQSKRRSNLFTSRKGSDPDKEKKGLESRADSIGSGRAIPIKQGMLLKRSGKSLNKEWKKKYVTLCDNGVLTYHPSLHDYMQNVHGKEIDLLRTTVKVPGKRPPRATSACAPISSPKTNGLSKDMSSLHISPNSDTGLGDSVCSSPSISSTTSPKLDPPPSPHANRKKHRRKKSTSNFKADGLSGTAEEQEENFEFIIVSLTGQTWHFEATTYEERDAWVQAIESQILASLQSCESSKNKSRLTSQSEAMALQSIRNMRGNSHCVDCETQNPNWASLNLGALMCIECSGIHRNLGTHLSRVRSLDLDDWPVELIKVMSSIGNELANSVWEESSQGRTKPSVDSTREEKERWIRAKYEQKLFLAPLPCTELSLGQHLLRATADEDLRTAILLLAHGSRDEVNETCGEGDGRTALHLACRKGNVVLAQLLIWYGVDVTARDAHGNTALAYARQASSQECIDVLLQYGCPDERFVLMATPNLSRRNNNRNNSSGRVPTII

SEQ ID NO: 7189 - protein, 419 aa, Homo sapiens
MNNQKQQKPTLSGQRFKTRKRDEKERFDPTQFQDCIIQGLTETGTDLEAVAKFLDASGAKLDYRRYAETLFDILVAGGMLAPGGTLADDMMRTDVCVFAAQEDLETMQAFAQVFNKLIRRYKYLEKGFEDEVKKLLLFLKGFSESERNKLAMLTGVLLANGTLNASILNSLYNENLVKEGVSAAFAVKLFKSWINEKDINAVAASLRKVSMDNRLMELFPANKQSVEHFTKYFTEAGLKELSEYVRNQQTIGARKELQKELQEQMSRGDPFKDIILYVKEEMKKNNIPEPVVIGIVWSSVMSTVEWNKKEELVAEQAIKHLKQYSPLLAAFTTQGQSELTLLLKIQEYCYDNIHFMKAFQKIVVLFYKAEVLSEEPILKWYKDAHVAKGKSVFLEQMKKFVEWLKNAEEESESEAEEGD

SEQ ID NO: 7190 - protein, 922 aa, Homo sapiens; identical to SEQ ID NO: 6366

SEQ ID NO: 7191 - protein, 120 aa, Homo sapiens
MAPAKKGGEKKKGRSAINEVVTREYTINIHKRIHGVGFKKRAPRALKEIRKFAMKEMGTPDVRIDTRLNKAVWAKGIRNVPYRIRVRLSRKRNEDEDSPNKLYTLVTYVPVTTFKNCHHQ

SEQ ID NO: 7192 - protein, 125 aa, Homo sapiens; identical to SEQ ID NO: 5223

SEQ ID NO: 7193 - protein, 499 aa, Homo sapiens
MSTPSGISTWLSLPVSTPASITSIRVTQKSSGPWAFSSCTYVSGPGVCISSLSCSRVGSSSFRGGLGGGYGGASGMGGIIAIMVNQSLLSPLNLEVDPNIQAVCTQEKEQIKTLNNKFASFIDKVWFLEQQNKVLETKWSLLQQQKMARSNMDNMLESYINNLRRQLETLGQEKLKLEAELGNMQGLGEDFKNKYEDEINKHTEVENEFVLIKKDVDEAYMNKAELESLLEGLTDEINFLRQLYEEEIRELQSQISDMSMVLSMDYSCSRDMDSIIPEVKVQYEEIANCSRAEAESMYQIKYEELQTLAGKYGDDLSRTKTEISEMNRNISWLQAETEGLKGQRASLEAAITDAEQRGELAVKDANAKLSELEAALQRAKQDMMGQLREYQELMNVGLTLDIEIATYRKLLEGEESRLESGMQNVSIHTKTTSSYAGGLSSAYGGLTSPGIIYRLGSSFGSAAGSSSFSRTSSTRAVVVRKIETHDGKLESESSDVLSK

SEQ ID NO: 7194 - protein, 167 aa, Homo sapiens
MYMGMMCTAKKCGIRFQPPAIILIYESEIKGKIRQRIMPVRNFSKFSDCTRAAEQLKNNPRHKSYLEQVSLRQLEKLFSFLRGYLSGQSLAETMEQIQRETTIDPEEDLNKLDDKELAKRKSIMDELFEKNQKKKDDPNFVYDIEVEFPQDDQLQSCGWDTESADEF

SEQ ID NO: 7195 - protein, 125 aa, Homo sapiens [sequence omitted]

SEQ ID NO: 7196 - protein, 334 aa, Homo sapiens
MTRSLFKGNFWSADILSTIGYDNIIQHLNNGRKNCKEFEDFLKERAAIEERYGKDLLNLSRKKPCGQSEINTLKRALEVFKQQVDNVAQCHIQLAQSLREEARKMEEFREKQKLQRKKTELIMDAIHKQKSLQFKKTMDAKKNYEQKCRDKDEAEQAVSRSANLVNPKQQEKLFVKLATSKTAVEDSDKAYMLHIGTLDKVREEWQSEHIKACEAFEAQECERINFFRNALWLHVNQLSQQCVTSDEMYEQVRKSLEMCSIQRDIEYFVNQRKTGQIPPAPIMYENFYSSQKNAVPAGKATGPNLARRGPLPIPKSSPDDPNYSLVDDYSLLYQ

SEQ ID NO: 7197 - protein, 198 aa, Homo sapiens
MKKVRLKELESRLQQVDGFEKPKLLLEQYPTRPHIAACMLYTIHNTYDDIENKVVADLGCGCGVLSIGTAMLGAGLCVGFDIDEDALEIFNRNAEEFELTNIDMVQCDVCLLSNRMSKSFDTVIMNPPFGTKNNKGTDMAFLKTALEMARTAVYSLHKSSTREHVQKKAAEWKIKIDIIAELRYDLPASYKFHKKKSV

SEQ ID NO: 7198 - protein, 374 aa, Homo sapiens
MLAPGCELDPDQEVVRTRPEDVPASPSTSTMIVSVLRPPSHASCTACGTVTFHIVERMASVIPASNRSMRSDRNTYVGKRFVHVKNPYLDLMDEDILYHLDLGTKTHNLPAMFGDVKFVCVGGSPNRMKAFALFMHKELGFEEAEEDIKDICAGTDRYCMYKTGPVLAISHGMGIPSISIMLHELIKLLHHARCCDVTIIRIGTSGGIGIAPGTVVITDIAVDSFFKPRFEQVILDNIVTRSTELDKELSEELFNCSKEIPNFPTLVGHTMCTYDFYEGQGRLDGALCSFSREKKLDYLKRAFKAGVRNIEMESTVFAAMCGLCGLKAAVVCVTLLDRLDCDQINLPHDVLVEYQQRPQLLISNFIRRRLGLCD

SEQ ID NO: 7199 - protein, 1382 aa, Homo sapiens
MLRKLTIEQINDWFTIGKTVTNVELLGAPPAFPAGAAREEVQRQDVAPGAGPAAQAPALAQAPARPAAAFERSLSQRSSEVEYINKYRQLEAQELDVCRSVQPTSGPGPRPSLAKLSSVTCIPGTTYKYPDLPISRYKEEVVSLIESNSVVIIHGATGSGKSTQLPQYILDHYVQRSAYCSIVVTQPRKIGASSIARWISKERAWTLGGVVGYQVGLEKIATEDTRLIYMTTGVLLQKIVSAKSLMEFTHIIIDEVHERTEEMDFLLLVVRKLLRTNSRFVKVVLMSATISCKEFADYFAVPVQNKMNPAYIFEVEGKPHSVEEYYLNDLEHIHHSKLSPHLLEEPVITKDIYEVAVSLIQMFDDLDMKESGNKAWSGAQFVLERSSVLVFLPGLGEINYMHELLTSLVHKRLQVYPLHSSVALEEQNNVFLSPVPGYRKIILSTNIAESSVTVPDVKYVIDFCLTRTLVCDEDTNYQSLRLSWASKTSCNQRKGRAGRVSRGYCYRLVHKDFWDNSIPDHVVPEMLRCPLGSTILKVKLLDMGEPRALLATALSPPGLSDIERTILLLKEVGALAVSGQREDENPHDGELTFLGRVLAQLPVNQQLGKLIVLGHVFGCLDECLIIAAALSLKNFFAMPFRQHLDGYRNKVNFSGSSKSDCIALVEAFKTWKACRQTGELRYPKDELNWGRLNYIQIKRIREVAELYEELKTRISQFNMHVDSRRPVMDQEYIYKQRFILQVVLAGAFYPNYFTFGQPDEEMAVRELAGKDPKTTVVLKHIPPYGFLYYKQLQSLFRQCGQVKSIVFDGAKAFVEFSRNPTERFKTLPAVYMAIKMSQLKVSLELSVHSAEEIEGKVQGMNVSKLRNTRVNVDFQKQTVDPMQVSFNTSDRSQTVTDLLLTIDVTEVVEVGHFWGYRIDENNSEILKKLTAEINQLTLVPLPTHPHPDLVCLAPFADFDKQRYFRAQVLYVSGNSAEVFFVDYGNKSHVDLHLLMEIPCQFLELPFQALEFKICKMRPSAKSLVCGKHWSDGASQWFASLVSGCTLLVKVFSVVHSVLHVDVYQYSGVQDAINIRDVLIQQGYAELTEESYESKQSHEVLKGLFSKSVENMTDGSVPFPMKDDEKYLIRILLESFSTNKLGTPNCKAELHGPFNPYELKCHSLTRISKFRCVWIEKESINSVIISDAPEDLHQRMLVAASLSINATGSTMLLRETSLMPHIPGLPALLSMLFAPVIELRIDQNGKYYTGVLCGLGWNPATGASILPEHDMELAFDVQFSVEDVVEVNILRAAINKLVCDGPNGCKCLGPERVAQLQDIARQKLLGLFCQSKPREKIVPKWHEKPYEWNQVDPKLVMEQADRESSRGKNTFLYQLHKLVVLGT

SEQ ID NO: 7200 - protein, 118 aa, Homo sapiens
MDVFLMIRRHKTTIFTDAKESSTVFELKRIVEGILKRPPDEQRLYKDDQLLDDGKTLGECGFTSQTARPQAPATVGLAFRADDTFEALCIEPFSSPPELPDVMKPQDSGSSANEQAVQ

SEQ ID NO: 7201 - protein, 1077 aa, Homo sapiens; identical to SEQ ID NO: 5935

SEQ ID NO: 7202 - protein, 126 aa, Homo sapiens
MTATEQWIFLCAAHKTPKECPAIDYTRHTLDGAACLLNSNKYFPSRVSIKESSVAKLGSVCRRIYRIFSHAYFHHRQIFDEYENETFLCHRFTKFVMKYNLMSKDNLIVPILEEEVQNSVSGESEA

SEQ ID NO: 7203 - protein, 936 aa, Homo sapiens; identical to SEQ ID NO: 4771

SEQ ID NO: 7204 - protein, 619 aa, Homo sapiens; identical to SEQ ID NO: 5784

SEQ ID NO: 7205 - protein, 170 aa, Homo sapiens
MTRGNQRELARQKNMKKQSDSVKGKRRDDGLSAAARKQRVGVQQPNAELSPIHFHLILCALHPPASCPFCPLVPPSAPSSLPPGTRRSCSRSRKRQTRRRRNPSSFVASCPTLLPFACVPGASPTTLAFPPVVLTGPSTDGIPFALSLQRVPFVLPSPQVASLPLGHSRG

SEQ ID NO: 7206 - protein, 209 aa, Homo sapiens; identical to SEQ ID NO: 4887

SEQ ID NO: 7207 - protein, 584 aa, Homo sapiens
MAASAKRKQEEKHLKMLRDMTGLPHNRKCFDCDQRGPTYVNMTVGSFVCTSCSGSLRGLNPPHRVKSISMTTFTQQEIEFLQKHGNEVCKQIWLGLFDDRSSAIPDFRDPQKVKEFLQEKYEKKRWYVPPEQAKVVASVHASISGSSASSTSSTPEVKPLKSLLGDSAPTLHLNKGTPSQSPVVGRSQGQQQEKKQFDLLSDLGSDIFAAPAPQSTATANFANFAHFNSHAAQNSANADFANFDAFGQSSGSSNFGGFPTASHSPFQPQTTAFRMLSSSCSFGEFTSAFPLQATHSGSAASVNANFAHFDNFPKSSSADFGTFNTSQSHQTASAVSKVSTNKAGLQTADKYAALANLDNIFSAGQGGDQGSGFGTTGKAPVGSVVSVPSQSSASSDKYAALAELDSVFSSAATSSNAYTSTSNASSNVFGTVPVVASAQTQPASSSVPAPFGATPSTNPFVAAAGPSVASSTNPFQTNARGATAATFGTASMSMPTGFGTPAPYSLPTSFSGSFQQPAFPAQAAFPQQTAFSQQPNGFAAFGQTKPVVTPFGQVAAAGVSSNPFMTGAPTGQFPTGSSSTNPFL

SEQ ID NO: 7208 - protein, 264 aa, Homo sapiens; identical to SEQ ID NO: 5819

SEQ ID NO: 7209 - protein, 501 aa, Homo sapiens
MSSEQDKSASKEKSKKPVRFLPQLSMEKLASKEKFKAPARALPQLSMVSTKPHWQQAAPSFHLSVKQDDESPEPFSVKNEQSHAEYMERFGKKGKLPHQVDDSYVGPSTSKSKGKSPHKERENFRSTLVNVIMQQDADLDSAVPDGSTIPKPTASAIEKDILRYYYYIHHGIDTDHVAPMEDSWLEHVLDLVPQHLKVFTDSIVTLSDEMREDYLLSVRKSIVDFVLKDPREKGDDKKTDELPAHRAEMEILPKPWRKSFLAASSYIRDHLNAMNPTMLAVLDLWHTNFKKLRLVDIKEFHNCQDALELSSFQNIIMRHMDSAKETLLKMWFPEVQNIYYQGNKKKQLPTGDSSAKLESFFNCAAALMTLQLQDLTLVSMQDFTDLIAQPPDSVRAFEHPGFIMRLILDNDTIKFEPELSDYIDIFLNVYDVMIKAVSFVPRVETKLYSKWRNKAKPGHFYFSHIQRSVTFQHSEVSSPQNSHFKIVSPFSVLGFTWRCQL

SEQ ID NO: 7210 - protein, 284 aa, Homo sapiens
MTDVPATFTQAECNGDKPPENGQQTITKISEELTDVDSPLPHYRVEPSLEGALTKGSQEERRKLQGNMLLNSSMEDKMLKENPEEKLFIVHKAITDLSLQETSADEMTFREGHQWEKIPLSGSNQEIRRQKERITEQPLKEEEDEDRKNKGHQAAEIEWLGFRKPSQADMLHSKHDEEQKVWDEEIDDDDDDNCNNDEDEVRVIEFKKKHEEVSQFKEEGDASEDSPLSSASSQAVTPDEQPTLGKKSDISRNAYSRYNTISYRKIRKGNTKQRIDEFESMMHL

SEQ ID NO: 7211 - protein, 244 aa, Homo sapiens
MKKVRLKELESRLQQVDGFEKPKLLLEQYPTRPHIAACMLYTIHNTYDDIENKVVADLGCGCGVLSIGTAMLGAGLCVGFDIDEDALEIFNRNAEEFELTNIDMVQCDVCLLSNRMSKSFDTVIMNPPFGTKNNKGTDMAFLKTALEMARTAVYSLHKSSTREHVQKKAAEWKIKIDIIAELRYDLPASYKFHKKKSVSLLILAGLHSVLKSFLGRMWWFMPVIPATREAEARESLELRRQRLQ

SEQ ID NO: 7212 - protein, 294 aa, Homo sapiens
MNNQKQQKPTLSGQRFKTRKRDEKERFDPTQFQDCIIQGLTETGTDLEAVAKFLDASGAKLDYRRYAETLFDILVAGGMLAPGGTLADDMMRTDVCVFAAQEDLETMQAFAQVFNKLIRRYKYLEKGFEDEVKKLLLFLKGFSESERNKLAMLTGVLLANGTLNASILNSLYNENLVKEGVSAAFAVKLFKSWINEKDINAVAASLRKVSMDNRLMELFPANKQSVEHFTKYFTEAGLKELSEYVRNQQTIGARKELQKELQEQMSRGDPFKDIILYVKEEMKKNNIPEPVVIG

SEQ ID NO: 7213 - protein, 457 aa, Homo sapiens; identical to SEQ ID NO: 7040

SEQ ID NO: 7214 - protein, 545 aa, Homo sapiens
MSSSGYPPNQGAFSTEQSRYPPHSVQYTFPNTRHQQEFAVPDYRSSHLEVSQASQLLQQQQQQQLRRRPSLLSEFHPGSDRPQERRTSYEPFHPGPSPVDHDSLESKRPRLEQVSDSHFQRVSAAVLPLVHPLPEGLRASADAKKDPAFGGKHEAPSSPISGQPCGDDQNASPSKLSKEELIQSMDRVDREIAKVEQQILKLKKKQQQLEEEAAKPPEPEKPVSPPPVEQKHRSIVQIIYDENRKKAEEAHKIFEGLGPKVELPLYNQPSDTKVYHENIKTNQVMRKKLILFFKRRNHARKQREQKICQRYDQLMEAWEKKVDRIENNPRRKAKESKTREYYEKQFPEIRKQREQQERFQRVGQRGAGLSATIARSEHEISEIIDGLSEQENNEKQMRQLSVIPPMMFDAEQRRVKFINMNGLMEDPMKVYKDRQFMNVWTDHEKEIFKDKFIQHPKNFGLIASYLERKSVPDCVLYYYLTKKNENYKALVRRNYGKRRGRNQQQIARPSQEEKVEEKEEDKAEKTEKKEEEKKDEEEKDEKEDS

SEQ ID NO: 7215 - protein, 159 aa, Homo sapiens
MTHCCSPCCQPTCCRTTCWQPTTVTTCSSTPCCQPSCCVSSCCQPCCHPTCCQNTCCRTTCCQPICVTSCCQPSCCSTPCCQPTCCGSSCGQSSSCAPVYCRRTCYHPTSVCLPGCLNQSCGSNCCQPCCRPACCETTCCRTTCFQPTCVYSCCQPSCC

SEQ ID NO: 7216 - protein, 356 aa, Homo sapiens
MEGHDPKEPEQLRKLFIGGLSFETTDDSLREHFEKWGTLTDCVVMRDPQTKRSRGFGFVTYSCVEEVDAAMCARPHKVDGRVVEPKRAVSREDSVKPGAHLTVKKIFVGGIKEDTEEYNLRDYFEKYGKIETIEVMEDRQSGKKRGFAFVTFDDHDTVDKIVVQKYHTINGHNCEVKKALSKQEMQSAGSQRGRGGGSGNFMGRGGNFGGGGGNFGRGGNFGGRGGYGGGGGGSRGSYGGGDGGYNGFGGDGGNYGGGPGYSSRGGYGGGGPGYGNQGGGYGGGGGYDGYNEGGNFGGGNYGGGGNYNDFGNYSGQQQSNYGPMKGGSFGGRSSGSPYGGGYGSGGGSGGYGSRRF

SEQ ID NO: 7217 - protein, 61 aa, Homo sapiens
MPFFGNTFSPKKTPPRKSASLSNLHSLDRSTREVELGLEYGSPTMNLAGQSLKFENGQWIA

SEQ ID NO: 7218 - protein, 326 aa, Homo sapiens
MPHLPLASFRPPFWGLRHSRGLPRFHSVSTQSEPHGSPISRRNREAKQKRLREKQATLEAEIAGESKSPAESIKAWRPKELVLYEIPTKPGEKKDVSGPLPPAYSPRYVEAAWYPWWVREGFFKPEYQARLPQATGETFSMCIPPPNVTGSLHIGHALTVAIQDALVRWHRMRGDQVLWVPGSDHAGIATQAVVEKQLWKERGVRRHELSREAFLREVWQWKEAKGGEICEQLRALGASLDWDRECFTMDVGSSVAVTEAFVRLYKAGLLYRNHQLVNWSCALRSAISDIEVENRPLPGHTQLRLPGCPTPVSFGLLFSVAFPVDG

SEQ ID NO: 7219 - protein, 676 aa, Homo sapiens
MIPPQEASARRREIEDKLKQEEETLSFIRDSLEKSDQLTKNMVSILSSFESRLMKLENSIIPVHKQTENLQRLQENVEKTLSCLDHVISYYHVASDTEKIIREGPTGRLEEYLGSMAKIQKAVEYFQDNSPDSPELNKVKLLFERGKEALESEFRSLMTRHSKVVSPVLILDLISGDDDLEAQEDVTLEHLPESVLQDVIRISRWLVEYGRNQDFMNVYYQIRSSQLDRSIKGLKEHFHKSSSSSGVPYSPAIPNKRKDTPTKKPVKRPGHEHDFRVKHLSEALNDKHGPLAGRDDMLDVETDAYIHCVSAFVKLAQSEYQLLADIIPEHHQKKTFDSLIQDALDGLMLEGENIVSAARKAIVRHDFSTVLTVFPILRHLKQTKPEFDQVLQGTAASTKNKLPGLITSMETIGAKALEDFADNIKNDPDKEYNMPKDGTVHELTSNAILFLQQLLDFQETAGAMLASQETSSSATSYSSEFSKRLLSTYICKVLGNLQLNLLSKSKVYEDPALSAIFLHNNYNYILKSLEKSELIQLVAVTQKTAERSYREHIEQQIQTYQRSWLKVTDYIAEKNLPVFQPGVKLRDKERQIIKERFKGFNDGLEELCKIQKAWAIPDTEQRDRIRQAQKTIVKETYGAFLQKFGSVPFTKNPEKYIKYGVEQVGDMIDRLFDTSA

SEQ ID NO: 7220 - protein, 152 aa, Homo sapiens
MTDVPATFTQAECNGDKPPENGQQTITKISEELTDVDSPLPHYRVEPSLEGALTKGSQEERRKLQGNMLLNSSMEDKMLKENPEEKLFIVHKAITDLSLQETSADEMTFREGHQWEKIPLSGSNQEIRRQKERITEQPLKEEEDEDRKNKGH

SEQ ID NO: 7221 - protein, 255 aa, Homo sapiens
MWPFPSRSLFPPPTQAWLQTVSSDPEAQGWGAWNETKEILGPEGGEGKEEKEEEEDAEEDQDGDAGFLLSLLEQENLAECPLPDQELEAIKMKVCAMEQAEGTPRPPGVQQQAEEEEGTAAGQLLSPETVGCPLSGTPEEKVEADHRSVYVGNVDYGGSAEELEAHFSRCGEVHRVTILCDKFSGHPKGCCRKEPTSLGSAPQTAGAFEDTQAPGGHPSPTAASRAGPGSDHKGRTGPVENSHHGFHRIKGKTRF

SEQ ID NO: 7222 - protein, 1186 aa, Homo sapiens
MEKATVPVAAATAAEGEGSPPAVAAVAGPPAAAEVGGGVGGSSRARSASSPRGMVRVCDLLLKKKPPQQQHHKAKRNRTCRPPSSSESSSDSDNSGGGGGGGGGGGGGGGTSSNNSEEEEDDDDEEEEVSEVESFILDQDDLENPMLETASKLLLSGTADGADLRTVDPETQARLEALLEAAGIGKLSTADGKAFADPEVLRRLTSSVSCALDEAAAALTRMRAESTANAGQSDNRSLAEACSEGDVNAVRKLLIEGRSVNEHTEEGESLLCLACSAGYYELAQVLLAMHANVEDRGIKGDITPLMAAANGGHVKIVKLLLAHKADVNAQSSTGNTALTYACAGGYVDVVKVLLESGASIEDHNENGHTPLMEAGSAGHVEVARLLLENGAGINTHSNEFKESALTLACYKGHLEMVRFLLEAGADQEHKTDEMHTALMEACMDGHVEVARLLLDSGAQVNMPADSFESPLTLAACGGHVELAALLIERGASLEEVNDEGYTPLMEAAREGHEEMVALLLGQGANINAQTEETQETALTLACCGGFLEVADFLIKAGADIELGCSTPLMEAAQEGHLELVKYLLAAGANVHATTATGDTALTYACENGHTDVADVLLQAGADLEHESEGGRTPLMKAARAGHVCTVQFLISKGANVNRTTANNDHTVLSLACAGGHLAVVELLLAHGADPTHRLKDGSTMLIEAAKGGHTSVVCYLLDYPNNLLSAPPPDVTQLTPPSHDLNRAPRVPVQALPMVVPPQEPDKPPANVATTLPIRNKAASKQKSSSHLPANSQDVQGYITNQSPESIVEEAQGKLTELEQRIKEAIEKNAQLQSLELAHADQLTKEKIEELNKTREEQIQKKQKILEELQKVERELQLKTQQQLKKQYLEVKAQRIQLQQQQQQSCQHLGLLTPVGVGEQLSEGDYARLQQVDPVLLKDEPQQTAAQMGFAPIQPLAMPQALPLAAGPLPPGSIANLTELQGVIVGQPVLGQAQLAGLGQGILTETQQGLMVASPAQTLNDTLDDIMAAVSGRASAMSNTPTHSIAASISQPQTPTPSPIISPSAMLPIYPAIDIDAQTESNHDTALTLACAGGHEELVQTLLERGASIEHRDKKGFTPLILAATAGHVGVVEILLDNGADIEAQSERTKDTPLSLACSGGRQEVVELLLARGANKSTGMFLITHL

SEQ ID NO: 7223 - protein, 893 aa, Homo sapiens
MAATVEGPELEAAAAAGDASEDSDAGSRALPFLGGNRLSLDLYPGGCQQLLHLCVQQPLQLLQVEFLRLSTHEDPQLLEATLAQLPQSLSCLRSLVLKGGQRRDTLGACLRGALTNLPAGLSGLAHLAHLDLSFNSLETLPACVLQMRGLGALLLSHNCLSELPEALGALPALTFLTVTHNRLQTLPPALGALSTLQRLDLSQNLLDTLPPEIGGLGSLLELNLASNRLQSLPASLAGLRSLRLLVLHSNLLASVPADLARLPLLTRLDLRDNQLRDLPPELLDAPFVRLQGNPLGEASPDAPSSPVAALIPEMPRLFLTSDLDSFPVTPQGCSVTLACGVRLQFPAGATATPITIRYRLLLPEPGLVPLGPHDALLSHVLELQPHGVAFQQDVGLWLLFTPPQARRCREVVVRTRNDNSWGDLETYLEEEAPQRLWAHCQVPHFSWFLVVSRPVSNACLVPPEGTLLCSSGHPGVKVIFPPGATEEPRRVSMQVVRMAGRELQALLGEPEAAVSPLLCLSQSGPPSFLQPVTVQLPLPSGITGLSLDRSRLHLLYWAPPAATWDDITAQVVLELTHLYARFQVTHFSWYWLWYTTKNCVGGLARKAWERLRLHRVNLIALQRRRDPEQVLLQCLPRNKVDATLRRLLERYRGPEPSDTVEMFEGEEFFAAFERGIDVDADRPDCVEGRICFVFYSHLKNVKEVSFYRGAVPVRVPEEAEAARQRKGADALWMATLPIKLPRLRGSEGPRRGAGLSLAPLNLGDAETGFLTQSNLLSVAGRLGLDWPAVALHLGVSYREVQRIRHEFRDDLDEQIRHMLFSWAERQAGQPGAVGLLVQALEQSDRQDVAEEVRAVLELGRRKYQDSIRRMGLAPKDPALPGSSAPQPPEPAQA

SEQ ID NO: 7224 - protein, 493 aa, Homo sapiens
MDFLLGNPFSSPVGQRIEKATDGSLQSEDWALNMEICDIINETEEGPKDALRAVKKRIVGNKNFHEVMLALTVLETCVKNCGHRFHVLVASQDFVESVLVRTILPKNNPPTIVHDKVLNLIQSWADAFRSSPDLTGVVTIYEDLRRKGLEFPMTDLDMLSPIHTPQRTVFNSETQSGQDSVGTDSSQQEDSGQHAAPLPAPPILSGDTPIAPTPEQIGKLRSELEMVSGNVRVMSEMLTELVPTQAEPADLELLQELNRTCRAMQQRVLELIPQIANEQLTEELLIVNDNLNNVFLRHERFERFRTGQTTKAPSEAEPAADLIDMGPDPAATGNLSSQLAGMNLGSSSVRAGLQSLEASGRLEDEFDMFALTRGSSLADQRKEVKYEAPQATDGLAGALDARQQSTGAIPVTQACLMEDIEQWLSTDVGNDAEEPKGVTSEGKFDKFLEERAKAADRLPNLSSPSAEGPPGPPSGPAPRKKTQEKDDDMLFAL

SEQ ID NO: 7225 - protein, 220 aa, Homo sapiens
MNSQPQTRSPPSRTVPIHCTDNWKRRKVLEQTPVYRSLAGRGWIKYCIFFQRPQIQPPRATIPNSSPSIRPGAQTPTAVYQANQHIMMVNHLPMPYPVPQGPQYCIPQYRHSGPPYVGPPQQYPVQPPGPGPFYPGPGPGDFPNAYGTPFYPSQPVYQSAPIIVPTQQQPPPAKREKKTIRIRDPNQGGKDITEEIMSGGGSRNPTPPIGRPTSTPTPPQ

SEQ ID NO: 7226 - protein, 137 aa, Homo sapiens
MSLFGTTSGFGTSGTSMFGSATTDNHNPMKDIEVTSSPDDSIGCLSFSPPTLPGNFLIAGSWANDVRCWEVQDSGQTIPKAQQMHTGPVLDVCWSDDGSKVFTASCDKTAKMWDLSSNQAIQIAQHDAPVKTIHWIK

SEQ ID NO: 7227 - protein, 2605 aa, Homo sapiens
MKRKVVNTHKLRLSPNEEAFILKEDYERRRKLRLLQVREQERDIALQIREDIKQRRNQQFTRLAEELRAEWEESQTQKIQNLEKLYLASLRSMGEGHRQAKENEPDLDALAQRAAERKRKADLRHKEALKVQKNQKEILLKQKTWHIKARKEALLVEKERSAKITSLPPPPPTLFENIEVKRISAVKTNSSTYHHLHTFVNRETDTKRPDARLAAEEEAKRLEELQKQAAQERMERFEKAHVRGFQAMKKIHLAQNQEKLMKELKQLQQEDLARRRQTVAQMPPQLVELPYKRSEMKEDWQRELEFAFEDMYNADRKVKGNLILHLEPEPLPTVTNQIQDEELDLSMEQENLGAAEDLPVTEAEICSSETDVPLVMKTQQIPSKVLFKKLLNKIRSQKSLWTIKSMSEDESEMITTVSEIESKAPTVESGTIASKERTLSSGQEQVVESDTLTIESGPLASEDKPLSCGTNSGKEQEINETLPITTVAQSSVLLHPQEAAARIRMSARQKQIMEIEEQKQKQLELLEQIEQQKLRLETDCFRAQLEEEKRKKTQPTGVGIAPASCPVISDEDSHRQMIRNYQHQLLQQNRLHRQSVETARKQLLEYQTMLKGRCPSVSAPSLITDSVISVPSWKSERPTAISEHWDQGQRLKLSPNKYQPIQPIQTSKLEQDHFQVARQNHFPQRQVETTETLRASDILTNQALESQEHLRQFSQTETQQRDYKLVPKDSETLSRALSHDRQLISQDARKISETFGATTFQSLESQQLFSENSENISYHLTEPSSFVPLVPQHSFSSLPVKVESGKIQEPFSAMSKSTVSTSHSIISQMHDRPLLPSENITAQQGNMKALQEQLDLQKKVLQATQEAQEQLLLCKQKEVEQQTGLSVFLPLVTPDSSALLPSAKADLGRIQESSPTKNNIAVSSDHHVISQLQDKRLSLSQPILSQQNNFKFLQEQLNIQKDSLQARREAQEVLYVHKQSELDRRVCSEQAEPSFPFQVAQHTFTSLPSADTKSGKIQEQHSSKSEKGLVSCQSDIPISQDGSLSFLQQFLPLHDSLKLLQEQLTKQRDTLQARHEAQVELLLHRQRDLGDSKSGLVSSSSSPVVVQHSVASQASAKAEPRRIQELYLSEKENVGPSCHLIIPTFQDKSLSFPQHSLAQQENLTILQEQSQIQRVILGAKEGTQEFVHTESELEKRISSEQTGTSSSLSQVDESERFQECISIKSDSTIPLSHPKIPRCQERLLRVSQHMLPLQDNLEEHQAWLDTEKEAFHFSQKTQENTSSEQTGSSSFIPQLVQLSFTSLASAESGTILEPLFTESESKIFSSHLQIPQLQDRLLRISQLIQPQQDNLKALQEQLATQREAIILARQEAREELLLHQSEWEGRISPEQVDTSSLPLVPQHSFASLPLNESERNQEPCSINSDNIVSSGHSEIPTLPDGLLGLSHLVLPQQDNLIALEEHLHAQTDFLPSIEKTQKELVLSKPCKFEEKVSSEHFIQSHHGDLQALQQQLDTQKKAIRSIQEVQEELLLQRLSELEKRVSSEQVCSSSFVSQVPVADSERTQKSFPTKSNDTLPSSHREIPRLQDRLLSLSKPILPQQDNMTAQLDAQREVMYSYEKPQEELSLNKQARGSLNKSESAEHTIPSLFLPKETEHSFIPLPFAEAKPKSTCELYSSQNEHAAPPSNPVIPGFQDRLLSFSQSVLTQQDNLGLQKQLDLQREVLHYSQKAQEKLLVQRQTALQQQIQKHEETLKDFFKDSQISKPTVENDLKTQKMGQLRDWFPNTQDLAGNDQENIRHADRNNSDDNHLASEDTSAKQSGEHLEKDLGRRSSKPPVAKVKCGLDLNQHELSAIQEVESPAIGRTSILGKPGIYEDRDPLRVSISREQSFFGSPLAHDPFSCLQLVGQENVCGDDYDEAVKLKESVVENHAVLSYAVEEEHAYLGPTVKPDDKAKTLSYEPLSSATVSTGSLLSYENTDLSLTDPESFSEHMDDSKQESTTSKEEETNIISSIVPSTQDIYQRQNSSDVHKSLLPAVDETTCGHTHFQQMIDKYINEANLIPEKTDLQELEHIFPNLHHQLFKPLEPHPDFDLSSSSSGISPDNRDFYQRSDSSSESHCATGLSKSTVYFTALRRTSMHSSLNTSPNQQPDTNLAHVGAHSFATENIIGGSEQCFEQLQPEYSSQEESQHADLPSIFSIEARDSSQGMKNQNYPSEEHTEILQNKKKIVHFQLSIGNLSSVYSSSDEANVFDQLNVQHSTPCGSNSSECSTKHQLESARGSESMGFEELSKRGVVTMLQSQGLIEDNKNETCRVLDINPQVEETDSRLCVRTVEMGTSIQAPYSLTTQNEKYFENSAETDIPKITKKLSQLGESELFASSGSFSLQSSIPVWETETGHGIMEEPELTLISTTDTSIAEMDFANLTLEEKSENEAKCFFQVSEFLPLVSATEASDYPAVSELSIEKAAASTAETPRRLTPVPGSLQEAFIKRKKSFMERSHQRQKEIRNKIHVSENSQIKTVKEKPSISSSVSRLKGVNKVRASFPEDRKTTQALRHQRGLRLYNQLAEVKQQKEEKTKQEAYAQNRARAKEFHKKTLEKLRAKNTC

SEQ ID NO: 7228 - protein, 533 aa, Homo sapiens
SAPSVGNDMGNDDAIGGNVSKYIVLPTGYCGQPKKGHLIFDACFESGNLGRVDQVSEFEYDLFIRPDTCNPRFRVWFNFTVENVKESQRVIFNIVNFSKTKSLYRDGMAPMVKSTSRPKWQRLPPKNVYYYRCPDHRKNYVMSFAFCFDREEDIYQFAYCYPYTYTRFQHYLDSLQKRNMDYFFREQLGQSVQQRKLDLLTITSPDNLREGAEQKVVFITGRVHPGETPSSFVCQGIIDFLVSQHPIACVLREYLVFKIAPMLNPDGVYLGNYRCSLMGFDLNRHWLDPSPWVHPTLHGVKQLIVQMYNDPKTSLEFYIDIHAHSTMMNGFMYGNIFEDEERFQRQAIFPKLLCQNAEDFSYSSTSFNRDAVKAGTGRRFLGGLLDHTSYCYTLEVSFYSYIISGTTAAVPYTEEAYMKLGRNVARTFLDYYRLNPVVEKVAIPMPRLRNKEIEVQRRKEKSPPYKHPLLRGPASNYPNSKGDKKSSVNHKDPSTPFKTRSPGRSYGDRSMHFLLGNEINHSSLASKDLWINA

SEQ ID NO: 7229 - protein, 502 aa, Homo sapiens
MPEIRVTPLGACPVLSWNLVLPPGRGSRAPSSTDTRTGFHVLPHGVDDELEIKAYYAGHVLGAAMFQIKVGSESVVYTGDYNMTPDRHLGAAWIDKCRPNLLITESTYATTIRDSKRCRERDFLKKVHETVERGGKVLIPVFALGRAQELCILLETFWERMNLKVPIYFSTGLTEKANHYYKLFIPWTNQKIRKTFVQRNMFEFKHIKAFDRAFADNPGPMVVFATPGMLHAGQSLQIFRKWAGNEKNMVIMPGYCVQGTVGHKILSGQRKLEMEGRQVLEVKMQVEYMSFSAHADAKGIMQLVGQAEPESVLLVHGEAKKMEFLKQKIEQELRVNCYMPANGETVTLPTSPSIPVGISLGLLKREMAQGLLPEAKKPRLLHGTLIMKDSNFRLVSSEQALKELGLAEHQLRFTCRVHLHDTRKEQETALRVYSHLKSVLKDHCVQHLPDGSVTVESVLLQAAAPSEDPGTKVLLVSWTYQDEELGSFLTSLLKKGLPQAPS

SEQ ID NO: 7230 - protein, 456 aa, Homo sapiens
MADSLESTPLPSPEDRLAKLHPSKELLEYYQKKMAECEAENEDLLKKLELYKEACEGQHKLECDLQQREEEIAELQKALSDMQVCLFQEREHVLRLYSENDRLRIRELEDKKKIQNLLALVGTDAGEVTYFCKEPPHKVTILQKTIQAVGECEQSESSAFKADPKISKRRPSRERKESSEHYQRDIQTLILQVEALQAQLGEQTKLSREQIEGLIEDRRIHLEEIQVQHQRNQNKIKELTKNLHHTQELLYESTKDFLQLRSENQNKEKSWMLEKDNLMSKIKQYRVQCKKKEDKIGKVLPVMHESHHAQSEYIKSLKDKLVQEKKLSNMYQEQCISLEEELARIREEEGMRREIFKDRTNKMGKRLQIMTKRYEALERRRILEVEGFKTDIKVLRQKLKDLEQMLYKATVNARANQDLALLCEVRDSNRRAHKIQGELKNLKSKVFGLENELRLC

SEQ ID NO: 7231 - protein, 89 aa, Homo sapiens; identical to SEQ ID NO: 6950

SEQ ID NO: 7232 - protein, 150 aa, Homo sapiens
MHPEDSVVSSKVLGCSHFPVASRPAGSHDPQPGHRGRVLGPARAPGWVRYAERVLGRPITAHLCTAKSPQQVMGSLVKDYFARQQNLSPEKIFHVIVAPCYDKKLEALQESLPPALHGSRGADCVLTSGEIAQIMEQGDLSVRDAAVDTL

SEQ ID NO: 7233 - protein, 177 aa, Homo sapiens
MGCCGCSRGCGSGCGGCGSSCGGCGSGCGGCGSGRGGCGSGCGGCSSSCGGCGSRCYVPVCCCKPVCSWVPACSCTSCGSCGGSKGGCGSCGGSKGGCGSCGGSKGGCGSCGCSQSSCCKPCCCSSGCGSSCCQSSCCKPCCCQSSCCVPVCCQSSCCKPCCCQSNCCVPVCCQCKI

SEQ ID NO: 7234 - protein, 97 aa, Homo sapiens
MPAELWLTSYGVREVDQVKRLTGPGLSEGPEPSISVMVTGGPWPTRLSRTCLHYLGEFGEDQIYEAHQQGRGALEALLCGGPQGACSEKVSATREEL

SEQ ID NO: 7235 - protein, 87 aa, Homo sapiens
MENQLAKSTEERTFQYQDSLPSLPVPSLEESLKKYLESVKPFANQEEYKKTEEIVQKFQSGIGEKLHQKLLERAKGKRNWVFVVIIE

SEQ ID NO: 7236 - protein, 626 aa, Homo sapiens; identical to SEQ ID NO: 6327

SEQ ID NO: 7237 - protein, 979 aa, Homo sapiens
MLCWGNASFGQLGLGGIDEEIVLEPRKSDFFINKRVRDVGCGLRHTVFVLDDGTVYTCGCNDLGQLGHEKSRKKPEQVVALDAQNIVAVSCGEAHTLALNDKGQVYAWGLDSDGQLGLVGSEECIRVPRNIKSLSDIQIVQVACGYYHSLALSKASEVFCWGQNKYGQLGLGTDCKKQTSPQLLKSLLGIPFMQVAAGGAHSFVLTLSGAIFGWGRNKFGQLGLNDENDRYVPNLLKSLRSQKIVYICCGEDHTAALTKEGGVFTFGAGGYGQLGHNSTSHEINPRKVFELMGSIVTEIACGRQHTSAFVPSSGRIYSFGLGGNGQLGTGSTSNRKSPFTVKGNWYPYNGQCLPDIDSEEYFCVKRIFSGGDQSFSHYSSPQNCGPPDDFRCPNPTKQIWTVNEALIQKWLSYPSGRFPVEIANEIDGTFSSSGCLNGSFLAVSNDDHYRTGTRFSGVDMNAARLLFHKLIQPDHPQISQQVAASLEKNLIPKLTSSLPDVEALRFYLTLPECPLMSDSNNFTTIAIPFGTALVNLEKAPLKVLENWWSVLEPPLFLKIVELFKEVVVHLLKLYKIGIPPSERRIFNSFLHTALKVLEILHRVNEKMGQIIQYDKFYIHEVQELIDIRNDYINWVQQQAYGMDVNHGLTELADIPVTICTYPFVFDAQAKTTLLQTDAVLQMQMAIDQAHRQNVSSLFLPVIESVNPCLILVVRRENIVGDAMEVLRKTKNIDYKKPLKVIFVGEDAVDAGGVRKEFFLLIMRELLDPKYGMFRYYEDSRLIWFSDKITVENFGATEVKELVLNGADTAVNKQNRQEFVDAYVDYIFNKSVASLFDAFHAGFHKVCGGKVLLLFQPNELQAMVIGNTNYDWKELEKNTEYKGEYWAEHPTIKIFWEVFHELPLEKKKQFLLFLTGSDRIPILGMKSLKLVIQSTGGGEEYLPVSHTCFNLLDLPKYTEKETLRSKLIQAIDHNEGFSLI

SEQ ID NO: 7238 - protein, 339 aa, Homo sapiens
MKIFVGNVDGADTTPEELAALFAPYGTVMSCAVMKQFAFVHMRENAGALRAIEALHGHELRPGRALVVEMSRPRPLNTWKIFVGNVSAACTSQELRSLFERRGRVIECDVVKGKRMHVQLSTSRLRTAPGMGDQSGCYRCGKEGHWSKECPIDRSGRVADLTEQYNEQYGAVRTPYTMSYGDSLYYNNAYGALDAYYKRCRAARSYEAVAAAAASVYNYAEQTLSQLPQVQNTAMASHLTSTSLDPYDRHLLPTSGAAATAAAAAAAAAAVTAASTSYYGRDRSPLRRATAPVPTVGEGYGYGHESELSQASAAARNSLYDMARYEREQYADRARYSAF

SEQ ID NO: 7239 - protein, 129 aa, Homo sapiens; identical to SEQ ID NO: 6440

SEQ ID NO: 7240 - protein, 564 aa, Homo sapiens
MSYPADDYESEAAYDPYAYPSDYDMHTGDPKQDLAYERQYEQQTYQVIPEVIKNFIQYFHKTVSDLIDQKVYELQASRVSSDVIDQKVYEIQDIYENSWTKLTERFFKNTPWPEAEAIAPQVGNDAVFLILYKELYYRHIYAKVSGGPSLEQRFESYYNYCNLFNYILNADGPAPLELPNQWLWDIIDEFIYQFQSFSQYRCKTAKKSEEEIDFLRSNPKIWNVHSVLNVLHSLVDKSNINRQLEVYTSGGDPESVAGEYGRHSLYKMLGYFSLVGLLRLHSLLGDYYQAIKVLENIELNKKSMYSRVPECQVTTYYYVGFAYLMMRRYQDAIRVFANILLYIQRTKSMFQRTTYKYEMINKQNEQMHALLAIALTMYPMRIDESIHLQLREKYGDKMLRMQKGDPQVYEELFSYSCPKFLSPVVPNYDNVHPNYHKEPFLQQLKVFSDEVQQQAQLSTIRSFLKLYTTMPVAKLAGFLDLTEQEFRIQLLVFKHKMKNLVWTSGISALDGEFQSASEVDFYIDKDMIHIADTKVARRYGDFFIRQIHKFEELNRTLKKMGQRP

SEQ ID NO: 7241 - protein, 262 aa, Homo sapiens; identical to SEQ ID NO: 5940

SEQ ID NO: 7242 - protein, 541 aa, Homo sapiens; identical to SEQ ID NO: 5657

SEQ ID NO: 7243 - protein, 100 aa, Homo sapiens
MSTIGSFEGFQAVSLKQEGDDQPSETDHLSMEEEDPMPRQISRQSSVTESTLYPNPYHQPYISRKYFATRPGAIETAMEDLKGHVAETSGETIQGFWLLT

SEQ ID NO: 7244 - protein, 474 aa, Homo sapiens
MERSGQRVTTWDCDQGKHSDSDYREDGMDLGSDAGSSSSSSRASSQSNSTKVTPCSECKSSSSPGGSLDLVSALEDYEEPFPVYQKKVIDEWAPEEDGEEEEEEDERDQRGYRDDRSPAREPGDVSARTRSGGGGGRSATTAMPPPVPNGNLHQHDPQDLRHNGNVVVAGRPSCSRGPRRAIQKPQPAGGRRSGRGPAAGGLCLQPPDGGTCVPEEPPVPPMDWEALEKHLAGLQFREQEAQKNERESIRQKLALGSFFDDGPGIYTSCSKSGKPSLSSRLQSGMNLQICFVNDSGSDKDSDADDSKTETSLDTPLSPMSKQSSSYSDRDTTEEESESLDDMDFLTRQKKLQAEAKMALAMAKPMAKMQVEVEKQNRKKSPVADLLPHMPHISECLMKRSLKPTDLRDMTIGQLQVIVNDLHSQIESLNEELVQLLLIRDELHTEQDAMLVDIEDLTRHAESQQKHMAEKMPAK

SEQ ID NO: 7245 - protein, 229 aa, Homo sapiens [sequence omitted]

SEQ ID NO: 7246 - protein, 549 aa, Homo sapiens
MSRVAKYRRQVSEDPDIDSLLETLSPEEMEELEKELDVVDPDGSVPVGLRQRNQTEKQSTGVYNREAMLNFCEKETKKLMQREMSMDESKQVETKTDAKEEKIIRGIDKGRVRAAVDKKEAGKDGRGEERAVATKKEEEKKGSDRNTGLSRDKDKKREEMKEVAKKEDDEKVKGERRNTDTRKEGEKMKRAGGNTDMKKEDEKVKRGTGNTDTKKDDEKVKKNEPLHEKEAKDDSKTKTPEKQTPSGPTKPSEGPAKVEEEAAPSIFDEPLERVKNNDPEMTEVNVNNSDCITNEILVRFTEALEFNTVVKLFALANTRADDHVAFAIAIMLKANKTITSLNLDSNHITGKGILAIFRALLQNNTLTELRFHNQRHICGGKTEMEIAKLLKENTTLLKLGYHFELAGPRMTVTNLLSRNMDKQRQKRLQEQRQAQEAKGEKKDLLEVPKAGAVAKGSPKPSPQPSPKPSPKNSPKKGGAPAAPPPPPPPLAPPLIMENLKNSLSPATQRKMGDKVLPAQEKNSRDQLLAAIRSSNLKQLKKVEVPKLLQ

SEQ ID NO: 7247 - protein, 76 aa, Homo sapiens
MSASCDGCVGSRPPVHLASGYSLADLLVLEMGMGTQCWTEDQRRWSSLWPWSHLSSDPSLPNVQVTRLTLLSEQAP

SEQ ID NO: 7248 - protein, 471 aa, Homo sapiens
MANSFAARIFTTLSDLQTNMANLKVIGIVIGKTDVKGFPDRKNIGSERYTFSFTIRDSPAHFVNAASWGNEDYIKSLSDSFRVGDCVIIENPLIQRKEIEREEKFSPATPSNCKLLLSENHSTVKVCSSYEVDTKLLSLIHLPVKESHDYYSLGDIVANGHSLNGRIINVLAAVKSVGEPKYFTTSDRRKGQRCEVRLYDETESSFAMTCWDNESILLAQSWMPRETVIFASDVRINFDKFRNCMTATVISKTIITTNPDIPEANILLNFIRENKETNVLDDEIDSYFKESINLSTIVDVYTVEQLKGKALKNEGKADPSYGILYAYISTLNIDDETTKVVRNRCSSCGYIVNEASNMCTTCNKNSLDFKSVFLSFHVLIDLTDHTGTLHSCSLTGSVAEETLGCTVHEFLAMTDEQKTALKWQFLLERSKIYLKFVLSHRARSGLKISVLSCKLADPTEASRNLSGQKHV

SEQ ID NO: 7249 - protein, 248 aa, Homo sapiens
MATSAPLRSLEEEVTCSICLDYLRDPVTIDCGHVFCRSCTTDVRPISGSRPVCPLCKKPFKKENIRPVWQLASLVENIERLKVDKGRQPGEVTREQQDAKLCERHREKLHYYCEDDGKLLCVMCRESREHRPHTAVLMEKAAQPHREKILNHLSTLRRDRDKIQGFQAKGEADILAALKKLQDQRQYIVAEFEQGHQFLREREEHLLEQLAKLEQELTEGREKFKSRGVGELARLALVISELEGKAQQ

SEQ ID NO: 7250 - protein, 881 aa, Homo sapiens
MFWKFDLHTSSHLDTLLEREDLSLPELLDEEDVLQECKVVNRKLLDFLLQPPHLQAMVAWVTQEPPDSGEERLRYKYPSVACEILTSDVPQINDALGADESLLNRLYGFLQSTGSLNPLLASFFSKVMGILINRKTDQLVSFLRKKDDFVDLLLQHIGTSAIMDLLLRLLTCVERPQLRQDVVNWLNEEKIVQRLIEQIHPSKDENQHSNASQSLCDIIRLSREQMIQVQDSPEPDQLLATLEKQETIEQLLSNMFEGEQSQSVIVSGIQVLLTLLEPRRPRSESVTVNSFFSSVDGQLELLAQGALESTVSSVGALHALRPRLSCFHQLLLEPPKLEPLQMTWGMLAPPLGNTRLHVVKLLASALSANDAALTHELLALDVPNTMLDLFFHYVFNNFLHAQVEGCVSTMLSLGPPPDSSPETPIQNPVVKHLLQQCRLVERILTSWEENDRVQCAGGPRKGYMGHLTRVAGALVQNTEKGPNAEQLRQLLKELPSEQQEQWEAFVSGPLAETNKKNMVDLVNTHHLHSSSDDEDDRLKEFNFPEEAVLQQAFMDFQMQRMTSAFIDHFGFNDEEFGEQEESVNAPFDKTANITFSLNADDENPNANLLEICYKDRIQQFDDDEEEEDEEEAQGSGESDGEDGAWQGSQLARGARLGQPPGVRSGGSTDSEDEEEEDEEEEEDEEGIGCAARGGATPLSYPSPGPQPPGPSWTATFDPVPTDAPTSPRVSGEEELHTGPPAPQGPLSVPQGLPTQSLASPPARDALQLRSQDPTPPSAPQEATEGSKVTEPSAPCQALVSIGDLQATFHGIRSAPSSSDSATRDPSTSVPASGAHQPPQTTEGEKSPEPLGLPQSQSAQALTPPPIPNGSAPEGPASPGSQ

SEQ ID NO: 7251 - protein, 117 aa, Homo sapiens
MKFQYKEVHPFEYRKKEGEKIRKKYPDRVPLIVEKAPKARVPDLDRRKYLVPSDLTDGQFYLLIRKRIHLRPEDALFFFVNNTIPPTSATMGQLYEDSHEEDDFLYVAYSNESVYGK

SEQ ID NO: 7252 - protein, 362 aa, Homo sapiens
MREIVHLQAGQCGNQIGAKFWEVISDEHGIDPTGTYHGDSDLQLERINVYYNEATGGNYVPRAVLVDLEPGTMDSVRSGPFGQIFRPDNFVFGQSGAGNNWAKGHYTEGAELVDAVLDVVRKEAESCDCLQGFQLTTPTYGDLNHLVSATMSGVTTCLRFPGQLNADLRKLAVNMVPFPRLHFFMPGFAPLTSRGSQQYRALTVPELTQQMFDAKNMMAACDPRHGRYLTVAAVFRGRMSMKEVDEQMLSVQSKNSSYFVEWIPNNVKTAVCDIPPRGLKMAATFIGNSTAIQELFKRISEQFTAMFRRKAFLHWYTGEGMDEMEFTEAESNMNDLVSEYQQYQDATAEEGEFEEEAEEEVA

SEQ ID NO: 7253 - protein, 217 aa, Homo sapiens
MEETMKLATMEDTVEYCLFLIPDESRDSDKHKEILQKYIERIITRFAPMLVPYIWQNQPFNLKYKPGKGGVPAHMFGVTKFGDNIEDEWFIVYVIKQITKEFPELVASTNRVFFCHGELCIIPAPRKSGAESWLPTTPPTIPQALNIITAHSEKILASESIRAAVNRRIRGYPEKIQASLHRAHCFLPAGIVAVLKQRPRLVAAAVQAFYLRDPIDL

SEQ ID NO: 7254 - protein, 395 aa, Homo sapiens; identical to SEQ ID NO: 6506

SEQ ID NO: 7255 - protein, 33 aa, Homo sapiens
MSISSDEVNFLVYRYLQESGFSHSAFTFGIESH

SEQ ID NO: 7256 - protein, 413 aa, Homo sapiens
MFASDLLRALDCCPGAGSSGLLPQLGPRQLLAFTVNCLGNHRYLGFFEDLEQRHKAQVLVEDISDILEEHAEKHFHPYIAYCSNEVYQQRTLQKLISSNAAFREALREIERRPACGGLPMLSFLILPMQRVTRLPLLMDTLCLKTQGHSERYKAASRALKAISKLVRQCNEGAHRMERMEQMYTLHTQLDFSKVKSLPLISASRWLLKRGELFLVEETGLFRKIASRPTCYLFLFNDVLVVTKKKSEESYMVQDYAQMNHIQVEKIEPSELPLPGGGNRSSSVPHPFQVTLLRNSEGRQEQLLLSSDSASDRARWIVALTHSERQWQGLSSKGDLPQVEITKAFFAKQADEVTLQQADVVLVLQQEDGWLYGERLRDGETGWFPEDFARFITSRVAVEGNVRRMERLRVETDV

SEQ ID NO: 7257 - protein, 629 aa, Homo sapiens
MEESPLSRAPSRGGVNFLNVARTYIPNTKVECHYTLPPGTMPSASDWIGIFKVEAACVRDYHTFVWSSVPESTTDGSPIHTSVQFQACNQLDESQQERNDLMQLKLQLEGQVTELRSRVQELERALATARQEHTELMEQYKGISRSHGEITEERDILSRQQGDHVARILELEDDIQTISEKVLTKEVELDRLRDTVKALTREQEKLLGQLKEVQADKEQSEAELQVAQQENHHLNLDLKEAKSWQEEQSAQAQRLKDKVAQMKDTLGQAQQRVAELEPLKEQLRGAQELAASSQQKATLLGEELASAAAARDRTIAELHRSRLEVAEVNGRLAELGLHLKEEKCQWSKERAGLLQSVEAEKDKILKLSAEILRLEKAVQEERTQNQVFKTELAREKDSSLVQLSESKRELTELRSALRVLQKEKEQLQEEKQELLEYMRKLEARLEKVADEKWNEDATTEDEEAAVGLSCPAALTDSEDESPEDMRLPPYGLCERGDPGSSPAGPREASPLVVISQPAPISPHLSGPAEDSSSDSEAEDEKSVLMAAVQSGGEEANLLLPELGSAFYDMASGFTVGTLSETSTGGPATPTWKECPICKERFPAESDKDALEDHMDGHFFFSTQDPFTFE

SEQ ID NO: 7258 - protein, 816 aa, Homo sapiens
MPLSSPNAAATASDMDKNSGSNSSSASSGSSKGQQPPRSASAGPAGESKPKSDGKNSSGSKRYNRKRELSYPKNESFNNQSRRSSSQKSKTFNKMPPQRGGGSSKLFSSSFNGGRRDEVAEAQRAEFSPAQFSGPKKINLNHLLNFTFEPRGQTGHFEGSGHGSWGKRNKWGHKPFNKELFLQANCQFVVSEDQDYTAHFADPDTLVNWDFVEQVRICSHEVPSCPICLYPPTAAKITRCGHIFCWACILHYLSLSEKTWSKCPICYSSVHKKDLKSVVATESHQYVVGDTITMQLMKREKGVLVALPKSKWMNVDHPIHLGDEQHSQYSKLLLASKEQVLHRVVLEEKVALEQQLAEEKHTPESCFIEAAIQELKTREEALSGLAGSRREVTGVVAALEQLVLMAPLAKESVFQPRKSLLQQGVLEYLSAFDEETTEVCSLDTPSRPLALPLVEEEEAVSEPEPEGLPEACDDLELADDNLKEGTICTESSQQEPITKSGFTRLSSSPCYYFYQAEDGQHMFLHPVNVRCLVREYGSLERSPEKISATVVEIAGYSMSEDVRQRHRYLSHLPLTCEFSICELALQPPVVSKETLEMFSDDIEKRKRQRQKKAREERRRERRIEIEENKKQGKYPEVHIPLENLQQFPAFNSYTCSSDSALGPTSTEGHGALSISPLSRSPGSHADFLLTPLSPTASQGSPSFCVGSLEEDSPFPSFAQMLRVGKAKADVWPKTAPKKDENSLVPPAPVDSDGESDNSDRVPVPSFQNSFSQAIEAAFMKLDTPATSDPLSEEKGGKKRKKQKQKLLFSTSVVHTK

SEQ ID NO: 7259 - protein, 142 aa, Homo sapiens
MASPGKDNYRMKSYKNKALNPQEMRRRREEEGIQLRKQKREEQLFKRRNVYLPRNDESMLESPIQDPDISSTVPIPEEEVVTTDMVQMIFSNNADQQLTATQKFRKLLSKEPNPPIDQVIQKPGVVQRFVKFLERNENCTLQ

SEQ ID NO: 7260 - protein, 98 aa, Homo sapiens
MSEQGDLNQAIAEEGGTEQETATPENGIVKSESLDEEEKLELQRRLEAQNQERRKSKSGAGKGKLTRSLAVCEESSARPGGESLQDQESIHLQLSSFS

SEQ ID NO: 7261 - protein, 637 aa, Homo sapiens
MENLQTNFSLVQGSTKKLNGMGDDGSPPAKKMITDIHANGKTINKVPTVKKEHLDDYGEAPVETDGEHVKRTCTSVPETLHLNPSLKHTLAQFHLSSQSSLGGPAAFSARHSQESMSPTVFLPLPSPQVLPGPLLIPSDSSTELTQTVLEGESISCFQVGGEKRLCLPQVLNSVLREFTLQQINTVCDELYIYCSRCTSDQLHILKVLGILPFNAPSCGLITLTDAQRLCNALLRAAFPQNGSVLPAKSSLAQLKETGSAFEVEHECLGKCQGLFAPQFYVQPDAPCIQCLECCGMFAPQTFVMHSHRSPDKRTCHWGFESAKWHCYLHVNQKYLGTPEEKKLKIILEEMKEKFSMRSGKRNQSKTDAPSGMELQSWYPVIKQEGDHVSQTHSFLHPSYYLYMCDKVVAPNVSLTSAVSQSKELTKTEANASISNNSTSKRKSESATCNLVRDINKVGIGLVAAASSPLLVKDVICEDDKGKIMEEVMRTYLKQQEKLNLILQKKQQLQMEVKMLSSSKSMKELTEEQQNLQKELESLQNEHAQRMEEFYVEQKDLEKKLEQIMKQKCTCDSNLEKDKEAEYAGQLAELRQRLDHAEADRQELQDELRQEREARQKLEMMIKELKLQILKSSKTAKE

SEQ ID NO: 7262 - protein, 509 aa, Homo sapiens
MKRGRLPSSSEDSDDNGSLSTTWSQNSRSQHRRSSCSRHEDRKPSEVFRTDLITAMKLHDSYQLNPDEYYVLADPWRQEWEKGVQVPVSPGTIPQPVARVVSEEKSLMFIRPKKYIVSSGSEPPELGYVDIRTLADSVCRYDLNDMDAAWLELTNEEFKEMGMPELDEYTMERVLEEFEQRCYDNMNHAIETEEGLGIEYDEDVVCDVCQSPDGEDGNEMVFCDKCNICVHQACYGILKVPEGSWLCRTCALGVQPKCLLCPKKGGAMKPTRSGTKWVHVSCALWIPEVSIGSPEKMEPITKVSHIPSSRWALVCSLCNEKFGASIQCSVKNCRTAFHVTCAFDRGLEMKTILAENDEVKFKSYCPKHSSHRKPEESLGKGAAQENGAPECSPRNPLEPFASLEQNREEAHRVSVRKQKLQQLEDEFYTFVNLLDVARALRLPEEVVDFLYQYWKLKRKVNFNKPLITPKKDEEDNLAKREQDVLFRRLQLFTHLRQDLERVMIDTDTL

SEQ ID NO: 7263 - protein, 117 aa, Homo sapiens
MAFSGRARPCIIPENEEIPRAALNTVHEANGTEDERAVSKLQRRHSDVKVYKEFCDFYAKFNMANALASATCERCKGGFAPAETIVNSNGELYHEQCFVCAQCFQQFPEGLFYEERT

SEQ ID NO: 7264 - protein, 368 aa, Homo sapiens
MKDTQDIQEASKAMQNKVHEQEDKNEKQKQREDKLGVYSLVHFSPKMLGSVATTLPLSSSNSSGMPLGYYLSSPQISRVTISTTGQLTSKATVGSCSRVENSLDASPFSVPKKQDESPMIGDGEDYFLSLFGDSKKLTAHSNYTQKTLKYFSMILEEVGQFTSSSLGDVEIAEVNVKGLFVKLINSSLDKEMAIGDHILQQNVNGQTISLYRFLPNIVMQANSTVTAIAWYTPIHWKQAWEKLDADVEFNRCSVVSPTFRKRVFQWTASTATITKEKQDQPKKDISNYQVEQAQVLLKREKEIPPTVFPNRSPWCQNPYVSAHPYCPLIEPHNTSTAGGRLDRQAARSTRPNRASGSKKKKTSESQKQ

SEQ ID NO: 7265 - protein, 226 aa, Homo sapiens
MDQSRVLLWVKAEPFIVGALQVPPPSKFSLHYLRKISTYVQIRATEGAYPRLYWSTWRHIACGKLQLAKDLAWLYFEIFDSLSMKTPEERLEWSEVLSNCMSEEEVEKQRNQLSVDTLQFLLFLYIQQLNKVSLRTSLIGEEWPSPRNKSQSPDLTEKSNCHNKNWNDYSHQAFVYDHLSDLLELLLDPKQLTASFHSTHSSLVSREAVVALSFLIEGTISRARKI

SEQ ID NO: 7266 - protein, 248 aa, Homo sapiens
MNDRLGEDESLLMKLYSFLLNDSPLNPLLASFFSKVLSILISRKPEQIVDFLKKKHDFVDLIIKHIGTSAIMDLLLRLLTCIEPPQPRQDVLNWLNEEKIIQRLVEIVHPSQEEDRHSNASQSLCEIVRLSRDQMLQIQNSTEPDLLLASGLPDLNGVGPRGLLVDNMLWSRLVVSFASHGQGLAPLVAHVASVVWTWWLLHPTVASVVWTWWLLHPTQGNSVLLHPTDCWERASGTFLWGIILFCLS

SEQ ID NO: 7267 - protein, 622 aa, Homo sapiens; identical to SEQ ID NO: 5475

SEQ ID NO: 7268 - protein, 1335 aa, Homo sapiens
MEEIPVKVAVRIRPLLCKEALHNHQVCVRVIPNSQQVIIGRDRVFTFDFVFGKNSTQDEVYNTCIKPLVLSLIEGYNATVFAYGQTGSGKTYTIGGGHIASVVEGQKGIIPRAIQEIFQSISEHPSIDFNVKVSYIEVYKEDLRDLLELETSMKDLHIREDEKGNTVIVGAKECHVESAGEVMSLLEMGNAARHTGTTQMNEHSSRSHAIFTISICQVHKNMEAAEDGSWYSPRHIVSKFHFVDLAGSERVTKTGNTGERFKESIQINSGLLALGNVISALGDPRRKSSHIPYRDAKITRLLKDSLGGSAKTVMITCVSPSSSNFDESLNSLKYANRARNIRNKPTVNFSPESDRIDEMEFEIKLLREALQSQQAGVSQTTQINREGSPDTNRIHSLEEQVAQLQGECLGYQCCVEEAFTFLVDLKDTVRLNEKQQHKLQEWFNMIQEVRKAVLTSFRGIGGTASLEEGPQHVTVLQLKRELKKCQCVLAADEVVFNQKELEVKELKNQVQMMVQENKGHAVSLKEAQKVNRLQNEKIIEQQLLVDQLSEELTKLNLSVTSSAKENCGDGPDARIPERRPYTVPFDTHLGHYIYIPSRQDSRKVHTSPPMYSLDRIFAGFRTRSQMLLGHIEEQDKVLHCQFSDNSDDEESEGQEKSGTRCRSRSWIQKPDSVCSLVELSDTQDETQKSDLENEDLKIDCLQESQELNLQKLKNSERILTEAKQKMRELTINIKMKEDLIKELIKTGNDAKSVSKQYSLKVTKLEHDAEQAKVELIETQKQLQELENKDLSDVAMKVKLQKEFRKKMDAAKLRVQEIQLKTGQEEGLKPKAEDLDACNLKRRKGSFGSIDHLQKLDEQKKWLDEEVEKVLNQRQELEELEADLKKREAIVSKKEALLQEKSHLENKKLRSSQALNTDSLKISTRLNLLEQELSEKNVQLQTSTAEEKTKISEQVEVLQKEKDQLQKRRHNVDEKLKNGRVLSPEEEHVLFQLEEGIEALEAAIEYRNESIQNRQKSLRASFHNLSRGEANVLEKLACLSPVEIRTILFRYFNKVVNLREAERKQQLYNEEMKMKVLERDNMVRELESALDHLKLQCDRRLTLQQKEHEQKMQLLLHHFKEQDGEGIMETFKTYEDKIQQLEKDLYFYKKTSRDHKKKLKELVGEAIRRQLAPSEYQEAGDGVLKPEGGGMLSEELKWASRPESMKLSGREREMDSSASSLRTQPNPQKLWEDIPELPPIHSSLAPPSGHMLGNENKTETDDNQFTKSHSRLSSQIQVVGNVGRLHGVTPVKLCRKELRQISALELSLRRSSLGVGIGSMAADSIEVSRKPRDLKT

SEQ ID NO: 7269 - protein, 913 aa, Homo sapiens
MEERITTLEKRYLAAQREATSIHDLNDKLENELANKESLHRQCEEKARHLQELLEVAEQKLQQTMRKAETLPEVEAELAQRIAALTKAEERHGNIEEHLRQLEGQLEEKNQELARVRQREKMNEDHNKRLSDTVDRLLSESNERLQLHLKERMAALEEKNTLIQELESSQRQIEEQHHHKGRLSEEIEKLRQEVDQLKGRGGPFVDGVHSRSHMGSAADVRFSLGTTTHAPPGVHRRYSALREESAKDWETSPLPGMLAPAAGPAFDSDPEISDVDEDEPGGLVGSADVVSPSGHSDAQTLAMMLQEQLDAINEEIRMIQEEKESTELRAEEIETRVTSGSMEALNLKQLRKRGSIPTSLTALSLASASPPLSGRSTPKLTSRSAAQDLDRMGVMTLPSDLRKHRRKLLSPVSREENREDKATIKCETSPPSSAALRLEKLGHPALSQEEGKSALEDQGSNPSSSNSSQDSLHKGAKRKGIKSSIGRLFGKKEKGRLIQLSRDGATGHVLLTDSEFSMQEPMVPAKLGTQAEKDRRLKKKHQLLEDARRKGMPFAQWDGPTVVSWLELWVGMPAWYVAACRANVKSGAIMSALSDTEIQREIGISNALHRLKLRLAIQEMVSLTSPSAPPTSRTSSGNVWVTHEEMETLETSTKTDSEEGSWAQTLAYGDMNHEWIGNEWLPSLGLPQYRSYFMECLVDARMLDHLTKKDLRVHLKMVDSFHRTSLQYGIMCLKRLNYDRKELEKRREESQHEIKDVLVWTNDQVVHWVQSIGLRDYAGNLHESGVHGALLALDENFDHNTLALILQIPTQNTQARQVMEREFNNLLALGTDRKLDDGDDKVFRRAPSWRKRFRPREHHGRGGMLSASAETLPAGFRVSTLGTLQPPPAPPKKIMPEAHSHYLYGHMLSAFRD

SEQ ID NO: 7270 - protein, 497 aa, Homo sapiens
DVGGDRPWDSGNTQLPPRNPVKANAMFGAGDEDDTDFLSPSGGARLASLFGLDQAAAGHGNEFFQYTAPKQPKKGQGTAATGNQATPKTAPATMSTPTILVATAVHAYRYTNGQYVKQGKFGAAVLGNHTAREYRILLYISQQQPVTVARIHVNFELMVRPNNYSTFYDDQRQNWSIMFESEKAAVEFNKQVCIAKCNSTSSLDAVLSQDLIVADGPAVEVGDSLEVAYTGWLFQNHVLGQVFDSTANKDKLLRLKLGSGKVIKGWEDGMLGMKKGGKRLLIVPPACAVGSEGVIGWTQATDSILVFEVEVRRVKFARDSGSDGHSVSSRDSAAPSPIPGADNLSADPVVSPPTSIPFKSGEPALRTKSNSLSEQLAINTSPDAVKAKLISRMAKMGQPMLPILPPQLDSNDSEIEDVNTLQGGGQPVVTPSVQPSLHPAHPALPQMTSQAPQPSVTGLQAPSAALMQVSSLDSHSAVSGNAQSFQVTFYNRINYIL

SEQ ID NO: 7271 - protein, 153 aa, Homo sapiens
MNLAEICDNAKKGREYALLGNYDSSMVYYQGVMQQIQRHCQSVRDPAIKGKWQQVRQELLEEYEQVKSIVSTLESFKIDKPPDFPVSCQDEPFRDPAVWPPPVPAEHRAPPQIRRPNREVRPLRKEMAGVGARGPVGRAHPISKSEKPSTSRD

SEQ ID NO: 7272 - protein, 208 aa, Homo sapiens
MFQVPDSEGGRAGSRAMKPPGGESSNLFGSPEEATPSSRPNRMASNIFGPTEEPQNIPKRTNPPGGKGSGIFDESTPVQTRQHLNPPGGKTSDIFGSPVTATSRLAHPNKPTRNSRDRVAMFSFPFAQMSGVGRGLVLCEPGCSASPGRHDSCLETRAFQMAGRCLCGDEMGHPWPSLMCSPGLRGTGRGVRVGRWGRAWSLDQQPAS

SEQ ID NO: 7273 - protein, 196 aa, Homo sapiens
MPFSKEKYILDSSPEKLHKELEEELKLSSTDLRSHAWYHGRIPREVSETLVQRNGDFLIRDSLTSLGDYVLTCRWRNQALHFKINKVVVKAGESYTHIQYLFEQESFDHVPALVRYHVGSRKAVSEQSGAIIYCPVNRTFPLRYLEASYGLGQGSSKPASPVSPSGPKGSHMKRRSVTMTDGLTADKVTRSDGCPT

SEQ ID NO: 7274 - protein, 661 aa, Homo sapiens
MQANGAGGGGGGGGGGGGGGGGGGGQGQTPELACLSAQNGESSPSSSSSAGDLAHANGLLPSAPSAASNNSNSLNVNNGVPGGAAAASSATVAAASATTAASSSLATPELGSSLKKKKRLSQSDEDVIRLIGQHLNGLGLNQTVDLLMQESGCRLEHPSATKFRNHVMEGDWDKAENDLNELKPLVHSPHAIVVRGALEISQTLLGIIVRMKFLLLQQKYLEYLEDGKVLEALQVLRCELTPLKYNTERIHVLSGYLMCSHAEDLRAKAEWEGKGTASRSKLLDKLQTYLPPSVMLPPRRLQTLLRQAVELQRDRCLYHNTKLDNNLDSVSLLIDHVCSRRQFPCYTQQILTEHCNEVWFCKFSNDGTKLATGSKDTTVIIWQVDPDTHLLKLLKTLEGHAYGVSYIAWSPDDNYLVACGPDDCSELWLWNVQTGELRTKMSQSHEDSLTSVAWNPDGKRFVTGGQRGQFYQCDLDGNLLDSWEGVRVQCLWCLSDGKTVLASDTHQRIRGYNFEDLTDRNIVQEDHPIMSFTISKNGRLALLNVATQGVHLWDLQDRVLVRKYQGVTQGFYTIHSCFGGHNEDFIASGSEDHKVYIWHKRSELPIAELTGHTRTVNCVSWNPQIPSMMASASDDGTVRIWGPAPFIDHQNIEEECSSMDS

SEQ ID NO: 7275 - protein, 370 aa, Homo sapiens
MEKKKMVTQGNQEPTTTPDAMVQPFTTIPFPPPPQNGIPTEYGVPHTQDYAGQTGEHNLTLYGSTQAHGEQSSNSPSTQNGSLTTEGGAQTDGQQSQTQSSENSESKSTPKRLHVSNIPFRFRDPDLRQMFGQFGKILDVEIIFNERGSKGFGFVTFENSADADRAREKLHGTVVEGRKIEVNNATARVMTNKKMVTPYANGWKLSPVVGAVYGPELYAASSFQADVSLGNDAAVPLSGRGGINTYIPLISLPLVPGFPYPTAATTAAAFRGAHLRGRGRTVYGAVRAVPPTAIPAYPGVDMQPTDMHSLLLQPQPPLLQPLQPLTVTVMAGCTQPTPTMPLPLPLAMELALWRVYTEVATADLPPTEVT

SEQ ID NO: 7276 - protein, 115 aa, Homo sapiens
MPHLPLASFRPPFWGLRHSRGLPRFHSVSTQSEPHGSPISRRNREAKQKRLREKQATLEAEIAGESKSPAESIKAWRPKELVLYEIPTKPGEKKDVSGPLPPAYSPRYVEAAWYP

SEQ ID NO: 7277 - protein, 1012 aa, Homo sapiens
MLLKSIFIVYIFFYSISELSLDSTLHAVNLHCNNISKIEAIDHIWNLQHLDLSSNQISRIEGLNTLTKLCTLNLSCNLITKVEGLEELINLTRLNVSYNHIDDLSGLIPLHGIKHKLRYIDLHSNRIDSIHHLLQCMVGLHFLTNLILEKDGDDNPVCRLPGYRAVILQTLPQLRILDCKNIFGEPVNLTEINSSQLQCLEGLLDNLVSSDSPLNISEDEIIDRMPVITAPIDELVPLEQFASTPSDAVLTSFMSVCQSSEPEKNNHENDLQNEIKLQKLDDQILQLLNETSNSIDNVLEKDPRPKRDTDITSESDYGNRKECNRKVPRRSKIPYDAKTIQTIKHHNKNYNSFVSCNRKMKPPYLKELYVSSSLANCPMLQESEKPKTEIIKVDQSHSEDNTYQSLVEQLDQEREKRWRAEQAENKLMDYIDELHKHANEKEDIHSLALLTTDRLKEIIFRERNSKGQLEVMVHKLQNEIKKLTVELMKAKDQQEDHLKHLRTLEKTLEKMERQKRQQQAAQIRLIQEVELKASAADREIYLLRTSLHREREQAQQLHQLLALKEQEHRKELETREFFTDADFQDALAKEIAKEEKKHEQMIKEYQEKIDVLSQQYMDLENEFRIALTVEARRFQDVKDGFENVATELAKSKHALIWAQRKENESSSLIKDLTCMVKEQKTKLAEVSKLKQETAANLQNQINTLEILIEDDKQKSIQIELLKHEKVQLISELAAKESLIFGLRTERKVWGHELAQQGSSLAQNRGKLEAQIESLSRENECLRKTNESDSDALRIKCKIIDDQTETIRKLKDCLQEKDEHIKRLQEKITEIEKCTQEQLDEKSSQLDEVLEKLERHNERKEKLKQQLKGKEVELEEIRKAYSTLNRKWHDKGELLCHLETQVKEVKEKFENKEKKLKAERDKSIELQKNAMEKLHSMDDAFKRQVDAIVEAHQAEIAQLANEKQKCIDSANLKVHQIEKEMRELLEETCKNKKTMEAKIKQLAFALNEIQQDM

SEQ ID NO: 7278 - protein, 1556 aa, Homo sapiens
MSATSWFLVSSSGARHRLPRELIFVGREECELMLQSRSVDKQHAVINYDQDRDEHWVKDLGSLNGTFVNDMRIPDQKYVTLKLNDVIRFGYDSNMYVLERVQHRVPEEALKHEKYTSQLQVSVKGLAPKRSEALPEHTPYCEASNPRPEKGDRRPGTEAASYRTPLYGQPSWWGEDDGSTLPDAQRQGEPYPERPKGPVQQDGELHGFRAPAEPQGCSFRREPSYFEIPTKETPQPSQPPEVPAHEMPTKDAEAGGGGAAPVVQSHASFTIEFDDCSPGKMKIKDHITKFSLRQRRPPGKEATPGEMVSAETKVADWLVQNDPSLLHRVGPGDDRHSTKSDLPVHTRTLKGHKHEDGTQSDSEDPLAKAASAAGVPLEASGEQVRLQRQIKRDPQELLHNQQAFVIEFFDEDTPRKKRSQSFTHSPSGDPKADKRRGPTPADRDRPSVPAPVQAGGRSSGPQRAGSLKREKTEERLGSPSPASRTPARPFGSVGRRSRLAQDFMAQCLRESSPAARPSPEKVPPVLPAPLTPHGTSPVGPPTPPPAPTDPQLTKARKQEEDDSLSDAGTYTIETEAQDTEVEEARKMIDQVFGVLESPELSRASSATFRPVIRGDRDESDDGGVAQRMALLQEFASRPLGAAPQAEHQGLPVPGSPGGQKWVSRWASLADSYSDPGLTEDGLGRRGGEPEGSLPVRMRRRLPQLPSERADSPAGPESSRRSGPGPPELDSEQPSRLFGQEELDPDSLSDASGSDGGRGPEPGVEPQDSRRRSPQEGPTWSRGRRSPRAPGEPTPASFFIGDQNGDAVLSRKPLAAPGDGEGLGQTAQPSPPARDGVYVSANGRMVIQLRPGRSPEPDGPAPAFLRQESFTKEPASGPPAPGKPPHISSHPLLQDLAATRAARMDFHSQDTHLILKETETALAALEARLLSNSVDAECEGGSTPRPPEDALSGDSDVDTASTVSLRSGKSGPSPTTPQPLRAQKEMSPSPPAAQDPGGTALVSAREQSSERQHHPLGPTDMGRGEPVRRSAIRRGHRPRGSLDWPSEERGPVLAHLPSSDVMASNHETPEATGAGRLGSRARGSPAAPPPSPAAREEQSRSSASSQKGPQALTRSNSLSTPRPTRASRLRRARLGDASDTEAADGERGSLGNPEPVGRPAAEQAKKLSRLDILAMPRKRAGSFTGTSDPEAAPARTSFSGRSVELCCASRKPTMAEARAVSRKAANTATTTGPRQPFSRARSGSARYTSTTQTPRAGSSSRARSRAPGPRDTDDDEEEPDPYGFIVQTAEIAEIARLSQTLVKDVAILAQEIHDVAGDGDTLGSSEPAHSASLSNMPSTPASTISAREELVQRIPEASLNFQKVPPGSLNSRDFDQNMNDSCEDALANKTRPRNREEVIFDNLMLNPVSQLSQAIRENTEHLAEKMKILFQNTGRAWEDLEARINAENEVPILKTSNKEISSILKELRRVQKQLEVINAIVDPSGSLDLLTGNRSLASSAQPGLGKGRVAAQSPPSPASAEALLPALPLRNFPQRASCGPPSLPDPTFLPDAERFLI

SEQ ID NO: 7279 - protein, 231 aa, Homo sapiens
IILLLVPSEETDENDLILEVTAGVGGGLRHASASIGGSEAYRHMKFEGGVHRVQRVPKTEKQGRVHTSTMTVAILPQPTEINLVINPKDLRIDTKRASGAGGQHVNTTDSAVRIVHLPTGVVSECQQERSQLKNKELAMTKLRAKLYSMHLEEEINKRQNARKIQIGSKGRSEKIRTYNFPQNRVTDHRINKTLHDLETFMQGDYLLDELVQSLKEYADYESLVEIISQKV

SEQ ID NO: 7280 - protein, 160 aa, Homo sapiens; identical to SEQ ID NO: 6461

SEQ ID NO: 7281 - protein, 140 aa, Homo sapiens
MQFGELLAAVRKAQANVMLFLEEKEQAALSQANGIKAHLEYRSAEMEKSKQELETMAAISNTVQFLEMCMTSRSTRTQHTSISGCRRRTARSPTPRPGSIPTRTSPAGSCTGGRCCPSRVCTCTGTILRWRSSGQAPMLA

SEQ ID NO: 7282 - protein, 272 aa, Homo sapiens
MASSNTVLMRLVASAYSIAQKAGMIVRRVIAEGDLGIVEKTCATDLQTKADRLAQMSICSSLARKFPKLTIIGEELVVWVDPLDGTKEYTEGLLDNVTVLIGIAYEGKAIAGVINQPYYNYEAGPDAVLGRTIWGVLGLGAFGFQLKEVPAGKHIITTTRSHSNKLVTDCVAAMNPDAVLRVGGAGNKIIQLIEGKASAYVFASPGCKKWDTCAPEVILHAVGGKLTDIHGNVLQYHKDVKHMNSAGVLATLRNYDYYASRVPESIKNALVP

SEQ ID NO: 7283 - protein, 201 aa, Homo sapiens
MESNHKSGDGLSGTQKEAALRALVQRTGYSLVQENGQRKYGGPPPGWDAAPPERGCEIFIGKLPRDLFEDELIPLCEKIGKIYEMRMMMDFNGNNRGYAFVTFSNKVEAKNAIKQLNNYEIRNGRLLGVCASVDNCRLFVGGIPKTKKREEILSEMKKVTEGVVDVIVYPSAADKTKNRGFAFVEYESHRAAAMARRKLLP

SEQ ID NO: 7284 - protein, 634 aa, Homo sapiens
MALSKRELDELKPWIEKTVKRVLGFSEPTVVTAALNCVGKGMDKKKAADHLKPFLDDSTLRFVDKLFEAVEEGRSSRHSKSSSDRSRKRELKIKQMMEAATRQIEERKKQLSFISPPTPQPKTPSSSQPERLPIGNTIQPSQAATFMNDAIEKARKAAELQARIQAQLALKPGLIGNANMVGLANLHAMGIAPPKVELKDQTKPTPLILDEQGRTVDATGKEIELTHRMPTLKANIRAVKREQFKQQLKEKPSEDMESNTFFDPRVSIAPSQRQRRTFKFHDKGKFEKIAQRLRTKAQLEKLQAEISQAARKTGIHTSTRLALIAPKKELKEGDIPEIEWWDSYIIPNGFDLTEENPKREDYFGITNLVEHPAQLNPPVDNDTPVTLGVYLTKKEQKKLRRQTRREAQKELQEKVRLGLMPPPEPKVRISNLMRVLGTEAVQDPTKVEAHVRAQMAKRQKAHEEANAARKLTAEQRKVKKIKKLKEDISQGVHISVYRVRNLSNPAKKFKIEANAGQLYLTGVVVLHKDVNVVVVEGGPKAQKKFKRLMLHRIKWDEQTSNTKGDDDEESDEEAVKKTNKCVLVWEGTAKDRSFGEMKFKQCPTENMAREHFKKHGAEHYWDLALSESVLESTD

SEQ ID NO: 7285 - protein, 1063 aa, Homo sapiens
MPHLPLASFRPPFWGLRHSRGLPRFHSVSTQSEPHGSPISRRNREAKQKRLREKQATLEAEIAGESKSPAESIKAWRPKELVLYEIPTKPGEKKDVSGPLPPAYSPRYVEAAWYPWWVREGFFKPEYQARLPQATGETFSMCIPPPNVTGSLHIGHALTVAIQDALVRWHRMRGDQVLWVPGSDHAGIATQAVVEKQLWKERGVRRHELSREAFLREVWQWKEAKGGEICEQLRALGASLDWDRECFTMDVGSSVAVTEAFVRLYKAGLLYRNHQLVNWSCALRSAISDIEVENRPLPGHTQLRLPGCPTPVSFGLLFSVAFPVDGEPDAEVVVGTTRPETLPGDVAVAVHPDDSRYTHLHGRQLRHPLMGQPLPLITDYAVQPHVGTGAVKVTPAHSPADAEMGARHGLSPLNVIAEDGTMTSLCGDWLQGLHRFVAREKIMSVLSEWGLFRGLQNHPMVLPICSRSGDVIEYLLKNQWFVRCQEMGARAAKAVESGALELSPSFHQKNWQHWFSHIGDWCVSRQLWWGHQIPAYLVVEDHAQGEEDCWVVGRSEAEAREVAAELTGRPGAELTLERDPDVLDTWFSSALFPFSALGWPQETPDLARFYPLSLLETGSDLLLFWVGRMVMLGTQLTGQLPFSKVLLHPMVRDRQGRKMSKSLGNVLDPRDIISGVEMQVLQEKLRSGNLDPAELAIVAAAQKKDFPHGIPECGTDALRFTLCSHGVQAGDLHLSVSEVQSCRHFCNKIWNALRFILNALGEKFVPQPAEELSPSSPMDAWILSRLALAAQECERGFLTRELSLVTHALHHFWLHNLCDVYLEAVKPVLWHSPRPLGPPQVLFSCADLGLRLLAPLMPFLAEELWQRLPPRPGCPPAPSISVAPYPSACSLEHWRQPELERRFSRVQEVVQVLRALRATYQLTKARPRVLLQSSEPGDQGLFEAFLEPLGTLGYCGAVGLLPPGAAAPSGWAQAPLSDTAQVYMELQGLVDPQIQLPLLAARRYKLQKQLDSLTARTPSEGEAGTQRQQKLSSLQLELSKLDKAASHLRQLMDEPPAPGSPEL

SEQ ID NO: 7286 - protein, 705 aa, Homo sapiens
MIDSVKLRRDSAADFFSHYEYLCALQNSVPLPAVRACLREGVLDFNADRLRGVDWAPLLSTLKINKDLPLVSIKSFFQPWLGDTGSDMNKFCRSRVPAIRYKDVTFQLCKALKGCLSISSVLKNLELNGLILRERDLTILAKGLNKSASLVHLSLANCPIGDGGLEIICQGIKSSITLKTVNFTGCNLTWQGADHMAKILKYQTMRRHEETWAESLRYRRPDLDCMAGLRRITLNCNTLIGDLGACAFADSLSEDLWLRALDLQQCGLTNEGAKALLEALETNTTLVVLDIRKNPLIDHSMMKAVIKKVLQNGRSAKSEYQWITSPSVKEPSKTAKQKRRTIILGSGHKGKATIRIGLATKKPVSSGRKHSLGKEYYAPAPLPPGVSGFLPWRTAERAKRHRGFPLIKTRDICNQLQQPGFPVTVTVESPSSSEVEEVDDSSESVHEVPEKTSIEQEALQEKLEECLKQLKEERVIRLKVDKRVSELEHENAQLRNINFSLSEALHAQSLTNMILDDEGVLGSIENSFQKFHAFLDLLKDAGLGQLATMAGIDQSDFQLLGHPQMTSTVSNPPKEEKKALEDEKPEPKQNALGQMQNIQVSICMQSAYNEGTLMKFQKITGDARIPLPLDSFPVPVSTPEGLGTSSNNLGVPATEQRQESFEGFIARMCSPSPDATSGTGSQRKEEELSRNSRSSSEKKTKTGSH

SEQ ID NO: 7287 - protein, 428 aa, Homo sapiens
MAWQSRKGGHFREVAMQWKVTLTSRWGLLRHCQVLAGLLHLGNIQFAASEDEAQPCQPMDDAKYSVRTAASLLGLPEDVLLEMVQIRTIRAGRQQQVFRKPCARAECDTRRDCLAKLIYARLFDWLVSVINSSICADTDSWTTFIGLLDVYGFESFPDNSLEQLCINYANEKLQQHFVAHYLRAQQEEYAVEGLEWSFINYQDNQPCLDLIEGSPISICSLINEECRLNRPSSAAQLQTRIETALAGSPCLGHNKLSREPSFIVVHYAGPVRYHTAGLVEKNKDPIPPELDGVEEKHFSQAPCSLSTSPLQTRLLEAIIRLWPLGLVLANTAMGVGSFQRKLVVWACLQLPRGSPSSYTVQTAQDQAGVTSIRALPQGSIKFHCRKSPLRYADICPEPSPYSITGFNQILLERHRLIHVTSSAFTGLG

SEQ ID NO: 7288 - protein, 308 aa, Homo sapiens; identical to SEQ ID NO: 5215

SEQ ID NO: 7289 - protein, 142 aa, Homo sapiens
MSLHGKRKEIYKYEAPWTVYAMNWSVRPDKRFRLALGSFVEEYNNKVVILDVRVPCTPVARLNNHRACVNGIAWAPHSSCHICTAADDHQALIWDIQQMPRAIEDPILAYTAEGEINNVQWASTQPDWIAICYNNCLEILRV

SEQ ID NO: 7290 - protein, 410 aa, Homo sapiens
MAAPSPSGGGGSGGGSGSGTPGPVGSPAPGHPAVSSMQGFQINFCEKAQSKRKALKLNFANPPFKSTARFTLNPNPTGVQNPHIERLRTHSIESSGKLKISPEQHWDFTAEDLKDLGEIGRGAYGSVNKMVHKPSGQIMAVKRIRSTVDEKEQKQLLMDLDVVMRSSDCPYIVQFYGALFREGDCWICMELMSTSFDKFYKYVYSVLDDVIPEEILGKITLATVKALNHLKENLKIIHRDIKPSNILLDRSGNIKLCDFGISGQLVDSIAKTRDAGCRPYMAPERIDPSASRQGYDVRSDVWSLGITLYELATGRFPYPKWNSVFDQLTQVVKGDPPQLSNSEEREFSPSFINFVNLCLTKDESKRPKYKELLKHPFILMYEERAVEVACYVCKILDQMPATPSSPMYVD

SEQ ID NO: 7291 - protein, 228 aa, Homo sapiens
MQLAVVSEEQDQNLNRLICWILMQFIYISSDYVFDGTNPPYREEDIPAPLNLYGKTKLDGEKAVLENNLGAAVLRIPILYGEVEKLEESAVTVMFDKVQFSNKSANMDHWQQRFPTHVKDVATVCRQLAEKRMLDPSIKGTFHWSGNEQMTKYEMACAIADAFNLPSSHLRPITDSPVLGAQRPRNAQLDCSKLETLGIGQRTPFRIGIKESLWPFLIDKRWRQTVFH

SEQ ID NO: 7292 - protein, 366 aa, Homo sapiens
MSAANPETPNSTISREASTQSSSAAASQGWVLPEGKIVPNTVFVGGIDARMDETEIGSCFGRYGSVKEVKIITNRTGVSKGYGFVSFVNDVDVQKIVGSQIHFHGKKLKLGPAIRKQKLCARHVQPRPLVVNPPPPPQFQNVWRNPNTETYLQPQITPNPVTQHVQAYSAYPHSPGQVITGCQLLVYNYQEYPTYPDSAFQVTTGYQLPVYNYQPFPAYPSSPFQVTAGYQLPVYNYQAFPAYPSSPFQVTTGYQLPVYNYQAFPAYPSSPFQVTTGYQLPVYNYQAFPAYPSSPFQVTTGYQLPVYNYQAFPAYPNSAVQVTTGYQFHVYNYQMPPQCPVGEQRRNLWTEAYKWWYLVCLIQRRD

SEQ ID NO: 7293 - protein, 101 aa, Homo sapiens
MASAGTQHYSIGLRQKNSFKQSGPSGTVPATPPEKPSEGRVWPQAHQQVKPIWKLEKKQVETLSAGLGPGLLGVPPQPAYFFCPSTLCSSGTTAVIAGHSS

SEQ ID NO: 7294 - protein, 706 aa, Homo sapiens
MIDSVKLRRDSAADFFSHYEYLCALQNSVPLPAVRACLREGVLDFNADRLRGVDWAPLLSTLKINKDLPLVSIKSFFQPWLGDTGSDMNKFCRSRVPAIRYKDVTFQLCKALKGCLSISSVLKNLELNGLILRERDLTILAKGLNKSASLVHLSLANCPIGDGGLEIICQGIKSSITLKTVNFTGCNLTWQGADHMAKILKYQTMRRHEETWAESLRYRRPDLDCMAGLRRITLNCNTLIGDLGACAFADSLSEDLWLRALDLQQCGLTNEGAKALLEALETNTTLVVLDIRKNPLIDHSMMKAVIKKVLQNGRSAKSEYQWITSPSVKEPSKTAKQKRRTIILGSGHKGKATIRIVGLATKKPVSSGRKHSLGKEYYAPAPLPPGVSGFLPWRTAERAKRHRGFPLIKTRDICNQLQQPGFPVTVTVESPSSSEVEEVDDSSESVHEVPEKTSIEQEALQEKLEECLKQLKEERVIRLKVDKRVSELEHENAQLRNINFSLSEALHAQSLTNMILDDEGVLGSIENSFQKFHAFLDLLKDAGLGQLATMAGIDQSDFQLLGHPQMTSTVSNPPKEEKKALEDEKPEPKQNALGQMQNIQFQKITGDARIPLPLDSFPVPVSTPEGLGTSSNNLGVPATEQRQESFEGFIARMCSPSPDATSGTGSQRKEEELSRNSRSSSEKKTKTGEYTKKHSDKQHPGKDLHS

SEQ ID NO: 7295 - protein, 643 aa, Homo sapiens
MACQQSRYHSFSSASRLQPRPSGVTIDESFLTEDKSTQNRKLLQKRRTLELPAAPLSHCQAPVLGGTGKLPTQGAPPAGPGHRFHPGTKAAAHQREKIRALEPLKAKLVTVNEDCNERILAMRAEEKYEISLLKKEKMNLLKLIDKKNEEKISLQSEVTKLRKNLAEEYLHYLSERDACKILIADLNELRYQREDMSLAQSPGIWGEDPVKLTLALKMTRQDLTRTQMELNNMKANFGDVVPRRDFEMQEKTNKDLQEQLDTLRASYEEVRKEHEILMQLHMSTLKERDQFFSELQEIQRTSTPRPDWTKCKDVVAGGPERWQMLAEGKNSDQLVDVLLEEIGSGLLREKDFFPGLGYGEAIPAFLRFDGLVENKKPSKKDVVNLLKDAWKERLAEEQKETFPDFFFNFLEHRFGPSDAMAWAYTIFENIKIFHSNEVMSQFYAVLMGKRSENVYVTQKETVAQLLKEMTNADSQNEGLLTMEQFNTVLKSTFPLKTEEQIQELMEAGGWHPSSSNADLLNYRSLFMEDEEGQSEPFVQKLWEQYMDEKDEYLQQLKQELGIELHEEVTLPKLRGGLMTIDPSLDKQTVNTYMSQAFQLPESEMPEEGDEKEEAVVEILQTALERLQVIDIRRVGPREPEPAS

SEQ ID NO: 7296 - protein, 157 aa, Homo sapiens
MATSAPLRSLEEEVTCSICLDYLRDPVTIDCGHVFCRSCTTDVRPISGSRPVCPLCKKPFKKENIRPVWQLASLVENIERLKVDKGRQPGEVTREQQDAKLCERHREKLHYYCEDDGKLLCVMCRESREHRPHTAVLMEKAAQPHREKILNHLSTLR

SEQ ID NO: 7297 - protein, 312 aa, Homo sapiens
MAQPYPPAQYPPPPQNGIPAEYAPPPPHPTQDYSGQTPVPTEHGMTLYTPAQTHPEQPGSEASTQPIAGTQTVPQTDEAAQTDSQPLHPSDPTEKQQPKRLHVSNIPFRFRDPDLRQMFGQFGKILDVEIIFNERGSKGFGFVTFETSSDADRAREKLNGTIVEGRKIEVNNATARVMTNKKTGNPYTNGWKLNPVVGAVYGPEFYAVTGFPYPTTGTAVAYRGAHLRGRGRAVYNTFRAAPPPPPIPTYGAVVYQDGFYGAEIYGGYAAYRYAQPAAAAAAYSDSYGRVYAAADPYHHTIGPAATYSIGTM

SEQ ID NO: 7298 - protein, 99 aa, Homo sapiens
MASLLQDQLTTDQDLLLMQEGMPMRKVRSKSWKKLRYFRLQNDGMTVWHARQARGSAKPSFSISDVETIRNGHDSELLRSLAEELPLEQGFTIVFHGRR

SEQ ID NO: 7299 - protein, 539 aa, Homo sapiens; identical to SEQ ID NO: 5502

SEQ ID NO: 7300 - protein, 159 aa, Homo sapiens
MATSAPLRSLEEEVTCSICLDYLRDPVTIDCGHVFCRSCTTDVRPISGSRPVCPLCKKPFKKENIRPVWQLEKILNHLSTLRRDRDKIQGFQAKGEADILAALKKLQDQRQYIVAEFEQGHQFLREREEHLLEQLAKLEQELTEGREKFKSRGVGELAR

SEQ ID NO: 7301 - protein, 192 aa, Homo sapiens; identical to SEQ ID NO: 6709

SEQ ID NO: 7302 - protein, 102 aa, Homo sapiens
MHNRSQGFFFSSCHPQNHVSYGCQSPSFIFCRCQSLNFVSRTCYPLSYFSYGNQTIGSISNSFRSLNYVSHSFQPISFMHSSFQPACSDFVGWQSPFLRRTC

SEQ ID NO: 7303 - protein, 240 aa, Homo sapiens
MDLVRLGLERGETAKEALDVIVSLLEEHGQGGNYFEDANSCHSFQSAYLIVDRDEAWVLETIGKYWAAEKVTESITVQTMMNTLRDKASGVCIDSEFFLTTASGVSVLPQNRSSPCIHYFTGTPDPSRSIFKPFIFVDDVKLVPKTQSPCFGDDDPAKKEPRFQEKPDRRHELYKAHEWARAIIESDQEQGRKLRSTMLELEKQGLEAMEEILTSSEPLDPAEVGDLFYDCVDTEIKFFK

SEQ ID NO: 7304 - protein, 299 aa, Homo sapiens
  VARIANT 1: note = X can be any amino acid
XREEDIYQFAYCYPYTYTRFQHYLDSLQKRNMDYFFREQLGQSVQQRKLDLLTITSPDNLREGAEQKVVFITGRVHPGETPSSFVCQGIIDFLVSQHPIACVLREYLVFKIAPMLNPDGVYLGNYRCSLMGFDLNRHWLDPSPWVHPTLHGVKQLIVQMYNDPKTSLEFYIDIHAHSTMMNGFMYGNIFEDEERFQRQAIFPKLLCQNAEDFSYSSTSFNRDAVKAGTGRRFLGGLLDHTSYCYTLEVSFYSYIISGTTAAVPYTEEACILSPHPALGQPSSSREYPSLTGQELGPQLR

SEQ ID NO: 7305 - protein, 346 aa, Homo sapiens
MAAAEPASSGQQAPAGQGQGQRPPPQPPQAQAPQPPPPPQLGGAGGGSSRHEKSLGLLTTKFVSLLQEAKDGVLDLKAAADTLAVRQKRRIYDITNVLEGIDLIEKKSKNSIQWKGVGAGCNTKEVIDRLRYLKAEIEDLELKERELDQQKLWLQQSIKNVMDDSINNRFSYVTHEDICNCFNGDTLLAIQAPSGTQLEVPIPEMGQNGQKKYQINLKSHSGPIHVLLINKESSSSKPVVFPVPPPDDLTQPSSQSLTPVTPQKSSMATQNLPEQHVSERSQALQQTSATDISSAGSISGDIIDELMSSDVFPLLRLSPTPADDYNFNLDDNEGVCDLFDVQILNY

SEQ ID NO: 7306 - protein, 131 aa, Homo sapiens
MSKRYLQKATKGKLLIIIFIVTLWGKVVSSANHHKAHHVKTGTCEVVALHRCCNKNKIEERSQTVKCSCFPGQVAGTTRAAPSCVDASIVEQKWWCHMQPCLEGEECKVLPDRKGWSCSSGNKVKTTRVTH

SEQ ID NO: 7307 - protein, 101 aa, Homo sapiens
MPFFGNTFSPKKTPPRKSASLSNLHSLDRSTREVELGLEYGSPTMNLAGQSLKFENGQWIAETGVSGGVDRREVQRLRRRNQQLEEENNLLRLKVDILLDM

SEQ ID NO: 7308 - protein, 130 aa, Homo sapiens
MDISKGLPGMQGGLHIWISENRKMVPVPEGAYGNFFEEHCYVILHVPQSPKATQGASSDLHYWVGKQAGAEAQGAAEAFQQRLQDELGGQTVLHREAQGHESDCFCSYFRPGIIYRKGGLASDLKHVETN

SEQ ID NO: 7309 - protein, 16 aa, Homo sapiens
MCTSETFQALDTFEAR

SEQ ID NO: 7310 - protein, 1850 aa, Homo sapiens
MESNFNQEGVPRPSYVFSADPIARPSEINFDGIKLDLSHEFSLVAPNTEANSFESKDYLQVCLRIRPFTQSEKELESEGCVHILDSQTVVLKEPQCILGRLSEKSSGQMAQKFSFSKVFGPATTQKEFFQGCIMQPVKDLLKGQSRLIFTYGLTNSGKTYTFQGTEENIGILAALNVLFDSLQERLYTKMNLKPHRSREYLRLSSEQEKEEIASKSALLRQIKEVTVHNDSDDTLYGSLTNSLNISEFEESIKDYEQANLNMANSIKFSVWVSFFEIYNEYIYDLFVPVSSKFQKRKMLRLSQDVKGYSFIKDLQWIQVSDSKEAYRLLKLGIKHQSVAFTKLNNASSRSHSIFTVKILQIEDSEMSRVIRVSELSLCDLAGSERTMKTQNEGERLRETGNINTSLLTLGKCINVLKNSEKSKFQQHVPFRESKLTHYFQSFFNGKGKICMIVNISQCYLAYDETLNVLKFSAIAQKVCVPDTLNSSQEKLFGPVKSSQDVSLDSNSNSKILNVKRATISWENSLEDLMEDEDLVEELENAEETQNVETKLLDEDLDKTLEENKAFISHEEKRKLLDLIEDLKKKLINEKKEKLTLEFKIREEVTQEFTQYWAQREADFKETLLQEREILEENAERRLAIFKDLVGKCDTREEAAKDICATKVETEETHNYVGFEDIIDSLQDNVADIKKQAEIAHLYIASLPDPQEATACLELKFNQIKAELAKTKGELIKTKEELKKRENESDSLIQELETSNKKIITQNQRIKELINIIDQKEDTINEFQNLKSHMENTFKCNDKADTSSLIINNKLICNETVEVPKDSKSKICSERKRVNENELQQDEPPAKKGTTSAASSRRLRKLISKPVNRTRQTEGHSLVSIHVSSAITEDQKKSEEVRPNIAEIEDIRVLQENNEGLRAFLLTIENELKNEKEEKAELNKQIVHFQQELSLSEKKNLTLSKEVQQIQSNYDIAIAELHVQKSKNQEQEEKIMKLSNEIETATRSITNNVSQIKLMHTKIDELRTLDSVSQISNIDLLNLRDLSNGSEEDNLPNTQLDLLGNDYLVSKQVKEYRIQEPNRENSFHSSIEAIWEECKEIVKASSKKSHQIEELEQQIEKLQAEVKGYKDENNRLKEKEHKNQDDLLKEKETLIQQLKEELQEKNVTLDVQIQHVVEGKRALSELTQGVTCYKAKIKELETILETQKVECSHSAKLEQDILEKESIILKLERNLKEFQEHLQDSVKNTKDLNVKELKLKEEITQLTNNLQDMKHLLQLKEEEEETNRQETEKLKEELSASSARTQNLKADLQARGSEEDYADLKEKLTDAKKQIKQVQKEVSVMRDEDKLLRIKINELEKKKNQCSQELDMKQRTIQQLKEQLNNQKVEEAIQQYERACKDLNVKEKIIEDMRMTLEEQEQTQVEQDQVLEAKLEEVERLATELEKWKEKCNDLETKNNQRSNKEHENNTDVLGKLTNLQDELQESEQKYNADRKKWLEEKMMLITQAKEAENIRNKEMKKYAEDRERFFKQQNEMEILTAQLTEKDSDLQKWREERDQLVAALEIQLKALISSNVQKDNEIEQLKRIISETSKIETQIMDIKPKRISSADPDKLQTEPLSTSFEISRNKIEDGSVVLDSCEVSTENDQSTRFPKPELEIQFTPLQPNKMAVKHPGCTTPVTVKIPKARKRKSNEMEEDLVKCENKKNATAANLKFPISDDRNSSVKKEQKVAIRPSSKKTYSLRSQASIIGVNLATKKKEGTLQKFGDFLQHSPSILQSKAKKIIETMSSSKLSNVEASKENVSQPKRAKRKLYTSEISSPIDISGQVILMDQKMKESDHQIIKRRLRTKTAK

SEQ ID NO: 7311 - protein, 508 aa, Homo sapiens; identical to SEQ ID NO: 6586

SEQ ID NO: 7312 - protein, 324 aa, Homo sapiens
MFIGGLSWQTSPDSLRDYFSKFGEIRECMVMRDPTTKRSRGFGFVTFADPASVDKVLGQPHHELDSKTIDPKVAFPRRAQPKMVTRTKKIFVGGLSANTVVEDVKQYFEQFGKVEDAMLMFDKTTNRHRGFGFVTFENEDVVEKVCEIHFHEINNKMVECKKAQPKEVMFPPGTRGRARGLPYTMDAFMLGMGMLGYPNFVATYGRGYPGFAPSYGYQFPGFPAAAYGPVAAAAVAAARGSVLNSYSAQPNFGAPASPAGSNPARPGGFPGANSPGPVADLYGPASQDSGVGNYISAASPQPGSGFGHGIAGPLIATAFTNGYH

SEQ ID NO: 7313 - protein, 109 aa, Homo sapiens
  VARIANT 1: note = X can be any amino acid
XHKPCYGALFGPRGVNIGGVGSYLYNPPTPSPGCTTPLSPSSFSPPRAAGLPQGKKTEKVMSLGRNWHRPCLRCQRCHKTLTAGSHAEHDGVPYCHVPCYGYLFGPKAL

SEQ ID NO: 7314 - protein, 136 aa, Homo sapiens
MTEDSQRNFRSVYYEKVGFRGVEEKKSLEILLKDDRLDTEKLCTFSQRFPLPSMYRALVWKVLLGILPPHHESHAKVMMYRKEQYLDVLHALKVVRFVSDATPQAEVYLRMYQLESGKLPRSPSFPLEPDDEVFLA

SEQ ID NO: 7315 - protein, 561 aa, Homo sapiens
MASQFCLPESPCLSPPPLSPLALAPSSAIRDQRTATKWVAMIPQKNQTASGDSLDVRVPSKPCLMKQKKSPCLWEIQKLQEQREKRRRLQQEIRARRALDVNTRNPNYEIMHMIEEYRRHLDSSKISVLEPPQEHRICVCVRKRPLNQRETTLKDHAFDDKASNELVYQFTAQPLVESIFRKGMATCFAYGQTGSGKTYTMGGDFSGTAQDCSKGIYALVAQDVFLLLRNSTYEKLDLKVYGTFFEIYGGKVYDLLNWKKKLQVLEDGNQQIQVVGLQEKEVCCVEEVLNLVEIGNSCRTSRQTPVNAHSSRSHAVFQIILKSGRIMHGKFSLVDLAGNERGADTTKASRKRQLEGAEINKSLLALKECILALGQNKPHTPFRASKLTLVLRDSFIGQNSSTCMIATISPGMTSCENTLNTLRYANRVKKLNVDVRPYHRGHYPIGHEAPRMLKSHIGNSEMSLQRDEFIKIPYVQSEEQKEIEEVETLPTLLGKDTTISGKGSSQWLENIQERAGGVHHDIDFCIARSLSILEQKIDALTEIQKKLKLLLADLHVKSKVE

SEQ ID NO: 7316 - protein, 124 aa, Homo sapiens
  VARIANT 1: note = X can be any amino acid
XSACIGNCSTALEELTDDMTEDFLPVLREYILYSDSMKSVLKKRDQVQAEYEAKLEAVALRKEDRPKVPADVEKCQDRMECFNADLKADMERWQNNKRQDFRQLLMGMADKNIQYYEKSIADLK

SEQ ID NO: 7317 - protein, 248 aa, Homo sapiens; identical to SEQ ID NO: 7249

SEQ ID NO: 7318 - protein, 374 aa, Homo sapiens
MDFNMKKLASDAGIFFTRAVQFTEEKFGQAEKTELDAHFENLLARADSTKNWTEKILRQTEVLLQPNPSARVEEFLYEKLDRKVPSRVTNGELLAQYMADAASELGPTTPYGKTLIKVAEAEKQLGAAERDFIHTASISFLTPLRNFLEGDWKTISKERRLLQNRRLDLDACKARLKKAKAAEAKATLWNDEVDKAEQELRVAQTEFDRQAEVTRLLLEGISSTHVNHLRCLHEFVKSQTTYYAQCYRHMLDLQKQLGRFPGTFVGTTEPASPPLSSTSPTTAAATMPVVPSVASLAPPGEASLCLEEVAPPASGTRKARVLYDYEAADSSELALLADELITVYSLPGMDPDWLIGERGNKKGKVPVTYLELLS

SEQ ID NO: 7319 - protein, 395 aa, Homo sapiens; identical to SEQ ID NO: 6506

SEQ ID NO: 7320 - protein, 376 aa, Homo sapiens
MEKKKMVTQGNQEPTTTPDAMVQPFTTIPFPPPPQNGIPTEYGVPHTQDYAGQTGEHNLTLYGSTQAHGEQSSNSPSTQNGSLTTEGGAQTDGQQSQTQSSENSESKSTPKRLHVSNIPFRFRDPDLRQMFGQFGKILDVEIIFNERGSKGFGFVTFENSADADRAREKLHGTVVEGRKIEVNNATARVMTNKKMVTPYANGWKLSPVVGAVYGPELYAASSFQADVSLGNDAAVPLSGRGGINTYIPLIIPGFPYPTAATTAAAFRGAHLRGRGRTVYGAVRAVPPTAIPAYPGVVYQDGFYGADLYGGYAAYRYAQPATATAATAAAAAAAAYSDGYGRVYTADPYHALAPAASYGVGAVASLYRGGYSRFAPY

SEQ ID NO: 7321 - protein, 545 aa, Homo sapiens
MGTPWRPPSRRPWRWPTGCTRKTCGPPTWSLERTRSWLSGREHSVFTGVAIVHCSSKDHQLDTRVSEFYEETKVKFSELSEELLWEYVHSGEPMDKAGGYGIQALGGMLVESVHGDFLNVVGFPLNHFCKQLVKLYYPPRPEDLRRSVKHDSIPAADTFEDLSDVEGGGSEPTQRDAGSRDEKAEAGEAGQATAEAECHRTRETLPPFPTRLLELIEGFMLSKGLLTACKLKVFDLLKDEAPQKAADIASKVDASACGMERLLDICAAMGLLEKTEQGYSNTETANVYLASDGEYSLHGFIMHNNDLTWNLFTYLEFAIREGTNQHHRALGKKAEDLFQDAYYQSPETRLRFMRAMHGMTKLTACQVATAFNLSRFSSACDVGGCTGALARELAREYPRMQVTVFDLPDIIELAAHFQPPGPQAVQIHFAAGDFFRDPLPSAELYVLCRILHDWPDDKVHKLLSRVAESCKPGAGLLLVETLLDEEKRVAQRALMQSLNMLVQTEGKERSLGEYQCLLELHGFHQVQVVHLGGVLDAILATKVAP

SEQ ID NO: 7322 - protein, 206 aa, Homo sapiens
MSQTSLKQKKNEPGMRSSKESLEAEKRKESDKTGVRLSNQMRRAVNPNHSLRCCPFQGHSSCRRCLCAAEGTALGPCHTIRIYIHMCLLWEQGQQITMMRVSRDHTTDSGGEPQTTWGSQESSLRKTDSRGYLVRSQWSRISRSPSTKAPSIDEPRSRNTSAKLPSSSTSSRTPSTSPSLHDSSPPPLSGQPSLQPPASPQLPRSL

SEQ ID NO: 7323 - protein, 137 aa, Homo sapiens
MAPGTPKSLLLSASIKREGESPTASPHSSATDDLHHSDRYQTFLRVRANRQTRLNARIGKMKRRKQDEGQVCPLCNRPLAGSEQEMSRHVEHCLSKREGSCMAEDDAVDIEHENNNRFEEYEWCGQKRIRATTLLEG

SEQ ID NO: 7324 - protein, 189 aa, Homo sapiens
MIPICPVVSFTYVPSRLGEDAKMATGNYFGFTHSGAAAAAAAAQYSQQPASGVAYSHPTTVASYTVHQAPVAAHTVTAAYAPAAATVAVARPAPVAVAAAATAAAYGGYPTAHTATDYGYTQRQQEAPPPPPPATTQNYQDSYSYVRSTAPAVAYDSKQYYQQPAATEAGSSSSCCCCCNSCLDRDHLY

SEQ ID NO: 7325 - protein, 128 aa, Homo sapiens
MDADSDVALDILITNVVCVFRTRCHLNLRKIALEGANVIYKRDVGKVLMKLRKPRITATIWSSGKIICTGATSEEEAKFGARRLARSLQKLGFQVIFTDFKVVNVLAVCNMPFEIRLPEFTKNNRPHA

SEQ ID NO: 7326 - protein, 126 aa, Homo sapiens
MWTARGPFRRDRWSSEDEEAAGPSQALSPLLSDTRKIVSEGELDQLAQIRPLIFNFHEQTAIKDCLKILEEKTAAYDIMQEFMALELKNLPGEFNSGNQPSNREKNRYRDILPFQHHGYSGPNERT

SEQ ID NO: 7327 - protein, 303 aa, Homo sapiens
EDEYIQSHNFDSAMKVTSQGQPSPVEPRGPFYFCRLLLDDLGMNSWDRRKNFHLLKKNSKLLRELKNLDSRQCRETHKIAVFYIAEGQEDKCSILSNERGSQAYEDFVAGLGWEVDLSTHCGFMGGLQRNGSTGQTAPYYATSTVEVIFHVSTRMPSDSDDSLTKKLRHLGNDEVHIVWSEHSRDYRRGIIPTAFGDVSIIIYPMKNHMFFIAITKKPEVPFFGPLFDGAIVSGKLLPSLVCATCINASRAVKCLIPLYQSFYEERALYLEAIIQNHREVMTFEDFAAQVFSPSPSYSLSGTD

SEQ ID NO: 7328 - protein, 960 aa, Homo sapiens
MEVQVSQASLGFELTSVEKSLREWSRLSREVIAWLCPSSPNFILNFPPPPSASSVSMVQLFSSPFGYQSPSGHSEEEREGNMKSAKPQVNHSQHGESQRALSPLQSTLSSAASPSQAYETYIENGLICLKHKIRNIEKKKLKLEDYKDRLKSGEHLNPDQLEAVEKYEEVLHNLEFAKELQKTFSGLSLDLLKAQKKAQRREHMLKLEAEKKKLRTILQVQYVLQNLTQEHVQKDFKGGLNGAVYLPSKELDYLIKFSKLTCPERNESLSVEDQMEQSSLYFWDLLEGSEKAVVGTTYKHLKDLLSKLLNSGYFESIPVPKNAKEKEVPLEEEMLIQSEKKTQLSKTESVKESESLMEFAQPEIQPQEFLNRRYMTEVDYSNKQGEEQPWEADYARKPNLPKRWDMLTEPDGQEKKQESFKSWEASGKHQEVSKPAVSLEQRKQDTSKLRSTLPEEQKKQEISKSKPSPSQWKQDTPKSKAGYVQEEQKKQETPKLWPVQLQKEQDPKKQTPKSWTPSMQSEQNTTKSWTTPMCEEQDSKQPETPKSWENNVESQKHSLTSQSQISPKSWGVATASLIPNDQLLPRKLNTEPKDVPKPVHQPVGSSSTLPKDPVLRKEKLQDLMTQIQGTCNFMQESVLDFDKPSSAIPTSQPPSATPGSPVASKEQNLSSQSDFLQEPLQATSSPVTCSSNACLVTTDQASSGSETEFMTSETPEAAIPPGKQPSSLASPNPPMAKGSEQGFQSPPASSSSVTINTAPFQAMQTVFNVNAPLPPRKEQEIKESPYSPGYNQSFTTASTQTPPQCQLPSIHVEQTVHSQETANYHPDGTIQVSNGSLAFYPAQTNVFPRPTQPFVNSRGSVRGCTRGGRLITNSYRSPGGYKGFDTYRGLPSISNGNYSQLQFQAREYSGAPYSQRDNFQQCYKRGGTSGGPRANSRANCFIMRNSLLLIKQQGGVILLR

SEQ ID NO: 7329 - protein, 581 aa, Homo sapiens
NNNGTYDGIAYFECKEKHGIFAPPQKISHIPENFDDYVDINEDEDCYSDERYQCYNQEQNDTEGPKDREKDVSEYFYEKSLPSVNDIEASVNRSRSLKIETDNVQDISGVLEAHVHQQSSVDSQISSKENKDLISDATEKVSIAAEDDTLDNTFSEELEKQQQFTEEEDNLYAEASEKLCTPLLDLLTREKNQLEAQLKSSLNEEKKSKQQLEKISLLTDSLLKVFVKDTVNQLQQIKKTRDEKIQLSNQELLGDDQKKVTPQDLSQNVEEQSPSISGCFLSSELEDEKEEISSPDMCPRPESPVFGASGQEELAKRLAELELSREFLSALGDDQDWFDEDFGLSSSHKIQKNKAEETIVPLMAEPKRVTQQPCETLLAVPHTAEEVEILVHNAAEELWKWKELGHDLHSISIPTKLLGCASKGLDIESTSKRVYKQAVFDLTKEIFEEIFAEDPNLNQPVWMKPCRINSSYFRRVKNPNNLDEIKSFIASEVLKLFSLKKEPNHKTDWQKMMKFGRKKRDRVDHILVQELHEEEAQWVNYDEDELCVKMQLADGIFETLIKDTIDVLNQISEKQGRMLLV

SEQ ID NO: 7330 - protein, 114 aa, Homo sapiens
MWSLTASEGESTTAHFFLGAGDEGLGTRGIGMRPEESDSELLEDEEDEVPPEPQIIVGICAMTKKSKSKPMTQILERLCRFDYLTVVILGEDVILNEPVENWPSCHCLISFHSK

SEQ ID NO: 7331 - protein, 305 aa, Homo sapiens
MEAESFPCLLRPFFKERSCALRPAFHTAKCEKLQKEKEELERRFEAEMARLQEEHGDQLLSIRCQHQEQVEDLTASHDAALLEMENNHTVAITILQDDHDHKVQELMSTHELEKKELEENFEKLRLSLQDQVDTLTFQSQSLRDRARRFEEALRKNTEEQLEIALAPYQHLEEDMKSLKQVLEMKNQQIHEQEKKILELEKLAEKNIILEEKIQVLQQQNEDLKARIDQNTVVTRQLSEENANLQEYVEKETQEKKRLSRTNEELLWKLQTGDPTSPIKLSPTSPVYRGSSSGPSSPARVSTTPR

SEQ ID NO: 7332 - protein, 772 aa, Homo sapiens
MQELEELRKQLGSVATGSTLQQSLELKRKMLRDKQNKKNSGQHLPIFPAWVYERPALIGDFLIGAGISTDTALPIGTLPLASQESAVVEDLLYVLVGVDGRYVSAQPLAGRQSRTFLVDPNLDLSIRELVHRILPVAASYSAVTRFIEEKSSFEYGQVNHALAAAMRTLVKEHLILVSQLEQLHRQGLLSLQKLWFYIQPAMRTMDILASLATSVDKGECLGGSTLSLLHDRSFSYTGDSQAQELCLYLTKAASAPYFEVLEKWIYRGIIHDPYSEFMVEEHELRKERIQEDYNDKYWDQRYTIVQQQIPSFLQKMADKILSTGKYLNVVRECGHDVTCPVAKEIIYTLKERAYVEQIEKAFNYASKVLLDFLMEEKELVAHLRSIKRYFLMDQGDFFVHFMDLAEEELRKPVEDITPPRLEALLELALRMSTANTDPFKDDLKIDLMPHDLITQLLRVLAIETKQEKAMAHADPTELALSGLEAFSFDYIVKWPLSLIINRKALTRYQMLFRHMFYCKHVERQLCSVWISNKTAKQHSLHSAQWFAGAFTLRQRMLNFVQNIQYYMMFEVMEPTWHILEKNLKSASNIDDVLGHHTGFLDTCLKDCMLTNPELLKVFSKLMSVCVMFTNCMQKFTQSMKLDGELGGQTLEHSTVLGLPAGAEERARKELARKHLAEHADTVQLVSGFEATINKFDKNFSAHLLDLLARLSIYSTSDCEHGMASVISRLDFNGFYTERLERLSAERSQKATPQVPVLRGPPAPAPRVAVTAQ

SEQ ID NO: 7333 - protein, 400 aa, Homo sapiens
MDFNMKKLASDAGIFFTRAVQFTEEKFGQAEKTELDAHFENLLARADSTKNWTEKILRQTEVLLQPNPSARVEEFLYEKLDRKVPSRVTNGELLAQYMADAASELGPTTPYGKTLIKVAEAEKQLGAAERDFIHTASISFLTPLRNFLEGDWKTISKERRLLQNRRLDLDACKARLKKAKAAEAKATTVPDFQETRPRNYILSASASALWNDEVDKAEQELRVAQTEFDRQAEVTRLLLEGISSTHVNHLRCLHEFVKSQTTYYAQCYRHMLDLQKQLGSSQGAIFPGTFVGTTEPASPPLSSTSPTTAAATMPVVPSVASLAPPGEASLCLEEVAPPASGTRKARVLYDYEAADSSELALLADELITVYSLPGMDPDWLIGERGNKKGKVPVTYLELLS

SEQ ID NO: 7334 - protein, 608 aa, Homo sapiens
MPFWPIRCLKRSRRMPRGGAGEREKVPANPEALLLMASSQRDMEDWVQAIRRVIWAPLGGGIFGQRLEETVHHERKYGPRLAPLLVEQCVDFIRERGLTEEGLFRMPGQANLVRDLQDSFDCGEKPLFDSTTDVHTVASLLKLYLRELPEPVVPFARYEDFLSCAQLLTKDEGEGTLELAKQVSNLPQANYNLLRYICKFLDEVQAYSNVNKMSVQNLATVFGPNILRPQVEDPVTIMEGTSLVQHLMTVLIRKHSQLFTAPVPEGPTSPRGGLQCAVGWGSEEVTRDSQGEPGGPGLPAHRTSSLDGAAVAVLSRTAPTGPGSRCSPGKKVQTLPSWKSSFRQPRSLSGSPKGGGSSLEVPIISSGGNWLMNGLSSLRGHRRASSGDRLKDSGSVQRLSTYDNVPAPGLVPGIPSVASMAWSGASSSESSVGGSLSSCTACRASDSSARSSLHTDWALEPSPLPSSSEDPKSLDLDHSMDEAGAGASNSEPSEPDSPTREHARRSEALQGLVTELRAELCRQRTEYERSVKRIEEGSADLRKRMSRLEEELDQEKKKYIMLEIKLRNSERAREDAERRNQLLQREMEEFFSTLGSLTVGAKGARAPK

SEQ ID NO: 7335 - protein, 235 aa, Homo sapiens [sequence omitted]

SEQ ID NO: 7336 - protein, 1170 aa, Homo sapiens
VYKGRHVKTGQLAAIKVMDVTEDEEEEIKLEINMLKKYSHHRNIATYYGAFIKKSPPGHDDQLWLVMEFCGAGSITDLVKNTKGNTLKEDWIAYISREILRGLAHLHIHHVIHRDIKGQNVLLTENAEVKLVDFGVSAQLDRTVGRRNTFIGTPYWMAPEVIACDENPDATYDYRSDLWSCGITAIEMAEGAPPLCDMHPMRALFLIPRNPPPRLKSKKWSKKFFSFIEGCLVKNYMQRPSTEQLLKHPFIRDQPNERQVRIQLKDHIDRTRKKRGEKDETEYEYSGSEEEEEEVPEQEGEPSSIVNVPGESTLRRDFLRLQQENKERSEALRRQQLLQEQQLREQEEYKRQLLAERQKRIEQQKEQRRRLEEQQRREREARRQQEREQRRREQEEKRRLEELERRRKEEEERRRAEEEKRRVEREQEYIRRQLEEEQRHLEVLQQQLLQEQAMLLHDHRRPHPQHSQQPPPPQQERSKPSFHAPEPKAHYEPADRAREVEDRFRKTNHSSPEAQSKQTGRVLEPPVPSRSESFSNGNSESVHPALQRPAEPQVPVRTTSRSPVLSRRDSPLQGSGQQNSQAGQRNSTSIEPRLLWERVEKLVPRPGSGSSSGSSNSGSQPGSHPGSQSGSGERFRVRSSSKSEGSPSQRLENAVKKPEDKKEVFRPLKPADLTALAKELRAVEDVRPPHKVTDYSSSSEESGTTDEEDDDVEQEGADESTSGPEDTRAASSLNLSNGETESVKTMIVHDDVESEPAMTPSKEGTLIVRQTQSASSTLQKHKSSSSFTPFIDPRLLQISPSSGTTVTSVVGFSCDGMRPEAIRQDPTRKGSVVNVNPTNTRPQSDTPEIRKYKKRFNSEILCAALWGVNLLVGTESGLMLLDRSGQGKVYPLINRRRFQQMDVLEGLNVLVTISGKKDKLRVYYLSWLRNKILHNDPEVEKKQGWTTVGDLEGCVHYKVVKYERIKFLVIALKSSVEVYAWAPKPYHKFMAFKSFGELVHKPLLVDLTVEEGQRLKVIYGSCAGFHAVDVDSGSVYDIYLPTHIQCSIKPHAIIILPNTDGMELLVCYEDEGVYVNTYGRITKDVVLQWGEMPTSVAYIRSNQTMGWGEKAIEIRSVETGHLDGVFMHKRAQRLKFLCERNDKVFFASVRSGGSSQVYFMTLGRTSLLSW

SEQ ID NO: 7337 - protein, 491 aa, Homo sapiens
VIIHRVLEKQEVEVFYPDFGNIGIVQKSSLRFLKCCYTKLPAQAIPCSLAWVRPVEEHWTSKAILQFQKLCGLKPLVGVVDEYVDGILNIFLCDTSSNEDVYFHHVLRTEGHAIVCRENISSKGFSELNPLALYTTSSGGPEDIVLTELGYPSQQHYFNEDRKISPQSKESELRILQDINDEKSLSHLKSESKEPLKDSEFESLKTCNKSFEEDPKWSNPEPNDLKEENEDEIPTGMPCLESVTIGDDIWDENWLPLQAKMGKGGDAASHLFTASLGGKNQYSSCKEMPQKDWCFSTPKDTWDDSWQPSGLVNGTKVEVHKPEVLGAQEKNTGTNRTQKQLDINGSSDSSTLPKLEEFCTSLTQSEQSADGSQSEPNNSQTQPKQIQLSTAAPCSTTAVDDSAEKPSGSVESSPEILKNEDFSSSRAITLYKDKRQESVDQLSLILSYECQISQKLYIPRSTATAALGAAARLATSRSLLHWYPSVKRMEA

SEQ ID NO: 7338 - protein, 141 aa, Homo sapiens
MPTTSRPALDVKGGTSPAKEDANQEMSSVAYSNLAVKDRKAVAILHYPGVASNGTKASGAPTSSSGSPIGSPTTTPPTKPPSFNLHPAPHLLASMHLQKLNSQYQGMAAATPGQPGEAGPLQNWDFGAQAGGAESLSPSAG

SEQ ID NO: 7339 - protein, 395 aa, Homo sapiens; identical to SEQ ID NO: 6506

SEQ ID NO: 7340 - protein, 447 aa, Homo sapiens
MATDSWALAVDEQEAAVKSMTNLQIKEEKVKADTNGIIKTSTTAEKTDEEEKEDRAAQSLLNKLIRSNLVDNTNQVEVLQRDPNSPLYSVKSFEELRLPQNLIAQSQSGTGKTAAFVLAMLSRVEPSDRYPQCLCLSPTYELALQTGKVIEQMGKFYPELKLAYAVRGNKLERGQKISEQIVIGTPGTVLDWCSKLKFIDPKKIKVFVLDEADVMIATQGHQDQSIRIQRMLPRNCQMLLFSATFEDSVWKFAQKVVPDPNVIKLKREEETLDTIKQYYVLCSSRDEKFQALCNLYGAITIAQAMIFCHTRKTASWLAAELSKEGHQVALLSGEMMVEQRAAVIERFREGKEKVLVTTNVCARGIDVEQVSVVINFDLPVDKDGNPDNETYLHRIGRTGRFGKRGLAVNMVDSKHSMNILNRIQEHFNKKIERLDTDDLDEIEKIAN

SEQ ID NO: 7341 - protein, 209 aa, Homo sapiens
MASSDLEQLCSHVNEKIGNIKKTLSLRNCGQEPTLKTVLNKIGDEIIVINELLNKLELEIQYQEQTNNSLKELCESLEEDYKDIEHLKENVPSHLPQVTVTQSWYMKSRLTYNQINDVIKEINKAVISKYKILHQPKKSMNSVTRNLYHRFIDEETKDTKGRYFIVEADIKEFTTLKADKKFHVLLNILRHCRRLSEVRGGGLTRYVIT

SEQ ID NO: 7342 - protein, 374 aa, Homo sapiens
MDSVRSGPFGQLFRPDNFIFGQTGAGNNWAKGHYTEGAELVDAVLDVVRKECEHCDCLQGFQLTHSLGGGTGSGMGTLLISKIREEFPDRIMNTFSVMPSPKVSDTVVEPYNATLSVHQLVENTDETYCIDNEALYDICFRTLKLTTPTYGDLNHLVSATMSGVTTSLRFPGQLNADLRKLAVNMVPFPRLHFFMPGFAPLTSRGSQQYRALTVPELTQQMFDARNMMAACDPRHGRYLTVATVFRGPMSMKEVDEQMLAIQSKNSSYFVEWIPNNVKVAVCDIPPRGLKMASTFIGNSTAIQELFKRISEQFSAMFRRKAFLHWFTGEGMDEMEFTEAESNMNDLVSEYQQYQDATANDGEEAFEDEEEEIDG

SEQ ID NO: 7343 - protein, 762 aa, Homo sapiens
MASLLQDQLTTDQDLLLMQEGMPMRKVRSKSWKKLRYFRLQNDGMTVWHARQARGSAKPSFSISDVETIRNGHDSELLRSLAEELPLEQGFTIVFHGRRSNLDLMANSVEEAQIWMRGLQLLVDLVTSMDHQERLDQWLSDWFQRGDKNQDGKMSFQEVQRLLHLMNVEMDQEYAFSLFQAADTSQSGTLEGEEFVQFYKALTKRAEVQELFESFSADGQKLTLLEFLDFLQEEQKERDCTSELALELIDRYEPSDSGKLRHVLSMDGFLSYLCSKDGDIFNPACLPIYQDMTQPLNHYFICSSHNTYLVGDQLCGQSSVEGYIRALKRGCRCVEVDVWDGPSGEPVVYHGHTLTSRILFKDVVATVAQYAFQTSDYPVILSLETHCSWEQQQTMARHLTEILGEQLLSTTLDGVLPTQLPSPEELRRKILVKGKKLTLEEDLEYEEEEAEPELEESELALESQFETEPEPQEQNLQNKDKKKKSKPILCPALSSLVIYLKSVSFRSFTHSKEHYHFYEISSFSETKAKRLIKEAGNEFVQHNTWQLSRVYPSGLRTDSSNYNPQELWNAGCQMVAMNMQTAGLEMDICDGHFRQNGGCGYVLKPDFLRDIQSSFHPEKPISPFKAQTLLIQVISGQQLPKVDKTKEGSIVDPLVKVQIFGVRLDTARQETNYVENNGFNPYWGQTLCFRVLVPELAMLRFVVMDYDWKSRNDFIGQYTLPWTCMQQGYRHIHLLSKDGISLRPASIFVYICIQEGLEGDES

SEQ ID NO: 7344 - protein, 485 aa, Homo sapiens
MAELQMLLEEEIPGGRRALFDSYTNLERVADYCENNYIQSADKQRALEETKAYTTQSLASVAYLINTLANNVLQMLDIQASQLRRMESSINHISQTVDIHKEKVARREIGILTTNKNTSRTHKIIAPANLERPVRYIRKPIDYTILDDIGHGVKWLLRFKVSTQNMKMGGLAATPPTQKPPSPPMSGKGTLGRHSPYRTLEPVRPPVVPNDYVPSPTRNMAPSQQSPVRTASVNQRNRTYSSSGSSGGSHPSSRSSSRENSGSGSVGVPIAVPTPSPPSVFPAPAGSAGTPPLPATSASAPAPLVPATVPSSTAPDAAAGGAQTLADGFTSPTPPVVSSTPPTGHPVQFYSMNRPASRHTPPTIGGSLPYRRPPSITSQTSLQNQMNGGPFYSQNPVSDTPPPPPPVEEPVFDESPPPPPPPEDYEEEEAAVVEYSDPYAEEDPPWAPRSYLEKVVAIYDYTKDKEDELSFQEGAIIYVIKKNDD

SEQ ID NO: 7345 - protein, 714 aa, Homo sapiens
MLSPKIRQARRARSKSLVMGEQSRSPGRMPCPHRLGPVLKAGWLKKQRSIMKNWQQRWFVLRGDQLFYYKDKDEIKPQGFISLQGTQVTELPPGPEDPGKHLFEISPGGAGEREKVPANPEALLLMASSQRDMEDWVQAIRRVIWAPLGGGTARRSHAHPLEPLPPGIFGQRLEETVHHERKYGPRLAPLLVEQCVDFIRERGLTEEGLFRMPGQANLVRDLQDSFDCGEKPLFDSTTDVHTVASLLKLYLRELPEPVVPFARYEDFLSCAQLLTKDEGEGTLELAKQVSNLPQANYNLLRYICKFLDEVQAYSNVNKMSVQNLATVFGPNILRPQVEDPVTIMEGTSLVQHLMTVLIRKHSQLFTAPVPEGPTSPRGGLQCAVGWGSEEVTRDSQGEPGGPGLPAHRTSSLDGAAVAVLSRTAPTGPGSRCSPGKKVQTLPSWKSSFRQPRSLSGSPKGGGSSLEVPIISSGGNWLMNGLSSLRGHRRASSGDRLKDSGSVQRLSTYDNVPAPGLVPGIPSVASMAWSGASSSESSVGGSLSSCTACRASDSSARSSLHTDWALEPSPLPSSSEDPKSLDLDHSMDEAGAGASNSEPSEPDSPTREHARRSEALQGLVTELRAELCRQRTEYERSVKRIEEGSADLRKRMSRLEEELDQEKKKYIMLEIKLRNSERAREDAERRNQLLQREMEEFFSTLGSLTVGAKGARAPK

SEQ ID NO: 7346 - protein, 126 aa, Homo sapiens; identical to SEQ ID NO: 7326

SEQ ID NO: 7347 - protein, 813 aa, Homo sapiens
MSEQGDLNQAIAEEGGTEQETATPENGIVKSESLDEEEKLELQRRLEAQNQERRKSKSGAGKGKLTRSLAVCEESSARPGGESLQDQESIHLQLSSFSSLQEEDKSRKDDSEREKEKDKNKDKTSEKPKIRMLSKDCSQEYTDSTGIDLHEFLINTLKNNSRDRMILLKMEQEIIDFIADNNNHYKKFPQMSSYQRMLVHRVAAYFGLDHNVDQTGKSVIINKTSSTRIPEQRFCEHLKDEKGEESQKRFILKRDNSSIDKEDNQSVCSQESLFVENSRLLEDSNICNETYKKRQLFRGNRDGSGRTSGSRQSSSENELKWSDHQRAWSSTDSDSSNRNLKPAMTKTASFGGITVLTRGDSTSSTRSTGKLSKAGSESSSSAGSSGSLSRTHPPLQSTPLVSGVAAGSPGCVPYPENGIGGQVAPSSTSYILLPLEAATGIPPGSILLNPHTGQPFVNPDGTPAIYNPPTSQQPLRSAMVGQSQQQPPQQQPSPQPQQQVQPPQPQMAGPLVTQSVQGLQASSQSVQYPAVSFPPQHLLPVSPTQHFPMRDDVATQFGQMTLSRQSSGETPEPPSGPVYPSSLMPQPAQQPSYVIASTGQQLPTGGFSGSGPPISQQVLQPPPSPQGFVQQPPPAQMPVYYYPSGQYPTSTTQQYRPMAPVQYNAQRSQQMPQAAQQAGYQPVLSGQQGFQGLIGVQQPPQSQNVINNQQGTPVQSVMVSYPTMSSYQVPMTQGSQGLPQQSYQQPIMLPNQAGQGSLPATGMPVYCNVTPPTPQNNLRLIGPHCPSSTVPVMSASCRTNCASMSNAGWQVKF

SEQ ID NO: 7348 - protein, 488 aa, Homo sapiens
MNGALDHSDQPDPDAIKMFVGQIPRSWSEKELKELFEPYGAVYQINVLRDRSQNPPQSKGCCFVTFYTRKAALEAQNALHNIKTLPGMHHPIQMKPADSEKSNAVEDRKLFIGMVSKKCNENDIRVMFSPFGQIEECRILRGPDGLSRGCAFVTFSTRAMAQNAIKAMHQSQTMEGCSSPIVVKFADTQKDKEQRRLQQQLAQQMQQLNTATWGNLTGLGGLTPQYLALLQQATSSSNLGAFSGIQQMAGMNALQLQNLATLAAAAAAAQTSATSTNANPLSTTSSALGALTSPVAASTPNSTAGAAMNSLTSLGTLQGLAGATVGLNNINALAGTINSMAALNGGLGATGLTNGTAGTMDALTQAYSGIQQYAAAALPTLYSQSLLQQQSAAGSQKEGPEGANLFIYHLPQEFGDQDILQMFMPFGNVISAKVFIDKQTNLSKCFGFVSYDNPVSAQAAIQAMNGFQIGMKRLKVQLKRSKNDSKPY

SEQ ID NO: 7349 - protein, 157 aa, Homo sapiens; identical to SEQ ID NO: 7296

SEQ ID NO: 7350 - protein, 100 aa, Homo sapiens
MASEDIAKLAETLAKTQVAGGQLSFKGKSLKLNTAEDAKDVIKEIEDFDSLEALRLEGNTVGVEAARVIAKALEKKSELKRCHWSDMFTGRLRTEIPPAL

SEQ ID NO: 7351 - protein, 152 aa, Homo sapiens
MSVTYDDSVGVEVSSDSFWEVGNYKRTVKRIDDGHRLCSDLMNCLHERARIEKAYAQQLTEWARRWRQLVEKGPQYGTVEKAWMAFMSEAERVSELHLEVKASLMNDDFEKIKNWQKEAFHKQMMGGFKETKEAEDGFRKAQKPWAKKLKEV

SEQ ID NO: 7352 - protein, 180 aa, Homo sapiens
MFASDLLRALDCCPGAGSSGLLPQLGPRQLLAFTVNCLGNHRYLGFFEDLEQRHKAQVLVEDISDILEEHAEKHFHPYIAYCSNEVYQQRTLQKLISSNAAFREALREIERRPACGGLPMLSFLILPMQRVTRLPLLMDTLCLKTQGHSERYKAASRALKAISKLVRQCNEGAHRMERME

SEQ ID NO: 7353 - protein, 827 aa, Homo sapiens; identical to SEQ ID NO: 6028

SEQ ID NO: 7354 - protein, 1486 aa, Homo sapiens
MRIPDQKYVTLKLNDVIRFGYDSNMYVLERVQHRVPEEALKHEKYTSQLQVSVKGLAPKRSEALPEHTPYCEASNPRPEKGDRRPGTEAASYRTPLYGQPSWWGEDDGSTLPDAQRQGEPYPERPKGPVQQDGELHGFRAPAEPQGCSFRREPSYFEIPTKETPQPSQPPEVPAHEMPTKDAEAGGGGAAPVVQSHASFTIEFDDCSPGKMKIKDHITKFSLRQRRPPGKEATPGEMVSAETKVADWLVQNDPSLLHRVGPGDDRHSTKSDLPVHTRTLKGHKHEDGTQSDSEDPLAKAASAAGVPLEASGEQVRLQRQIKRDPQELLHNQQAFVIEFFDEDTPRKKRSQSFTHSPSGDPKADKRRGPTPADRDRPSVPAPVQAGGRSSGPQRAGSLKREKTEERLGSPSPASRTPARPFGSVGRRSRLAQDFMAQCLRESSPAARPSPEKVPPVLPAPLTPHGTSPVGPPTPPPAPTDPQLTKARKQEEDDSLSDAGTYTIETEAQDTEVEEARKMIDQVFGVLESPELSRASSATFRPVIRGDRDESDDGGVAQRMALLQEFASRPLGAAPQAEHQGLPVPGSPGGQKWVSRWASLADSYSDPGLTEDGLGRRGGEPEGSLPVRMRRRLPQLPSERADSPAGPESSRRSGPGPPELDSEQPSRLFGQEELDPDSLSDASGSDGGRGPEPGVEPQDSRRRSPQEGPTWSRGRRSPRAPGEPTPASFFIGDQNGDAVLSRKPLAAPGDGEGLGQTAQPSPPARDGVYVSANGRMVIQLRPGRSPEPDGPAPAFLRQESFTKEPASGPPAPGKPPHISSHPLLQDLAATRAARMDFHSQDTHLILKETETALAALEARLLSNSVDAECEGGSTPRPPEDALSGDSDVDTASTVSLRSGKSGPSPTTPQPLRAQKEMSPSPPAAQDPGGTALVSAREQSSERQHHPLGPTDMGRGEPVRRSAIRRGHRPRGSLDWPSEERGPVLAHLPSSDVMASNHETPEATGAGRLGSRARGSPAAPPPSPAAREEQSRSSASSQKGPQALTRSNSLSTPRPTRASRLRRARLGDASDTEAADGERGSLGNPEPVGRPAAEQAKKLSRLDILAMPRKRAGSFTGTSDPEAAPARTSFSGRSVELCCASRKPTMAEARAVSRKAANTATTTGPRQPFSRARSGSARYTSTTQTPRAGSSSRARSRAPGPRDTDDDEEEPDPYGFIVQTAEIAEIARLSQTLVKDVAILAQEIHDVAGDGDTLGSSEPAHSASLSNMPSTPASTISAREELVQRIPEASLNFQKVPPGSLNSRDFDQNMNDSCEDALANKTRPRNREEVIFDNLMLNPVSQLSQAIRENTEHLAEKMKILFQNTGRAWEDLEARINAENEVPILKTSNKEISSILKELRRVQKQLEVINAIVDPSGSLDLLTGNRSLASSAQPGLGKGRVAAQSPPSPASAEALLPALPLRNFPQRASCGPPSLPDPTFLPDAERFLI

SEQ ID NO: 7355 - protein, 49 aa, Homo sapiens
MYPNPLIYCTCWDPWNLGPRKLIKTPQLPRKNSTGSSKLTPLVPAPKNH

SEQ ID NO: 7356 - protein, 315 aa, Homo sapiens; identical to SEQ ID NO: 4781

SEQ ID NO: 7357 - protein, 1004 aa, Homo sapiens
MKATTPLQTVDRPKDWYKTMFKQIHMVHKPGLYNPPYSAQSHPAAKTQTYRPLSKSHSDNSPNAFKDASSPVPPPHVPPPVPPLRPRDRSSTEKHDWDPPDRKVDTRKFRSEPRSIFEYEPGKSSILQHERPASLYQSSIDRSLERPMSSASMASDFRKRRKSEPAVGPPRGLGDQSASRTSPGRVDLPGSSTTLTKSFTSSSPSSPSRAKGGDDSKICPSLCSYSGLNGNPSSELDYCSTYRQHLDVPRDSPRAISFKNGWQMARQNAEIWSSTEETVSPKIKSRSCDDLLNDDCDSFPDPKVKSESMGSLLCEEDSKESCPMAWGSPYVPEVRSNGRSRIRHRSARNAPGFLKMYKKMHRINRKDLMNSEVICSVKSRILQYESEQQHKDLLRAWSQCSTEEVPRDMVPTRISEFEKLIQKSKSMPNLGDDMLSPVTLEPPQNGLCPKRRFSIEYLLEEENQSGPPARGRRGCQSNALVPIHIEVTSDEQPRAHVEFSDSDQDGVVSDHSDYIHLEGSSFCSESDFDHFSFTSSESFYGSSHHHHHHHHHHHRHLISSCKGRCPASYTRFTTMLKHERARHENTEEPRRQEMDPGLSKLAFLVSPVPFRRKKNSAPKKQTEKAKCKASVFEALDSALKDICDQIKAEKKRGSLPDNSILHRLISELLPDVPERNSSLRALRRSPLHQPLHPLPPDGAIHCPPYQNDCGRMPRSASFQDVDTANSSCHHQDRGGALQDRESPRSYSSTLTDMGRSAPRERRGTPEKEKLPAKAVYDFKAQTSKELSFKKGDTVYILRKIDQNWYEGEHHGRVGIFPISYVEKLTPPEKAQPARPPPPAQPGEIGEAIAKYNFNADTNVELSLRKGDRVILLKRVDQNWYEGKIPGTNRQGIFPVSYVEVVKKNTKGAEDYPDPPIPHSYSSDRIHSLSSNKPQRPVFTHENIQGGGEPFQALYNYTPRNEDELELRESDVIDVMEKCDDGWFVGTSRRTKFFGTFPGNYVKRL

SEQ ID NO: 7358 - protein, 326 aa, Homo sapiens
MAAAAAAAAATNGTGGSSGMEVDAAVPSVMACGVTGSVSVALHPLVILNISDHWIRMRSQEGRPVQVIGALIGKQEGRNIEVMNSFELLSHTVEEKIIIDKEYYYTKEEQFKQVFKELEFLGWYTTGGPPDPSDIHVHKQVCEIIESPLFLKLNPMTKHTDLPVSVFESVIDIINGEATMLFAELTYTLATEEAERIGVDHVARMTATGSGENSTVAEHLIAQHSAIKMLHSRVKLILEYVKASEAGEVPFNHEILREAYALCHCLPVLSTDKFKTDFYDQCNDVGLMAYLGTITKTCNTMNQFVNKFNVLYDRQGIGRRMRGLFF

SEQ ID NO: 7359 - protein, 259 aa, Homo sapiens
  VARIANT 1: note = X can be any amino acid
XFTAQAPSGRGAAVGSGTRLASLRLLTELESPAWWPFSSKLWKTPPETKPREDVSMTSCEPFGKEGILIKIPAVISHRTESHVKPGRLTVLVSGLEIHDSSSLLMHRFEREDVDDIKVHSPYEISIRQRFIGKPDMAYRLISAKMPEVIPILEVQFSKKMELLEDALVLRSARTSSPAEKSCSVWHAASGLMGRTLHREPPAGDQEGTALHLQTSLPALSEADTQELTQGFRPMSLSTQTVLVMLCSESAGALWRQRLS

SEQ ID NO: 7360 - protein, 345 aa, Homo sapiens
MAAAEPASSGQQAPAGQGQGQRPPPQPPQAQAPQPPPPPQLGGAGGGSSRHEKSLGLLTTKFVSLLQEAKDGVLDLKAAADTLAVRQKRRIYDITNVLEGIDLIEKKSKNSIQWKGVGAGCNTKEVIDRLRYLKAEIEDLELKERELDQQKLWLQQSIKNVMDDSINNRFSYVTHEDICNCFNGDTLLAIQAPSGTQLEVPIPEMGQNGQKKYQINLKSHSGPIHVLLINKESSSSKPVVFPVPPPDDLTQPSSQSLTPVTPQKSSMATQNLPEQHVSERSQALQQTSATDISSGSISGDIIDELMSSDVFPLLRLSPTPADDYNFNLDDNEGVCDLFDVQILNY

SEQ ID NO: 7361 - protein, 31 aa, Homo sapiens
MTVPWRPGKRRITYKEEEDLTLQPRSCLQCS

SEQ ID NO: 7362 - protein, 162 aa, Homo sapiens
MNNQKQQKPTLSGQRFKTRKRDEKERFDPTQFQDCIIQGLTETGTDLEAVAKFLDASGAKLDYRRYAETLFDILVAGGMLAPGGTLADDMMRTDVCVFAAQEDLETMQAFAQVFNKLIRRYKYLEKGFEDEVKKLLLFLKGFSESERNKLAMLTGVLLANGT

SEQ ID NO: 7363 - protein, 89 aa, Homo sapiens
MAAATGDPGLSKLQFAPFSSALDVGFWHELTQKKLNEYRLDEAPKDIKGYYYNGDSAGLPARLTLEFSAFDMSAPTPARCCPAIGTLYN

SEQ ID NO: 7364 - protein, 674 aa, Homo sapiens; identical to SEQ ID NO: 5910

SEQ ID NO: 7365 - protein, 640 aa, Homo sapiens
MENQLAKSTEERTFQYQDSLPSLPVPSLEESLKKYLESVTRTCYQIRGLDPDAKRGFLDLTREGIQVKPFANQEEYKKTEEIVQKFQSGIGEKLHQKLLERAKGKRNWLEEWWLNVAYLDVRIPSQLNVNFAGPAAHFEHYWPPKEGTQLERGSITLWHNLNYWQLLRKEKVPVHKVGNTPLDMNQFRMLFSTCKVPGITRDSIMNYFRTESEGRSPNHIVVLCRGRAFVFDVIHEGCLVTPPELLRQLTYIHKKCHSEPDGPGIAALTSEERTRWAKAREYLIGLDPENLALLEKIQSSLLVYSMEDSSPHVTPEDYSEIIAAILIGDPTVRWGDKSYNLISFSNGVFGCNCDHAPFDAMIMVNISYYVDEKIFQNEGRWKGSEKVRDIPLPEELIFIVDEKVLNDINQAKAQYLREASDLQIAAYAFTSFGKKLTKNKMLHPDTFIQLALQLAYYRLHGHPGCCYETAMTRHFYHGRTETMRSCTVEAVRWCQSMQDPSVNLRERQQKMLQAFAKHNKMMKDCSAGKGFDRHLLGLLLIAKEEGLPVPELFTDPLFSKSGGGGNFVLSTSLVGYLRVQGVVVPMVHNGYGFFYHIRDDRFVVACSAWKSCPETDAEKLVQLTFCAFHDMIQLMNSTHL

SEQ ID NO: 7366 - protein, 157 aa, Homo sapiens; identical to SEQ ID NO: 7296

SEQ ID NO: 7367 - protein, 143 aa, Homo sapiens
  VARIANT 1: note = X can be any amino acid
XTRHFKESIKFIHECRLRGESCLVHCLAGVSRSVTLVIAYIMTVTDFGWEDALHTVRAGRSCANPNVGFQRQLQEFEKHEVHQYRQWLKEEYGESPLQDAEEAKNILGKYKEQGRTEPQPGARRWSSFPALAPLTYDNYTTET

SEQ ID NO: 7368 - protein, 164 aa, Homo sapiens
MVNSVIFFDITVDGKPLGRISIKQFADKIPKTAENFRALSTGEKGFRYKGSCFHRIIPGFMCQGGDFTHPNGTGDKSIYGEKFDDENLIRKHTGSGILSMANAGPNTNGSQFFICTAKTEWLDGKHVAFGKVKERVNIVEAMEHFGYRNSKTSKKITIADCGQF

SEQ ID NO: 7369 - protein, 155 aa, Homo sapiens
MSEGESQTVLSSGSDPKVESSSSAPGLTSVSPPVTSTTSAASPEEEEESEDESEILEESPCGRWQKRREEVNQRNVPGIDSAYLAMDTEEGVEVVWNEVQFSERKNYKLQEEKVRAVFDNLIQLEHLNIVKFHKYWADIKENKARVIFITEYMSS

SEQ ID NO: 7370 - protein, 278 aa, Homo sapiens
MWPFPSRSLFPPPTQAWLQTVSSDPEAQGWGAWNETKEILGPEGGEGKEEKEEEEDAEEDQDGDAGFLLSLLEQENLAECPLPDQELEAIKMKVCAMEQAEGTPRPPGVQQQAEEEEGTAAGQLLSPETVGCPLSGTPEEKVEADHRSVYVGNVDYGGSAEELEAHFSRCGEVHRVTILCDKFSGHPKGYAYIEFATKGSVQAAVELDQSLFRGRVIKVLPKRTNFPGISSTDRGGLRGHPGSRGAPFPHSGLQGRPRLRPQGQNRARGKFSPWFSPY

SEQ ID NO: 7371 - protein, 43 aa, Homo sapiens
MSEQGDLNQAIAEEGGTEQETATPENGIVKSESLDEEEKLELQ

SEQ ID NO: 7372 - protein, 129 aa, Homo sapiens
MADEELEALRRQRLAELQAKHGDPGDAAQQEAKHREAEMRNSILAQVLDQSARARLSNLALVKPEKTKAVENYLIQMARYGQLSEKVSLDSLEELYCYLLYQNMASKGQLHLHWITEFLLTLRRNCWRE

SEQ ID NO: 7373 - protein, 760 aa, Homo sapiens
MRKQEVRTGREAGQGHGTGSPAEQVKALMDLLAGKGSQGSQAPQALDRTPDAPLGPCSNDSRIQRHRKALLSKVGGGPELGGPWHRLASLLLVEGLTDLQLREHDFTQVEATRGGGHPARTVALDRLFLPLSRVSVPPRVSITIGVAGMGKTTLVRHFVRLWAHGQVGKDFSLVLPLTFRDLNTHEKLCADRLICSVFPHVGEPSLAVAVPARALLILDGLDECRTPLDFSNTVACTDPKKEIPVDHLITNIIRGNLFPEVSIWITSRPSASGQIPGGLVDRMTEIRGFNEEEIKVCLEQMFPEDQALLGWMLSQVQADRALYLMCTVPAFCRLTGMALGHLWRSRTGPQDAELWPAALCELYSWYFRMALSGEGQEKGKASPRIEQVAHGGRKMVGTLGRLAFHGLLKKKYVFYEQDMKAFGVDLALLQGAPCSCFLQREETLASSVAYCFTHLSLQEFVAAAYYYGASRRAIFDLFTESGVSWPRLGFLTHFRSAAQRAMQAEDGRLDVFLRFLSGLLSPRVNALLAGSLLAQGEHQAYRTQVAELLQGCLRPDAAVCARAINVLHCLHELQHTELARSVEEAMESGALARLTGPAHRAALAYLLQVSDACAQEANLSLSLSQGVLQSLLPQLLYCRKLRLDTNQFQDPVMELLGSVLSGKDCRIQKISLAENQISNKGAKALARSLLVNRSLTSLDLRGNSIGPQGAKALADALKINRTLTSLRVKFMYHKIDCFRRVPEADACNPSTLGGQGRWIT

SEQ ID NO: 7374 - protein, 157 aa, Homo sapiens; identical to SEQ ID NO: 7296

SEQ ID NO: 7375 - protein, 490 aa, Homo sapiens
MTIGRMENVEVFTAEGKGRGLKATKEFWAADIIFAERAYSAVVFDSLVNFVCHTCFKRQEKLHRCGQCKFAHYCDRTCQKDAWLNHKNECSAIKRYGKVPNENIRLAARIMWRVEREGTGLTEGCLVSVDDLQNHVEHFGEEEQKDLRVDVDTFLQYWPPQSQQFSMQYISHIFGVINCNGFTLSDQRGLQAVGVGIFPNLGLVNHDCWPNCTVIFNNGNHEAVKSMFHTQMRIELRALGKISEGEELTVSYIDFLNVSEERKRQLKKQYYFDCTCEHCQKKLKDDLFLGVKDNPKPSQEVVKEMIQFSKDTLEKIDKARSEGLYHEVVKLCRECLEKQEPVFADTNIYMLRMLSIVSEVLSYLQAFEEASFYARRMVDGYMKLYHPNNAQLGMAVMRAGLTNWHAGNIEVGHGMICKAYAILLVTHGPSHPITKDLEAMRVQTEMELRMFRQNEFMYYKMREAALNNQPMQVMAEPSNEPSPALFHKKQ

SEQ ID NO: 7376 - protein, 496 aa, Homo sapiens
MWGRFLAPEASGRDSPGGARSFPAGPDYSSAWLPANESLWQATTVPSNHRNNHIRRHSIASDSGDTGIGTSCSDSVEDHSTSSGTLSFKPSQSLITLPTAHVMPSNSSASISKLRESLTPDGSKWSTSLMQTLGNHSRGEQDSSLDMKDFRPLRKWSSLSKLTAPDNCGQGGTVCREESRNGLEKIGKAKALTSQLRTIGPSCLHDSMEMLRLEDKEINKKRSSTLDCKYKFESCSKEDFRASSSTLRRQPVDMTYSALPESKPIMTSSEAFEPPKYLMLGQQAVGGVPIQPSVRTQMWLTEQLRTNPLEGRNTEDSYSLAPWQQQQIEDFRQGSETPMQVLTGSSRQSYSPGYQDFSKWESMLKIKEGLLRQKEIVIDRQKQQITHLHERIRDNELRAQHAMLGHYVNCEDSYVASLQPQYENTSLQTPFSEESVSHSQQGEFEQKLASTEKEVLQLNEFLKQRLSLFSEEKKKLEEKVGFSNKVELGQQHFLSI

SEQ ID NO: 7377 - protein, 360 aa, Homo sapiens
MAELQQLQEFEIPTGREALRGNHSALLRVADYCEDNYVQATDKRKALEETMAFTTQALASVAYQVGNLAGHTLRMLDLQGAALRQVEARMVNMHMEKVARREIGTLATVQRLPPGQKVIAPENLPPLTPYCRRPLNFGCLDDIGHGIKDLSTQLSRTGTLSRKSIKAPATPASATLGRPPRIPEPVHLPVVPDGRLSAASSAFSLASAGSAEGVGGAPTPKGQAAPPAPPLPSSLDPPPPPAAVEVFQRPPTLEELSPPPPDEELPLPLDLPPPPPLDGDELGLPPPPPGFGPDEPSWVPASYLEKVVTLYPYTSQKDNELSFSEGTVICVTRRYSDGWCEGVSSEGTGFFPGNYVEPSC

SEQ ID NO: 7378 - protein, 66 aa, Homo sapiens
MLRCGQMIFAQALVCRHLGRDWRWTQRKRQPDSYFSVLNAFIDRKDSYYSIHQIAQMGVGEGKSIG

SEQ ID NO: 7379 - protein, 491 aa, Homo sapiens
MEQPPAPKSKLKKLSEDSLTKQPEEVFDVLEKLGEGSYGSVFKAIHKESGQVVAIKQVPVESDLQEIIKEISIMQQCDSPYVVKYYGSYFKNTDLWIVMEYCGAGSVSDIIRLRNKTLIEDEIATILKSTLKGLEYLHFMRKIHRDIKAGNILLNTEGHAKLADFGVAGQLTDTMAKRNTVIGTPFWMAPEVIQEIGYNCVADIWSLGITSIEMAEGKPPYADIHPMRAIFMIPTNPPPTFRKPELWSDDFTDFVKKCLVKNPEQRATATQLLQHPFIKNAKPVSILRDLITEAMEIKAKRHEEQQRELEEEEENSDEDELDSHTMVKTSVESVGTMRATSTMSEGAQTMIEHNSTMLESDLGTMVINSEDEEEEDGTMKRNATSPQVQRPSFMDYFDKQDFKNKSHENCNQNMHEPFPMSKNVFPDNWKVPQDGDFDFLKNLSLEELQMRLKALDPMMEREIEELRQRYTAKRQPILDAMDAKKRRQQNF

SEQ ID NO: 7380 - protein, 41 aa, Homo sapiens
MSSKGSSTDGRTDLANGSLSSSPEEMSGAEEGRETSSGIEV

SEQ ID NO: 7381 - protein, 314 aa, Homo sapiens
MPNVAETERSNDSGNGEHKSERKSPEENLQGAVKSFCTSASGAPLGPKGDGHYPWSCPVTHTREKIYAICSDYAFLNQATSIYKTPNPSRSPCLPDSTSLSAGNNSSRYIGIPTSTSEIIYNEENSLENLSNSLGKLPLAWEIDKSEFDGVTTNSKHKSGNAKKQVSKRKTSDKKGRYQKECPQHSPLEDIKQRKVLDLRRWYCISRPQYKTSCGISSLISCWNFLYSTMGAGNLPPITQEEALHILGFQPPFEDIRFGPFTGNTTLMRWFRQINDHFHVKGCSYVLYKPHGKNKTAGETAGDLSHHRKLNIGS

SEQ ID NO: 7382 - protein, 499 aa, Homo sapiens
MPEIRVTPLGAGQDVGRSCILVSIAGKNVMLDCGMHMGFNDDVDDELEIKAYYAGHVLGAAMFQIKVGSESVVYTGDYNMTPDRHLGAAWIDKCRPNLLITESTYATTIRDSKRCRERDFLKKVHETVERGGKVLIPVFALGRAQELCILLETFWERMNLKVPIYFSTGLTEKANHYYKLFIPWTNQKIRKTFVQRNMFEFKHIKAFDRAFADNPGPMVVFATPGMLHAGQSLQIFRKWAGNEKNMVIMPGYCVQGTVGHKILSGQRKLEMEGRQVLEVKMQVEYMSFSAHADAKGIMQLVGQAEPESVLLVHGEAKKMEFLKQKIEQELRVNCYMPANGETVTLPTSPSIPVGISLGLLKREMAQGLLPEAKKPRLLHGTLIMKDSNFRLVSSEQALKELGLAEHQLRFTCRVHLHDTRKEQETALRVYSHLKSVLKDHCVQHLPDGSVTVESVLLQAAAPSEDPGTKVLLVSWTYQDEELGSFLTSLLKKGLPQAPS

SEQ ID NO: 7383 - protein, 131 aa, Homo sapiens
GTISCSTGTLQRRNLGPERQTGLLLLGMKENQELKTIQANLSRQRVEHQCLSSEELKQRFPNIRLPRGEVGLLDNSGGVIYAYKALRALQDAIRQLGGIVRDGEKVVEINPGLLVTVKTTSRSYQAKSLVI

SEQ ID NO: 7384 - protein, 228 aa, Homo sapiens
MSRERGSRSEEPGAGNRESGSREPGLAAAAMSTVDLARVGACILKHAVTGEAVELRSLWREHACVVAGLRRFGCVVCRWIAQDLSSLAGLLDQHGVRLVGVGPEALGLQEFLDGDYFAGELYLDESKQLYKELGFKRYNSLSILPAALGKPVRDVAAKAKAVGIQGNLSGDLLQSGGLLVVSKGGDKVLLHFVQKSPGDYVPKEHILQVLGISAEVCASDPPQCDREV

SEQ ID NO: 7385 - protein, 217 aa, Homo sapiens
MNFSEVFKLSSLLCKFSPDGKYLASCVQYRLVVRDVNTLQILQLYTCLDQIQHIEWSADSLFILCAMYKRGLVQVWSLEQPEWHCKIDEGSAGLVASCWSPDGRHILNTTEFHLRITVWSLCTKSVSYIKYPKACLQGITFTRDGRYMALAERRDCKDYVSIFVCSDWQLLRYKILLYSLDGRLLSTYSAYEWSLGIKSVAWSPSSQFLAVGSYDGK

SEQ ID NO: 7386 - protein, 160 aa, Homo sapiens; identical to SEQ ID NO: 6461

SEQ ID NO: 7387 - protein, 316 aa, Homo sapiens
MEENNLQCSSVVDGNFEEVPRETAIQFKPPLYRQRYQFVKNLVDQHEPKKVADLGCGDTSLLRLLKVNPCIELLVGVDINEDKLRWRGDSLAPFLGDFLKPRDLNLTITLYHGSVVERDSRLLGFDLITCIELIEHLDSGDLARFPEVVFGYLSPSMIVISTPNSEFNPLFPSVTLRDSDHKFEWTRMEFQTWALYVANRYDYSVEFTGVGEPPAGAENVGYCTQIGIFRKNGGKATESCLSEQHDQHVYKAVFTTSYPSLQQERFFKLVLVNEVSQQVESLRVSHLPRRKEQAGERGDKPKDIGGSKAPVPCFGP

SEQ ID NO: 7388 - protein, 351 aa, Homo sapiens
MWTPRPALHVHVILYSPIHRCYARADPTMGRIWVDAAVPCLEECGFLLHFRDGCYHLETSTHHFLSHVDRLFSQPSSQTAFHMQVRPGGLVALCDGEGGMLYPQGTHLLLGMGCNPMRGEEWFILQHCPTWVSLRSKTGRFISVIYDGEVRAASERLNRMSLFQFECDSESPTVQLRSANGYYLSQRRHRAVMADGHPLESDTFFRMHWNCGRIILQSCRGRFLGIAPNSLLMANVILPGPNEEFGILFANRSFLVLRGRYGYVGSSSGHDLIQCNQDQPDRIHLLPCRPGIYHFQGGILLVNNILWHLSPLGQVCPQLLYRASGEQLTHCTGPQWLLHASRPKWHPVGRQ

SEQ ID NO: 7389 - protein, 110 aa, Homo sapiens
MQISSEKEEDDNEKRQDPGDNWEEGGGGGGGMEKSSGPWNKTAPVQAPPAPVIVTETPEPAMTSGVYRPPGARLTTTRKTPQGPPEIYSDTQFPSLQSTAKHVESRKYLK

SEQ ID NO: 7390 - protein, 323 aa, Homo sapiens
MEGHDPKEPEQLRKLFIGGLSFETTDDSLREHFEKWGTLTDCVVMRDPQTKRSRGFGFVTYSCVEEVDAAMCARPHKVDGRVVEPKRAVSREDSVKPGAHLTVKKIFVGGIKEDTEEYNLRDYFEKYGKIETIEVMEDRQSGKKRGFAFVTFDDHDTVDKIVVQKYHTINGHNCEVKKALSKQEMQSAGSQRGRGGGSGNFMGRGGNFGGGGGNFGRGGGNYGGGPGYSSRGGYGGGGPGYGNQGGGYGGGGGYDGYNEGGNFGGGNYGGGGNYNDFGNYSGQQQSNYGPMKGGSFGGRSSGSPYGGGYGSGGGSGGYGSRRF

SEQ ID NO: 7391 - protein, 96 aa, Homo sapiens
NIQLVADGCCNLQKQIQITQLFGVPVVVALNVFKTDTRAEIDLVCELAKRAGAFDAVPCYHWSVGGKGSVDLARAVREAASKRSRFQFLYDVQPFS

SEQ ID NO: 7392 - protein, 160 aa, Homo sapiens
MTDVPATFTQAECNGDKPPENGQQTITKISEELTDVDSPLPHYRVEPSLEGALTKGSQEERRKLQGNMLLNSSMEDKMLKENPEEKLFIVHKAITDLSLQETSADEMTFREGHQWEKIPLSGSNQEIRRQKERITEQPLKEEEDEDRKNKGHQAAEIEWL

SEQ ID NO: 7393 - protein, 159 aa, Homo sapiens; identical to SEQ ID NO: 7300

SEQ ID NO: 7394 - protein, 143 aa, Homo sapiens
MDSSQQKTFRGHDAPVLSLSFDPKDIFLASASCDGSVRVWQISDQTCAISWPLLQKCNDVINAKSICRLAWQPKSGKLLAIPVEKSVKLYRRESWSHQFDLSDNFISQTLNIVTWSPCGQYLAAGSINGLIIVWNVETKDCME

SEQ ID NO: 7395 - protein, 702 aa, Homo sapiens
MTERCSLWSALSAAACCFYRGSFVQVQFSKEKYILDSSPEKLHKELEEELKLSSTDLRSHAWYHGRIPREVSETLVQRNGDFLIRDSLTSLGDYVLTCRWRNQALHFKINKVVVKAGESYTHIQYLFEQESFDHVPALVRYHVGSRKAVSEQSGAIIYCPVNRTFPLRYLEASYGLGQGSSKPASPVSPSGPKGSHMKRRSVTMTDGLTADKVTRSDGCPTSTSLPRPRDSIRSCALSMDQIPDLHSPMSPISESPSSPAYSTVTRVHAAPAAPSATALPASPVARRSSEPQLCPGSAPKTHGESDKGPHTSPSHTLGKASPSPSLSSYSDPDSGHYCQLQPPVRGSREWAATETSSQQARSYGERLKELSENGAPEGDWGKTFTVPIVEVTSSFNPATFQSLLIPRDNRPLEVGLLRKVKELLAEVDARTLARHVTKVDCLVARILGVTKEMQTLMGVRWGMELLTLPHGRQLRLDLLERFHTMSIMLAVDILGCTGSAEERAALLHKTIQLAAELRGTMGNMFSFAAVMGALDMAQISRLEQTWVTLRQRHTEGAILYEKKLKPFLKSLNEGKEGPPLSNTTFPHVLPLITLLECDSAPPEGPEPWGSTEHGVEVVLAHLEAARTVAHHGGLYHTNAEVKLQGFQARPELLEVFSTEFQMRLLWGSQGASSSQARRYEKFDKVLTALSHKLEPAVRSSEL

SEQ ID NO: 7396 - protein, 194 aa, Homo sapiens
MTEDSQRNFRSVYYEKVGFRGVEEKKSLEILLKDDRLGILPPHHESHAKVMMYRKEQYLDVLHALKVVRFVSDATPQAEVYLRMYQLESGKLPRSPSFPLEPDDEVFLAIAKAMEEMVEDSVDCYWITRRFVNQLNTKYRDSLPQLPKAFEQYLNLEDGRLLTHLRMCSAAPKLPYDLWFKRCFAGCLPESSLQ

SEQ ID NO: 7397 - protein, 777 aa, Homo sapiens
MEPKEATGKENMVTKKKNLAFLRSRLYMLERRKTDTVVESSVSGDHSGTLRRSQSDRTEYNQKLQEKMTPQGECSVAETLTPEEEHHMKRMMAKREKIIKELIQTEKDYLNDLELCVREVVQPLRNKKTDRLDVDSLFSNIESVHQISAKLLSLLEEATTDVEPAMQVIGEVFLQIKGPLEDIYKIYCYHHDEAHSILESYEKEEELKEHLSHCIQSLKKIYMQEGKPNLLDMGSLMIKPIQRVMKYPLLLCELRNSTPPSHPDYRALDDAFAAVKDINVNINELKRRKDLVLKYKKNDEDESLKDKLSKLNIHSISKKSKRVTNHLKILTRGESQVKDNTFNREEKLFRALEKTVRLCVKNISLCLQHIQDAMPLALQSVMDLQEISYNKDDEMDYSETLSNALNSCHDFASHLQRLILTPLSALLSLFPGPHKLIQKRYDKLLDCNSYLQRSTGEESDLAKKEYEALNAQLVEELQAFNQAARKILLNCLCSFITLLRDLMLVAQQAYSTLVPMPLLVSSISEIQNQVLEEIQNLNCVKENSATFIERKLSFEKKKPVQILPEMPHQTDIHRSKLLSTYSAEELYQAKRKCNATQEYDINLLEGDLVAVIEQKDPLGSTSRWLVDTGNVKGYVYSSFLKPYNPAKMQKVDAENRFCDDDFENISLFVSSRPASDSVTGTSESSIGDSSSSLSGTCGKFETNGTDVDSFQEVDEQIFYAVHAFQARSDHELSLQEYQRVHILRFCDLSGNKEWWLAEAQGQKGYVPANYLGKMTYA

SEQ ID NO: 7398 - protein, 180 aa, Homo sapiens
  VARIANT 1: note = X can be any amino acid
XSQPKSFENSPGDLGNSSLPTAGYKRAQTSGIEEETVKEKKRKGNKQSKHGPGRPKGNKNQENVSHLSVSSASPTSSVASAAGSITSSSLQKSPTLLRNGSLQSLSVGSSPVGSEISMQYRHDGACPTTSIYNSNDVAVSFPNVVSGSGSSTPVSSSHLPQQSSGHLQQVGALSPSAVSS

SEQ ID NO: 7399 - protein, 127 aa, Homo sapiens
MTTKNLETKVTVTSSPIRGAGDGMETEEPPKSVEVTSGVQSRKHHSLQSPWKKAVPSESPGVLQLGKMLTEKAMEVKAVRILVPKAAITHDIPNKNTKVKSLGHHKGEFLGQSEGVIEPNKELSEVK

SEQ ID NO: 7400 - protein, 560 aa, Homo sapiens
MSEHSRNSDQEELLDEEINEDEILANLSAEELKELQSEMEVMAPDPSLPVGMIQKDQTDKPPTGNFNHKSLVDYMYWEKASRRMLEEERVPVTFVKSEEKTQEEHEEIEKRNKNMAQYLKEKLNNEIVANKRESKGSSNIQETDEEDEEEEDDDDDDEGEDDGEESEETNREEEGKAKEQIRNCENNCQQVTDKAFKEQRDRPEAQEQSEKKISKLDPKKLALDTSFLKVSTRPSGNQTDLDGSLRRVRKNDPDMKELNLNNIENIPKEMLLDFVNAMKKNKHIKTFSLANVGADENVAFALANMLRENRSITTLNIESNFITGKGIVAIMRCLQFNETLTELRFHNQRHMLGHHAEMEIARLLKANNTLLKMGYHFELPGPRMVVTNLLTRNQDKQRQKRQEEQKQQQLKEQKKLIAMLENGLGLPPGMWELLGGPKPDSRMQEFFQPPPPRPPNPQNVPFSQRSEMMKKPSQAPKYRTDPDSFRVVKLKRIQRKSRMPEAREPPEKTNLKDVIKTLKPVPRNRPPPLVEITPRDQLLNDIRHSSVAYLKPVQLPKELA

SEQ ID NO: 7401 - protein, 16 aa, Homo sapiens
MCTSETFQALDTFEAR

SEQ ID NO: 7402 - protein, 170 aa, Homo sapiens
MPILLFLIDTSASMNQRSHLGTTYLDTAKGAVETFMKLRARDPASRGDRYMLVTFEEPPYAIKAGWKENHATFMNELKNLQAEGLTTLGQSLRTAFDLLNLNRLVTGIDNYGQGRNPFFLEPAIIITITDGSKLTTTSGVQDEAVHILCVLQECLISVWSPWCRKYKVGW

SEQ ID NO: 7403 - protein, 67 aa, Homo sapiens
MSRRRFDCRSISGLLTTTPQIPIKMENFNNFYILTSKELGRGKFAVVRQCISKSTGQEYAAKFLKKR

SEQ ID NO: 7404 - protein, 368 aa, Homo sapiens
MLSKRGCHARIYADFPIRRLISQRSSLETLEDIEENAPLRRCRTLSGSPRPKNFKKIHFIKNMRQHDTRNGRIVLISGRRSFCSIFSVLPYRDSTQVGDLKLDGGRQSTGAVSLKEIIGLEGVELGADGKTVSYTQFLLPTNAFGARRNTIDSTSSFSQFRNLSHRSLSIGRASGTQGSLDTGSDLGDFMDYDPNLLDDPQWPCGKHKRVLIFPSYMTTVIDYVKPSDLKKDMNETFKEKFPHIKLTLSKIRSLKREMRKLAQEDCGLEEPTVAMAFVYFEKLALKGKLNKQNRKLCAGACVLLAAKIGSDLKKHEVKHLIDKLEEKFRLNRRELIAFEFPVLVALEFALHLPEHEVMPHYRRLVQSS

SEQ ID NO: 7405 - protein, 264 aa, Homo sapiens
MTDVPATFTQAECNGDKPPENGQQTITKISEELTDVDSPLPHYRVEPSLEGALTKGSQEERRKLQGNMLLNSSMEDKMLKETSADEMTFREGHQWEKIPLSGSNQEIRRQKERITEQPLKEEEDEDRKNKGHQAAEIEWLGFRKPSQADMLHSKHDEEQKVWDEEIDDDDDDNCNNDEDEVRVIEFKKKHEEVSQFKEEGDASEDSPLSSASSQAVTPDEQPTLGKKSDISRNAYSRYNTISYRKIRKGNTKQRIDEFESMMHL

SEQ ID NO: 7406 - protein, 1432 aa, Homo sapiens; identical to SEQ ID NO: 5248

SEQ ID NO: 7407 - protein, 269 aa, Homo sapiens
MFPALETHLKQTIPDPYEDFMYRHLQYYGYFKAQRGSLPNSATHQHVRKNNPQCLLNGSLGEKDDLIPDTLQKEKLLYSHMLSLPHLRSRQLLYDELDEVNPRLREPQELFSILSTKRPLQAPRWPIECEVIKENIHHIEWAPPQPEYFYQPKGNEKVPEIVGEKKGTVVYQLDSVPIEGSYFTSSRVGGKRGIVKELAVTLQGPEDNTLLFESRFESGNLQKAVRVDPMSMNSPCELTSTLTNTLSGFIFVFRTPEKMLPIASPLSTC

SEQ ID NO: 7408 - protein, 324 aa, Homo sapiens
MPLQVSDYSWQQTKTAVFLSLPLKGVCVRDTDVFCTENYLKVNFPPFLFEAFLYAPIDDESSKAKIGNDTIVFTLYKKEAAMWETLSVTGVDKEMMQRIREKSILQAQERAKEATEAKAAAKREDQKYALSVMMKIEEEERKKIEDMKENERIKATKALEAWKEYQRKAEEQKKIQREEKLCQKEKQIKEERKKIKYKSLTRNLASRNLAPKGRNSENIFTEKLKEDSIPAPRSVGSIKINFTPRVFPTALRESQVAEEEEWLHKQAEARRAMNTDIAELCDLKEEEKNPEWLKDKGKPERCLKIPVTVIHLVVGLSSVMRGQI

SEQ ID NO: 7409 - protein, 53 aa, Homo sapiens
MQTSSSRSVHLSEWQKNYFAITSGICTGPKADAYRAQILRIQYAWANSEISQV

SEQ ID NO: 7410 - protein, 692 aa, Homo sapiens
MVTTLGPKMAAEWGGGVGYSGSGPGRSRWRWSGSVWVRSVLLLLGGLRASATSTPVSLGSSPPCRHHVPSDTEVINKVHLKANHVVKRDVDEHLRIKTVYDKSVEELLPEKKNLVKNKLFPQAISYLEKTFQVRRPAGTILLSRQCATNQYLRKENDPHRYCTGECAAHTKCGPVIVPEEHLQQCRVYRGGKWPHGAVGVPDQEGISDADFVLYVGALATERCSHENIISYAAYCQQEANMDRPIAGYANLCPNMISTQPQEFVGMLSTVKHEVIHALGFSAGLFAFYHDKDGNPLTSRFADGLPPFNYSLGLYQWSDKVVRKVERLWDVRDNKIVRHTVYLLVTPRVVEEARKHFDCPVLEGMELENQGGVGTELNHWEKRLLENEAMTGSHTQNRVLSRITLALMEDTGWYKANYSMAEKLDWGRGMGCDFVRKSCKFWIDQQRQKRQMLSPYCDTLRSNPLQLTCRQDQRAVAVCNLQKFPKPLPQEYQYFDELSGIPAEDLPYYGGSVEIADYCPFSQEFSWHLSGEYQRSSDCRILENQPEIFKNYGAEKYGPHSVCLIQKSAFVMEKCERKLSYPDWGSGCYQVSCSPQGLKVWVQDTSYLCSRAGQVLPVSIQMNGWIHDGNLLCPSCWDFCELCPPETDPPATNLTRALPLDLCSCSSSLVVTLWLLLGNLFPLLAGFLLCIWH

SEQ ID NO: 7411 - protein, 1006 aa, Homo sapiens
MDSSQQKTFRGHDAPVLSLSFDPKDIFLASASCDGSVRVWQISDQTCAISWPLLQKCNDVINAKSICRLAWQPKSGKLLAIPVEKSVKLYRRESWSHQFDLSDNFISQTLNIVTWSPCGQYLAAGSINGLIIVWNVETKDCMERVKHEKGYAICGLAWHPTCGRISYTDAEGNLGLLENVCDPSGKTSSSKVSSRVEKDYNDLFDGDDMSNAGDFLNDNAVEIPSFSKGIINDDEDDEDLMMASGRPRQRSHILEDDENSVDISMLKTGSSLLKEEEEDGQEGSIHNLPLVTSQRPFYDGPMPTPRQKPFQSGSTPLHLTHRFMVWNSIGIIRCYNDEQDNAIDVEFHDTSIHHATHLSNTLNYTIADLSHEAILLACESTDELASKLHCLHFSSWDSSKEWIIDLPQNEDIEAICLGQGWAAAATSALLLRLFTIGGVQKEVFSLAGPVVSMAGHGEQLFIVYHRGTGFDGDQCLGVQLLELGKKKKQILHGDPLPLTRKSYLAWIGFSAEGTPCYVDSEGIVRMLNRGLGNTWTPICNTREHCKGKSDHYWVVGIHENPQQLRCIPCKGSRFPPTLPRPAVAILSFKLPYCQIATEKGQMEEQFWRSVIFHNHLDYLAKNGYEYEESTKNQATKEQQELLMKMLALSCKLEREFRCVELADLMTQNAVNLAIKYASRSRKLILAQKLSELAVEKAAELTATQVEEEEEEEDFRKKLNAGYSNTATEWSQPRFRNQVEEDAEDSGEADDEEKPEIHKPGQNSFSKSTNSSDVSAKSGAVTFSSQGRVNPFKVSASSKEPAMSMNSARSTNILDNMGKSSKKSTALSRTTNNEKSPIIKPLIPKPKPKQASAASYFQKRNSQTNKTEEVKEENLKNVLSETPAICPPQNTENQRPKTGFQMWLEENRSNILSDNPDFSDEADIIKEGMIRFRVLSTEERKVWANKAKGETASEGTEAKKRKRVVDESDETENQEEKAKENLNLSKKQKPLDFSTNQKLSAFAFKQE

SEQ ID NO: 7412 - protein, 179 aa, Homo sapiens
MTEDSQRNFRSVYYEKVGFRGVEEKKSLEILLKDDRLDTEKLCTFSQRFPLPSMYRALVWKVLLGILPPHHESHAKVMMYRKEQYLDVLHALKVVRFVSDATPQAEVYLRMYQLESGKLPRSPSFPLEPDDEVFLAIAKAMEEMVEDSVDCYWITRRFVNQLNTKYRDSLPQLEGINVG

SEQ ID NO: 7413 - protein, 1062 aa, Homo sapiens
MISKGGSEALLQTLVDTARTAPPDYDILLPLFRLLAKVGLRDKKIGRKALELEALDVTLILARKNLSHGQNLLHCLWALRVFASSVSMGAMLGINGAMELLFKVITPYTRKRTQAIRAATEVLAALLKSKSNGRRAVNRGYVTSLLGLHQDWHSHDTANAYVQIRRGLLLCLRHIAALRSGREAFLAAQGMEILFSTTQNCLDDKSMEPVISVVLQILRQCYPTSPLPLVTASSAYAFPVPGCITTEPPHDLPEEDFEDDGDDEVDKDSDTEDGKVEDDDLETDVNKLSSKPGLDRPEEELMQYEVMCLELSYSFEELQSKLGDDLNSEKTQYANHHHIPAAASSKQHCYSKDQSSCGQEREYAVQTSLLCRVKTGRSTVHLGSKKNPGVNLYQNVQSNSLRRDSSESEIPDIQASPKADAWDVDAIFCPRMSASFSNSTRTREVVKVIDKLLQTHLKRVPFHDPYLYMAKARRTSSVVDFKMMAFPDVWGHCPPPTTQPMLERKCGVQRIRIFEDIRRLIQPSDVINKVVFSLDEPWPLQDNASNCLRFFSKFESGNLRKAIQVREFEYDLLVNADVNSTQHQQWFYFKVSGMQAAIPYHFNIINCEKPNSQFNYGMQPTLYSVKEALLGKPTWIRTGHEICYYKNHYRQSTAVAGGASGKCYYTLTFAVTFPHSEDVCYLAYHYPYTYTALMTHLDILEKSVNLKEVYFRQDVLCQTLGGNPCPLVTITAMPESNSDEHLEQFRHRPYQVITARVHPGESNASWVMKGTLEFLVSSDPVARLLRENFIFKIIPMLNPDGVINGNHRCSLSGEDLNRQWLSPSAHLQPTIYHAKGLLYHLSSIGRSPVVFCDFHGHSQKKNVFLYGCSIKETLWQAACTVGTSTILEEVNYRTLPKILDKLAPAFTMSSCSFLVEKSRASTARVVVWREMGVSRSYTMESSYCGCNQGPYQCTQRLLERTKNERAHPVDGLQGLQFGTRELEEMGAMFCLGLLILELKSASCSHQLLAQAATLLSAEEDALDQHLQRLKSSNFLPKHIWFAYHFFAITNFFKMNLLLHVSP

SEQ ID NO: 7414 - protein, 244 aa, Homo sapiens
MAAAPPSYCFVAFPPRAKDGLVVFGKNSARPRDEVQEVVYFSAADHEPESKVECTYISIDQVAAYAIMISRPAWLWGAEMGANEHGVCIANEAINTREPAAEIEALLGMDLVRLGLERGETAKEALDVIVSLLEEHGQGGNYFEDANSCHSFQSAYLIVDRDEAWVLETIGKYWAAEKVTEGVRCICSQLSLTTKMDAEHPELRSYAQSQGWWTGEGEFNFSEVFSPVEDHLDCGAGKDSLEKQ

SEQ ID NO: 7415 - protein, 32 aa, Homo sapiens
MSEQGDLNQAIAEEGGTEQETATPENGIVKSE

SEQ ID NO: 7416 - protein, 43 aa, Homo sapiens
  VARIANT 1: note = X can be any amino acid
XVLGSPKPEEIPLTWIQPGTTVLNCSHDFLSESLIIIRRMAIF

SEQ ID NO: 7417 - protein, 112 aa, Homo sapiens
MFAKLKKKIAEETAVAQRPGGATRIPRSVSKESVASMGADSGDDFASDGSSSREDLSSQLLRRNEQIRKLEARLSDYAEQVRNLQKIKEKLEIALEKHQDSSMRKFQEQNET

SEQ ID NO: 7418 - protein, 192 aa, Homo sapiens; identical to SEQ ID NO: 6709

SEQ ID NO: 7419 - protein, 485 aa, Homo sapiens
MAPRLQLEKAAWRWAETVRPEEVSQEHIETAYRIWLEPCIRGVCRRNCKGNPNCLVGIGEHIWLGEIDENSFHNIDDPNCERRKKNSFVGLTNLGATCYVNTFLQVWFLNLELRQALYLCPSTCSDYMLGDGIQEEKDYEPQTICEHLQYLFALLQNSNRRYIDPSGFVKALGLDTGQQQDAQEFSKLFMSLLEDTLSKQKNPDVRNIVQQQFCGEYAYVTVCNQCGRESKLLSKFYELELNIQGHKQLTDCISEFLKEEKLEGDNRYFCENCQSKQNATRKIRLLSLPCTLNLQLMRFVFDRQTGHKKKLNTYIGFSEILDMEPYVEHKGGSYVYELSAVLIHRGVSAYSGHYIAHVKDPQSGEWYKFNDEDIEKMEGKKLQLGIEEDLAEPSKSQTRKPKCGKGTHCSRNAYMLVYRLQTQEKPNTTVQVPAFLQELVDRDNSKFEEWCIEMAEMRKQSVDKGKAKHEEVKELYQRLPAGAGL

SEQ ID NO: 7420 - protein, 372 aa, Homo sapiens; identical to SEQ ID NO: 5421

SEQ ID NO: 7421 - protein, 515 aa, Homo sapiens [sequence omitted]

SEQ ID NO: 7422 - protein, 144 aa, Homo sapiens
MSSPLASLSKTRKVPLPSEPMNPGRRGIRIYGDEDEVDMLSDGCGSEEKISVPSCYGGIGAPVSRQVPASHDSELMAFMTRKLWDLEQQVKAQTDEILSKDQKIAALEDLVQTLRPHPAEATLQRQEELETMCVQLQRQVREME

SEQ ID NO: 7423 - protein, 348 aa, Homo sapiens
MPAPPCASCHAARAALRRPLSGQALCGACFCAAFEAEVLHTVLAGRLLPPGAVVAVGASGGKDSTVLAHVLRALAPRLGISLQLVAVDEGIGGYRDAALAAVRRQAARWELPLTVVAYEDLFGGWTMDAVARSTAGSGRSRSCCTFCGVLRRRALEEGARRVGATHIVTGHNADDMAETVLMNFLRGDAGRLARGGGLGSPGEGGALPRCRPLQFASQKEVVLYAHFRRLDYFSEECVYAPEAFRGHARDLLKRLEAARPSAVLDLVHSAERLALAPAARPPRPGACSRCGALASRALCQACALLDGLNRGRPRLAIGKGRRGLDEEATPGTPGDPARPPASKAVPTF

SEQ ID NO: 7424 - protein, 106 aa, Homo sapiens
MPEDQVGKLEATENTISAMAAAAAEQQQFYLLLGNLLSPDNVVRKQAEETYENIPGQSKITFLLQAIRNTTAAEEARQMAAVLLRRLLSSAFDEVYPALPSDVQTA

SEQ ID NO: 7425 - protein, 65 aa, Homo sapiens
MELRCGGLLFSSRFDSGNLAHVEKVESLSSDGEGVGGGASALTSGIASSPDYEFNVWTRPDCAET

SEQ ID NO: 7426 - protein, 456 aa, Homo sapiens; identical to SEQ ID NO: 7230

SEQ ID NO: 7427 - protein, 424 aa, Homo sapiens
MDQPSGRSFMQVLCEKYSPENFPYRRGPGMGVHVPATPQGSPMKDRLNLPSVLVLNSCGITCAGDEKEIAAFCAHVSELDLSDNKLEDWHEVSKIVSNVPQLEFLNLSSNPLNLSVLERTCAGSFSGVRKLVLNNSKASWETVHMILQELPDLEELFLCLNDYETVSCPSICCHSLKLLHITDNNLQDWTEIRKLGVMFPSLDTLVLANNHLNAIEEPDDSLARLFPNLRSISLHKSGLQSWEDIDKLNSFPKLEEVRLLGIPLLQPYTTEERRKLVIARLPSVSKLNGSVVTDGEREDSERFFIRYYVDVPQEEVPFRYHELITKYGKLEPLAEVDLRPQSSAKVEVHFNDQVEEMSIRLDQTVAELKKQLKTLVQLPTSNMLLYYFDHEAPFGPEEMKYSSRALHSFGIRDGDKIYVESKTK

SEQ ID NO: 7428 - protein, 87 aa, Homo sapiens
MSISSDEVNFLVYRYLQESGFSHSAFTFGIESHISQSNINGALVPPAALISIIQKGLQYVEAEVSINEDGTLFDGRPIESLSLIDAV

SEQ ID NO: 7429 - protein, 119 aa, Homo sapiens; identical to SEQ ID NO: 5576

SEQ ID NO: 7430 - protein, 7986 aa, Homo sapiens
MDQPQFSGAPRFLTRPKAFVVSVGKDATLSCQIVGNPTPQVSWEKDQQPVAAGARFRLAQDGDLYRLTILDLALGDSGQYVCRARNAIGEAFAAVGLQVDAEAACAEQAPHFLLRPTSIRVREGSEATFRCRVGGSPRPAVSWSKDGRRLGEPDGPRVRVEELGEASALRIRAARPRDGGTYEVRAENPLGAASAAAALVVDSDAADTASRPGTSTAALLAHLQRRREAMRAEGAPASPPSTGTRTCTVTEGKHARLSCYVTGEPKPETVWKKDGQLVTEGRRHVVYEDAQENFVLKILFCKQSDRGLYTCTASNLVGQTYSSVLVVVREPAVPFKKRLQDLEVREKESATFLCEVPQPSTEAAWFKEETRLWASAKYGIEEEGTERRLTVRNVSADDDAVYICETPEGSRTVAELAVQGNLLRKLPRKTAVRVGDTAMFCVELAVPVGPVHWLRNQEEVVAGGRVAISAEGTRHTLTISQCCLEDVGQVAFMAGDCQTSTQFCVSAPRKPPLQPPVDPVVKARMESSVILSWSPPPHGERPVTIDGYLVEKKKLGTYTWIRCHEAEWVATPELTVADVAEEGNFQFRVSALNSFGQSPYLEFPGTVHLAPKLAVRTPLKAVQAVEGGEVTFSVDLTVASAGEWFLDGQALKASSVYEIHCDRTRHTLTIREVPASLHGAQLKFVANGIESSIRMEVRAAPGLTANKPPAAAAREVLARLHEEAQLLAELSDQAAAVTWLKDGRTLSPGPKYEVQASAGRRVLLVRDVARDDAGLYECVSRGGRIAYQLSVQGLARFLHKDMAGSCVDAVAGGPAQFECETSEAHVHVHWYKDGMELGHSGERFLQEDVGTRHRLVAATVTRQDEGTYSCRVGEDSVDFRLRVSEPKVVFAKEQLARRKLQAEAGASATLSCEVAQAQTEVTWYKDGKKLSSSSKVCMEATGCTRRLVVQQAGQADAGEYSCEAGGQRLSFHLDVKEPKVVFAKDQVAHSEVQAEAGASATLSCEVAQAQTEVMWYKDGKKLSSSLKVHVEAKGCRRRLVVQQAGKTDAGDYSCEARGQRVSFRLHITEPKMMFAKEQSVHNEVQAEAGASAMLSCEVAQAQTEVTWYKDGKKLSSSSKVGMEVKGCTRRLVLPQAGKADAGEYSCEAGGQRVSFHLHITEPKGVFAKEQSVHNEVQAEAGTTAMLSCEVAQPQTEVTWYKDGKKLSSSSKVRMEVKGCTRRLVVQQVGKADAGEYSCEAGGQRVSFQLHITEPKAVFAKEQLVHNEVRTEAGASATLSCEVAQAQTEVTWYKDGKKLSSSSKVRIEAAGCMRQLVVQQAGQADAGEYTCEAGGQRLSFHLDVSEPKAVFAKEQLAHRKVQAEAGAIATLSCEVAQAQTEVTWYKDGKKLSSSSKVRMEAVGCTRRLVVQQACQADTGEYSCEAGGQRLSFSLDVAEPKVVFAKEQPVHREVQAQAGASTTLSCEVAQAQTEVMWYKDGKKLSFSSKVRMEAVGCTRRLVVQQAGQAVAGEYSCEAGSQRLSFHLHVAEPKAVFAKEQPASREVQAEAGTSATLSCEVAQAQTEVTWYKDGKKLSSSSKVRMEAVGCTRRLVVQEAGQADAGEYSCKAGDQRLSFHLHVAEPKVVFAKEQPAHREVQAEAGASATLSCEVAQAQTEVTWYKDGKKLSSSSKVRVEAVGCTRRLVVQQAGQAEAGEYSCEAGGQQLSFRLQVAELEPQISERPCRREPLVVKEHEDIILTATLATPSAATVTWLKDGVEIRRSKRHETASQGDTHTLTVHGAQVLDSAIYSCRVGAEGQDFPVQVEEVAAKFCRLLEPVCGELGGTVTLACELSPACAEVVWRCGNTQLRVGKRFQMVAEGPVRSLTVLGLRAEDAGEYVCESRDDHTSAQLTVSVPRVVKFMSGLSTVVAEEGGEATFQCVVSPSDVAVVWFRDGALLQPSEKFAISQSGASHSLTISDLVLEDAGQITVEAEGASSSAALRVREAPVLFKKKLEPQTVEERSSVTLEVELTRPWPELRWTRNATALAPGKNVEIHAEGARHRLVLHNVGFADRGFFGCETPDDKTQAKLTVEMRQVRLVRGLQAVEAREQGTATMEVQLSHADVDGSWTRDGLRFQQGPTCHLAVRGPMHTLTLSGLRPEDSGLMVFKAEGVHTSARLVVTELPVSFSRPLQDVVTTEKEKVTLECELSRPNVDVRWLKDGVELRAGKTMAIAAQGACRSLTIYRCEFADQGVYVCDAHDAQSSASVKVQGRTYTLIYRRVLAEDAGEIQFVAENAESRAQLRVKELPVTLVRPLRDKIAMEKHRGVLECQVSRASAQVRWFKGSQELQPGPKYELVSDGLYRKLIISDVHAEDEDTYTCDAGDVKTSAQFFVEEQSITIVRGLQDVTVMEPAPAWFECETSIPSVRPPKWLLGKTVLQAGGNVGLEQEGTVHRLMLRRTCSTMTGPVHFTVGKSRSSARLVVSDIPVVLTRPLEPKTGRELQSVVLSCDFRPAPKAVQWYKDDTPLSPSEKFKMSLEGQMAELRILRLMPADAGVYRCQAGSAHSSTEVTVEAREVTVTGPLQDAEATEEGWASFSCELSHEDEEVEWSLNGMPLYNDSFHEISHKGRRHTLVLKSIQRADAGIVRASSLKVSTSARLEVRVKPVVFLKALDDLSAEERGTLALQCEVSDPEAHVVWARGSDGVQLGPSDKYDFLHTAGTRGLVVHDVSPEDAGLYTCHVGSEETRARVRVHDLHVGITKRLKTMEVLEGESCSFECVLSHESASDPAMWTVGGKTVGSSSRFQATRQGARGSYILVVREAAPSDAGEVVFSVRGLTSKASLIVRERPAAIIKPLEDQWVAPGEDVELRCELSRAGTPVHWLKDRKAIRKSQKYDVVCEGTMAMLVIRGASLKDAGEYTCEVEASKSTASLHVEEKANCFTEELTNLQVEEKGTAVFTCKTEHPAATVTWRKGLLELRASGKHQPSQEGLTLRLTISALEKADSDTYTCDIGQAQSRAQLLVQGRRVHIIEDLEDVDVQEGSSATFRCRISPANYEPVHWFLDKTPLHANELNEIDAQPGGYHVLTLRQLALKDSGTIYFEAGDQRASAALRVTEKPSVFSRELTDATITEGEDLTLVCETSTCDIPVCWTKDGKTLRGSARCQLSHEGHRAQLLITGATLQDSGRYKCEAGGACSSSIVRVHARPVRFQEALKDLEVLEGGAATLRCVLSSVAAPVKWCYGNNVLRPGDKYSLRQEGAMLELVVRNLRPQDSGRYSCSFGDQTTSATLTVTALPAQFIGKLRNKEATEGATATLRCELSKAAPVEWRKGSETLRDGDRYCLRQDGAMCELQIRGLAMVDAAEYSCVCGEERTSASLTIRPMPAHFIGRLRHQESIEGATATLRCELSKAAPVEWRKGRESLRDGDRHSLRQDGAVCELQICGLAVADAGEYSCVCGEERTSATLTVKALPAKFTEGLRNEEAVEGATAMLWCELSKVAPVEWRKGPENLRDGDRYILRQEGTRCELQICGLAMADAGEYLCVCGQERTSATLTIRALPARFIEDVKNQEAREGATAVLQCELNSAAPVEWARGSGSETLRDGDRYSLRQDGTKCELQIRGLAMADTGEYSCVCGQERTSAMLTVRALPIKFTEGLRNEEATEGATAVLRCELSKMAPVEWWKGHETLRDGDRHSLRQDGARCELQIRGLVAEDAGEYLCMCGKERTSAMLTVRAMPSKFIEGLRNEEATEGDTATLWCELSKAAPVEWRKGHETLRDGDRHSLRQDGSRCELQIRGLAVVDAGEYSCVCGQERTSATLTVRALPARFIEDVKNQEAREGATAVLQCELSKAAPVEWRKGSETLRGGDRYSLRQDGTRCELQIHGLSVADTGEYSCVCGQERTSATLTVRAPQPVFREPLQSLQAEEGSTATLQCELSEPTATVVWSKGGLQLQANGRREPRLQGCTAELVLQDLQREDTGEYTCTCGSQATSATLTVTAAPVRFLRELQHQEVDEGGTAHLCCELSRAGASVEWRKGSLQLFPCAKYQMVQDGAAAELLVRGVEQEDAGDYTCDTGHTQSMASLSVRVPRPKFKTRLQSLEQETGDIARLCCQLSDAESGAVVQWLKEGVELHAGPKYEMRSQGATRELLIHQLEAKDTGEYACVTGGQKTAASLRVTEPEVTIVRGLVDAEVTADEDVEFSCEVSRAGATGVQWCLQGLPLQSNEVTEVAVRDGRIHTLRLKGVTPEDAGTVSFHLGNHASSAQLTVRAPEVTILEPLQDVQLSEGQDASFQCRLSRASGQEARWALGGVPLQANEMNDITVEQGTLHLLTLHKVTLEDAGTVSFHVGTCSSEAQLKVTAKNTVVRGLENVEALEGGEALFECQLSQPEVAAHTWLLDDEPVHTSENAEVVFFENGLRHLLLLKNLRPQDSCRVTFLAGDMVTSAFLTVRGWRLEILEPLKNAAVRAGAQACFTCTLSEAVPVGEASWYINGAAVQPDDSDWTVTADGSHHALLLRSAQPHHAGEVTFACRDAVASARLTVLGLPDPPEDAEVVARSSHTVTLSWAAPMSDGGGGLCGYRVEVKEGATGQWRLCHELVPGPECVVDGLAPGETYRFRVAAVGPVGAGEPVHLPQTVRLAEPPKPVPPQPSAPESRQVAAGEDVSLELEVVAEAGEVIWHKGMERIQPGGRFEVVSQGRQQMLVIKGFTAEDQGEYHCGLAQGSICPAAATFQVALSPASVDEAPQPSLPPEAAQEGDLHLLWEALAARGSRRMSREPTLDSISELPEEDGRSQRLPQEAEEVAPDLSEGYSTADELARTGDADLSHTSSDDESRAGTPSLVTYLKKAGRPGTSPLASKVGAPAAPSVKPQQQQEPLAAVRPPLGDLSTKDLGDPSMDKAAVKIQAAFKGYKVRKEMKQQEGPMFSHTFGDTEAQVGDALRLECVVASKADVRARWLKDGVELTDGRHHHIDQLGDGTCSLLITGLDRADAGCYTCQVSNKFGQVTHSACVVVSGSESEAESSSGGELDDAFRRAARRLHRLFRTKSPAEVSDEELFLSADEGPAEPEEPADWQTYREDEHFICIRFEALTEARQAVTRFQEMFATLGIGVEIKLVEQGPRRVEMCISKETPAPVVPPEPLPSLLTSDAAPVFLTELQNQEVQDGYPVSFDCVVTGQPMPSVRWFKDGKLLEEDDHYMINEDQQGGHQLIITAVVPADMGVYRCLAENSMGVSSTKAELRVDLTSTDYDTAADATESSSYFSAQGYLSSREQEGTESTTDEGQLPQVVEELRDLQVAPGTRLAKFQLKVKGYPAPRLYWFKDGQPLTASAHIRMTDKKILHTLEIISVTREDSGQYAAYISNAMGAAYSSARLLVRGPDEPEEKPASDVHEQLVPPRMLERFTPKKVKKGSSITFSVKVEGRPVPTVHWLREEAERGVLWIGPDTPGYTVASSAQQHSLVLLDVGRQHQGTYTCIASNAAGQALCSASLHVSGLPKVEEQEKVKEALISTFLQGTTQAISAQGLETASFADLGGQRKEEPLAAKEALGHLSLAEVGTEEFLQKLTSQITEMVSAKITQAKLQVPGGDSDEDSKTPSASPRHGRSRPSSSIQESSSESEDGDARGEIFDIYVVTADYLPLGAEQDAITLREGQYVEVLDAAHPLRWLVRTKPTKSSPSRQGWVSPAYLDRRLKLSPEWGAAEAPEFPGEAVSEDEYKARLSSVIQELLSSEQAFVEELQFLQSHHLQHLERCPHVPIAVAGQKAVIFRNVRDIGRFHSSFLQELQQCDTDDDVAMCFIKNQAAFEQYLEFLVGRVQAESVVVSTAIQEFYKKYAEEALLAGDPSQPPPPPLQHYLEQPVERVQRYQALLKELIRNKARNRQNCALLEQAYAVVSALPQRAENKLHVSLMENYPGTLQALGEPIRQGHFIVWEGAPGARMPWKGHNRHVFLFRNHLVICKPRRDSRTDTVSYVFRNMMKLSSIDLNDQVEGDDRAFEVWQEREDSVARGSYLLQARTAIIKSSWVKEICGIQQRLALPVWRPPDFEEELADCTAELGETVKLACRVTGTPKPVISWYKDGKAVQVDPHHILIEDPDGSCALILDSLTGVDSGQYMCFAASAAGNCSTLGKILVQVPPRFVNKVRASPFVEGEDAQFTCTIEGAPYPQIRWYKDGALLTTGNKFQTLSEPRSGLLVLVIRAASKEDLGLYECELVNRLGSARASAELRIQSPMLQAQEQCHREQLVAAVEDTTLERADQEVTSVLKRLLGPKAPGPSTGDLTGPGPCPRGAPALQETGSQPPVTGTSEAPAVPPRVPQPLLHEGPEQEPEAIARAQEWTVPIRMEGAAWPGAGTGELLWDVHSHVVRETTQRTYTYQAIDTHTARPPSMQVTIEDVQAQTGGTAQFEAIIEGDPQPSVTWYKDSVQLVDSTRLSQQQEGTTYSLVLRHVASKDAGVYTCLAQNTGGQVLCKAELLVLGGDNEPDSEKQSHRRKLHSFYEVKEEIGRGVFGFVKRVQHKGNKILCAAKFIPLRSRTRAQAYRERDILAALSHPLVTGLLDQFETRKTLILILELCSSEELLDRLYARGSGVVTEAEVKVYIQQLVEGLHYLHSHGVLHLDIKPSNILMVHPAREDIKICDFGFAQNITPAELQFSQYGSPEFVSPEIIQQNPVSEASDIWAMGVISYLSLTCSSPFAGESDRATLLNVLEGRVSWSSPMAAHLSEDAKDFIKATLQRAPQARPSAAQCLSHPWFLKSMPAEEAHFINTKQLKFLLARSRWQRSLMSYKSILVMRSIPELLRGPPDSPSLGVARHLCRDTGGSSSSSSSSDNELAPFARAKSLPPSPVTHSPLLHPRGFLRPSASLPEEAEASERSTEAPAPPASPEGAGPPAAQGCVPRHSVIRSLFYHQAGESPEHGALAPGSRRHPARRRHLLKGGYIAGALPGLREPLMEHRVLEEEAAREEQATLLAKAPSFETALRLPASGTHLAPGHSHSLEHDSPSTPRPSSEACGEAQRLPSAPSGGAPIRDMGHPQGSKQLPSTGGHPGTAQPERPSPDSPWGQPAPFCHPKQGSAPQEGCSPHPAVAPCPPGSFPPGSCKEAPLVPSSPFLGQPQAPPAPAKASPPLDSKMGPGDISLPGRPKPGPCSSPGSASQASSSQVSSLRVGSSQVGTEPGPSLDAEGWTQEAEDLSDSTPTLQRPQEQATMARGSFSLGGRGGYAGVAGYGTFAFGGDAGGMLGQGPMWARIAWAVSQSEEEEQEEARAESQSEEQQEARAESPLPQVSARPVPEVGRAPTRSSPEPTPWEDIGQVSLVQIRDLSGDAEAADTISLDISEVDPAYLNLSDLYDIKYLPFEFMIFRKVPKSAQPEPPSPMAEEELAEFPEPTWPWPGELGPHAGLEITEESEDVDALLAEAAVGARGSRKWSSPSRSLFHFPGRHLPLDEPAELGLRERVKASVEHISRILKGRPEGLEKEGPPRKKPGLASFRLSGLKSWDRAPTFLRELSDETVVLGQSVTLACQVSAQPAAQATWSKDGAPLESSSRVLISATLKNFQLLTILVVVAEDLGVYTCSVSNALGTVTTTGVLRKAERPSSSPCPDIGEVYADGVLLVWKPVESYGPVTYIVQCSLEGGSWTTLASDIFDCCYLTSKLSRGGTYTFRTACVSKAGMGPYSSPSEQVLLGGPSHLASEEESQGRSAQPLPSTKTFAFQTQIQRGRFSVVRQCWEKASGRALAAKIIPYHPKDKTAVLREYEALKGLRHPHLAQLHAAYLSPRHLVLILELCSGPELLPCLAERASYSESEVKDYLWQMLSATQYLHNQHILHLDLRSENMIITEYNLLKVVDLGNAQSLSQEKVLPSDKFKDYLETMAPELLEGQGAVPQTDIWAIGVTAFIMLSAEYPVSSEGARDLQRGLARGSGLVRLSRCYAGLSGGAVAFLRSTLCAQPWGRPCASSCLQCPWLTEEGPACSRPAPVTFPTARLRVFVRNREKRRALLYKRHNLAQVR

SEQ ID NO: 7431 - protein, 249 aa, Homo sapiens
MTEDSQRNFRSVYYEKVGFRGVEEKKSLEILLKDDRLDTEKLCTFSQRFPLPSMYRALVWKVLLGILPPHHESHAKVMMYRKEQYLDVLHALKVVRFVSDATPQAEVYLRMYQLESGKLPRSPSFPLEPDDEVFLAIAKAMEEMVEDSVDCYWITRRFVNQLNTKYRDSLPQLPKAFEQYLNLEDGRLLTHLRMCSAAPKLPYDLWFKRCFAGCLPESSLQRVWDKVVSGSCKILVFVAVEILLTFKIK

SEQ ID NO: 7432 - protein, 138 aa, Homo sapiens
MSSLGASFVQIKFDDLQFFENCGGGSFGSVYRAKWISQDKEVAVKKLLKIEKEAEILSVLSHRNIIQFYGVILEPPNYGIVTEYASLGSLYDYINSNRSEEMDMDHIMTWATDVAKGMHYLHMEAPVKVIHRDLKSRN

SEQ ID NO: 7433 - protein, 373 aa, Homo sapiens
MASSSVPPATVSAATAGPGPGFGFASKTKKKHFVQQKVKVFRAADPLVGVFLWGVAHSINELSQVPPPVMLLPDDFKASSKIKVNNHLFHRENLPSHFKFKEYCPQVFRNLRDRFGIDDQDYLYIVKCHGNTLLPQFLGMYRVSVDNEDSYMLVMRNMFSHRLPVHRKYDLKGSLVSREASDKEKVKELPTLKDMDFLNKNQKVYIGEEEKKIFLEKLKRDVEFLVQLKIMDYSLLLGIHDIIRGSEPEEEAPVREDESEVDGDCSLTGPPALVGSYGTSPEGIGGYIHSHRPLGPGEFESFIDVYAIRSAEGAPQKEVYFMGLIDILTQYDAKKKAAHAAKTVKHGAGAEISTVHPEQYAKRFLDFITNIFA

SEQ ID NO: 7434 - protein, 182 aa, Homo sapiens
MEEIPAQEAAGSPRVQFQSLETQSECLSPEPQFVQDTDMEQGLTGGFPISKPDGISQLEQDLQVFDLETKTREVLRDDCSDGETREENKLLIPKQKISEEVHSYKVRVGRLKHDITQVPETREVYKSEDRLERLQEILRKFLYLEREFRQITISKETFTSEKNNECHEPEKSFSLDSTIDAD

SEQ ID NO: 7435 - protein, 750 aa, Homo sapiens
MSLGKAYGVESHVLSPAETKTLYPLMNVDDLYGTLYVPHDGTMDPAGTCTTLARAASARGAQVIENCPVTGIRVWTDDFGVRRVAGVETQHGSIQTPCVVNCAGVWASAVGRMAGVKVPLVAMHHAYVVTERIEGIQNMPNVRDHDASVYLRLQGDALSVGGYEANPIFWEEVSDKFAFGLFDLDWEVFTQHIEGAINRVPVLEKTGIKSTVCGPESFTPDHKPLMGEAPELRGFFLGCGFNSAGMMLGGGCGQELAHWIIHGRPEKDMHGYDIRRFHHSLTDHPRWIRERSHESYAKNYSVVFPHDEPLAGRNMRRDPLHEELLGQGCVFQERHGWERPGWFHPRGPAPVLEYDYYGAYGSRAHEDYAYRRLLADEYTFAFPPHHDTIKKECLACRGAAAVFDMSYFGKFYLVGLDARKAADWLFSADVSRPPGSTVYTCMLNHRGGTESDLTVSRLAPSHQASPLAPAFEGDGYYLAMGGAVAQHNWSHITTVLQDQKSQCQLIDSSEDLGMISIQGPASRAILQEVLDADLSNEAFPFSTHKLLRAAGHLVRAMRLSFVGELGWELHIPKASCVPVYRAVMAAGAKHGLINAGYRAIDSLSIEKGYRHWHADLRPDDSPLEAGLAFTCKLKSPVPFLGREALEQQRAAGLRRRLVCFTMEDKVPMFGLEAIWRNGQVVGHVRRADFGFAIDKTIAYGYIHDPSGGPVSLDFVKSGDYALERMGVTYGAQAHLKSPFDPNNKRVKGIY

SEQ ID NO: 7436 - protein, 152 aa, Homo sapiens; identical to SEQ ID NO: 7351

SEQ ID NO: 7437 - protein, 539 aa, Homo sapiens; identical to SEQ ID NO: 5502

SEQ ID NO: 7438 - protein, 421 aa, Homo sapiens
MMEDNKQLALRIDGAVQSASQEVTNLRAELTATNRRLAELSGGGGPGPGPGAAASASAAGDSAATNMENPQLGAQVLLREEVSRLQEEVHLLRQMKEMLAKDLEESQGGKSSEVLSATELRVQLAQKEQELARAKEALQAMKADRKRLKGEKTDLVSQMQQLYATLESREEQLRDFIRNYEQHRKESEDAVKALAKEKDLLEREKWELRRQAKEATDHATALRSQLDLKDNRMKELEAELAMAKQSLATLTKDVPKRHSLAMPGETVLNGNQEWVVQADLPLTAAIRQSQQTLYHSHPPHPADRQAVRVSPCHSRQPSVISDASAAEGDRSSTPSDINSPRHRTHSLCNGDSPGPVQKNLHNPIVQSLEDLEDQKRKKKKEKMGFGSISRVFARGKQRKSLDPGLFDGTAPDYYIEEDADW

SEQ ID NO: 7439 - protein, 163 aa, Homo sapiens
MVGGGGVGGGLLENANPLIYQRSGERPVTAGEEDEQVPDSIDAREIFDLIRSINDPEHPLTLEELNVVEQVRVQVSDPESTVAVAFTPTIPHCSMATLIGLSIKVKLLRSLPQRFKMDVHITPGTHASEHAVNKQLADKERVAAALENTHLLEVVNQCLSARS

SEQ ID NO: 7440 - protein, 68 aa, Homo sapiens
MSISSDEVNFLVYRYLQESGFSHSAFTFGIESHISQSNINGALVPPAALISIIQKGLQYVEAEVSINE

SEQ ID NO: 7441 - protein, 177 aa, Homo sapiens
MSSNECFKCGRSGHWARECPTGGGRGRGMRSRGRGGFTSDRGFQFVSSSLPDICYRCGESGHLAKDCDLQEDACYNCGRGGHIAKDCKEPKREREQCCYNCGKPGHLARDCDHADEQKCYSCGEFGHIQKDCTKVKCYRCGETGHVAINCSKTSEVNCYRCGESGHLARECTIEATA

SEQ ID NO: 7442 - protein, 142 aa, Homo sapiens [sequence omitted]

SEQ ID NO: 7443 - protein, 431 aa, Homo sapiens
MEDLKGPTVSSFLSGMKTELYPGVTAIDMMYKEGLHGVDNGILIFDKVRIPRENLLDKFGSVAPDGQYHSPIRNKSARFNAMLAALTPSRLAVAFQAMGAMKLGLTIAIRYSHSRRQFGPKTKEEVKIIEHQTQTLRLMPHLATALALTFVSRYAGALLDEDVFQGKELVNSRSLQALVAGLKAYSTWENIRCLQDCRECTGGMVVGRELLAQYTKQYEEKPLFGLLQNWAESVGDKLRTSFLAFNMDTVDDLAFLLKAVKFRERVLQRGLVARIYYKVKTKKEDFFHAWNSCLHHVASLSLAHTHRVTLEQFSLAVKSCPDQEDQTLLMKFCLLYGTKLVFQERAWYLEHKYLTPMASTRIRNQLLDLCDSVKDDARRVISTFNIPHTYLHAPIAGISNPRAAWAFYPAPLQPRPREEARSRRPKLGAKL

SEQ ID NO: 7444 - protein, 479 aa, Homo sapiens
MAELQMLLEEEIPGGRRALFDSYTNLERVADYCENNYIQSADKQRALEETKAYTTQSLASVAYLINTLANNVLQMLDIQASQLRRMESSINHISQTVDIHKEKVARREIGILTTNKNTSRTHKIIAPANLERPVRYIRKPIDYTILDDIGHGVKWLLRFKVSTQNMKMGGLAATPPTQKPPSPPMSGKGTLGRHSPYRTLEPVRPPVVPNDYVPSPTRNMAPSQQSPVRTASVNQRNRTYSSSGSSGGSHPSSRSSSRENSGSGSVGVPIAVPTPSPPSVFPDAAAGGAQTLADGFTSPTPPVVSSTPPTGHPVQFYSMNRPASRHTPPTIGGSLPYRRPPSITSQTSLQNQMNGGPFYSQNPVSDTPPPPPPVEEPVFDESPPPPPPPEDYEEEEAAVVEYSDPYAEEDPPWAPRSYLEKVVAIYDYTKDKEDELSFQEGAIIYVIKKNDDGWYEGVMNGVTGLFPGNYVESIMHYSE

SEQ ID NO: 7445 - protein, 1033 aa, Homo sapiens
MDEEENHYVSQLREVYSSCDTTGTGFLDRQELTQLCLKLHLEQQLPVLLQTLLGNDHFARVNFEEFKEGFVAVLSSNAGVRPSDEDSSSLESAASSAIPPKYVNGSKWYGRRSRPELCDAATEARRVPEQQTQASLKSHLWRSASLESVESPKSDEEAESTKEAQNELFEAQGQLQTWDSEDFGSPQKSCSPSFDTPESQIRGVWEELGVGSSGHLSEQELAVVCQSVGLQGLEKEELEDLFNKLDQDGDGKVSLEEFQLGLFSHEPALLLESSTRVKPSKAWSHYQVPEESGCHTTTTSSLVSLCSSLRLFSSIDDGSGFAFPDQVLAMWTQEGIQNGREILQSLDFSVDEKVNLLELTWALDNELMTVDSAVQQAALACYHQELSYQQGQVEQLARERDKARQDLERAEKRNLEFVKEMDDCHSTLEQLTEKKIKHLEQGYRERLSLLRSEVEAERELFWEQAHRQRAALEWDVGRLQAEEAGLREKLTLALKENSRLQKEIVEVVEKLSDSERLALKLQKDLEFVLKDKLEPQSAELLAQEERFAAVLKEYELKCRDLQDRNDELQAELEGLWARLPKNRHSPSWSPDGRRRQLPGLGPAGISFLGNSAPVSIETELMMEQVKEHYQDLRTQLETKVNYYEREIAALKRNFEKERKDMEQARRREVSVLEGQKADLEELHEKSQEVIWGLQEQLQDTARGPEPEQMGLAPCCTQALCGLALRHHSHLQQIRLEFHRLSEENTLLKNDLGRVRQELEAAESTHDAQRKEIEVLKKDKEKACSEMEVLNRQNQNYKDQLSQLNVRVLQLGQEASTHQAQNEEHRVTIQMLTQSLEEVVRSGQQQSDQIQKLRVELECLNQEHQSLQLPWSELTQTLEESQDQVQGAHLRLRQAQAQHLQEVRLVPQDRVAELHRLLSLQGEQARRRLDAQREEHEKQLKATEERVEEAEMILKNMEMLLQEKVDKLKEQFEKNTKSDLLLKELYVENAHLVRALQATEEKQRGAEKQSRLLEEKVRALNKLVSRIAPAALSV

SEQ ID NO: 7446 - protein, 208 aa, Homo sapiens
CCGCSGGCGSGCGGRGSGCGGCGSGCGGCGSGCGGCGSGCGGCGGCGSGCAGCGGCKGGCGSCGGSKRGCVSCGVSKGACGSCGGSKGGCGSCGGSKGGCGSCGGSKGGCGSCGGSKGGCGSYGCSQSSCCKPCCCSSGCGSSCCQSSCCKPYCCQSSCCKPYCCQSSCCKPCSCFSGCGSSCCQSSCYKPCCCQSSCCVPVCCQCKI

SEQ ID NO: 7447 - protein, 213 aa, Homo sapiens
MAGSPELVVLDPPWDKELAAGTESQALVSATPREDFRVRCTSKRAVTEMLQLCGRFVQKLGDALPEEIREPALRDAQWTFESAVQENISINGQAWQEASDNCFMDSDIKVLEDQFDEIIVDIATKRKQYPRKILECVIKTIKAKQEILKQYHPVVHPLDLKYDPDPVLNGNAFNFSPFNMMLAVDLSYMVFITSSPSYGKFEMQRGNSSKGDQ

SEQ ID NO: 7448 - protein, 1238 aa, Homo sapiens
MTIWQMQKQAQRGSPARTHSMMSLSVRPQRRLLSARVNRSQSFAGVLGSHERGPRSFPVFSPPGPPRKPPALSRVSRMFSVAHPAAKVPQPERLDLVYTALKRGLTAYLEVHQQEQEKLQGQIRESKRNSRLGFLYDLDKQVKSIERFLRRLEFHASKIDELYEAYCVQRRLRDGAYNMVRAYTTGSPGSREARDSLAEATRGHREYTESMCLLESELEAQLGEFHLRMKGLAGFARLCVGDQYEICMKYGRQRWKLRGRIEGSGKQVWDSEETIFLPLLTEFLSIKVTELKGLANHVVVGSVSCETKDLFAALPQVVAVDINDLGTIKLSLEVTWSPFDKDDQPSAASSVNKASTVTKRFSTYSQSPPDTPSLREQAFYNMLRRQEELENGTAWSLSSESSDDSSSPQLSGTARHSPAPRPLVQQPEPLPIQVAFRRPETPSSGPLDEEGAVAPVLANGHAPYSRTLSHISEASVDAALAEASVEAVGPESLAWGPSPPTHPAPTHGEHPSPVPPALDPGHSATSSTLGTTGSVPTSTDPAPSAHLDSVHKSTDSGPSELPGPTHTTTGSTYSAITTTHSAPSPLTHTTTGSTHKPIISTLTTTGPTLNIIGPVQTTTSPTHTMPSPTHTTASPTHTSTSPTHTPTSPTHKTSMSPPTTTSPTPSGMGLVQTATSPTHPTTSPTHPTTSPILINVSPSTSLELATLSSPSKHSDPTLPGTDSLPCSPPVSNSYTQADPMAAAPHPSPAHSSRKPLTSPAPDPSESTVQSLSPTPSPPTPAPQHSDLCLAMAVQTPVPTAAGGSGDRSLEEALGALMAALDDYRGQFPELQGLEQEVTRLESLLMQRQGLTRSRASSLSITVEHALESFSFLNEDEDEDNDVPGDRPPSSPEAGAEDSIDSPSARPLSTGCPALDAALVRHLYHCSRLLLKLGTFGPLRCQEAWALERLLREARVLEAVCEFSRRWEIPASSAQEVVQFSASRPGFLTFWDQCTERLSCFLCPVERVLLTFCNQYGARLSLRQPGLAEAVCVKFLEDALGQKLPRRPQPGPGEQLTVFQFWSFVETLDSPTMEAYVTETAEEVLLVRNLNSDDQAVVLKALRLAPEGRLRRDGLRALSSLLVHGNNKVMAAVSTQLRSLSLGPTFRERALLCFLDQLEDEDVQTRVAGCLALGCIKAPEGIEPLVYLCQTDTEAVREAARQSLQQCGEEGQSAHRRLEESLDALPRIFGPGSMASTAF

SEQ ID NO: 7449 - protein, 243 aa, Homo sapiens
MVTDYGAFIKIPGCRKQGLVHRTHMSSCRVDKPSEIVDVGDKVWVKLIGREMKNDRIKVSLSMKVVNQGTGKDLDPNNVIIEQEERRRRSFQDYTGQKITLEAVLNTTCKKCGCKGRVKPLPFPRFSPCGWTLFWKKEAAQCHFAKDCFMQPGGTKYSLIPDEEEEKEEAKSAEFEKPDPTRNPSRKRKKEKKKKKHRDRKSSDSDSSDSESDTGKRARHTSKDSKAAKKKKKKKKHKKKHKE

SEQ ID NO: 7450 - protein, 109 aa, Homo sapiens
MEEIPAQEAAGSPRVQFQSLETQSECLSPEPQFVQDTDMEQGLTGGFPISKPDGISQLEQDLQVFDLETKTREVLRDDCSDGETREENKLLIPKQKISEEVHSYKVRVG

SEQ ID NO: 7451 - protein, 1377 aa, Homo sapiens
MSLERELRQLSKAKAKAQRAGQRREEAALCHQLGELLAGHGRYAEALEQHWQELQLRERADDPLGCAVAHRKIGERLAEMEDYPAALQHQHQYLELAHSLRNHTELQRAWATIGRTHLDIYDHCQSRDALLQAQAAFEKSLAIVDEELEGTLAQGELNEMRTRLYLNLGLTFESLQQTALCNDYFRKSIFLAEQNHLYEDLFRARYNLGTIHWRAGQHSQAMRCLEGARECAHTMRKRFMESECCVVIAQVLQDLGDFLAAKRALKKAYRLGSQKPVQRAAICQNLQHVLAVVRLQQQLEEAEGRDPQGAMVICEQLGDLFSKAGDFPRAAEAYQKQLRFAELLDRPGAERAIIHVSLATTLGDMKDHHGAVRHYEEELRLRSGNVLEEAKTWLNIALSREEAGDAYELLAPCFQKALSCAQQAQRPQLQRQVLQHLHTVQLRLQPQEAPETETRLRELSVAEDEDEEEEAEEAAATAESEALEAGEVELSEGEDDTDGLTPQLEEDEELQGHLGRRKGSKWNRRNDMGETLLHRACIEGQLRRVQDLVRQGHPLNPRDYCGWTPLHEACNYGHLEIVRFLLDHGAAVDDPGGQGCEGITPLHDALNCGHFEVAELLLERGASVTLRTRKASARWRRCSSGKLYRRDLDLETRQKARAMEMLLQAAASGQDPHSSQAFHTPSSLLFDPETSPPLSPCPEPPSNSTRLPEASQAHVRVSPGQAAPAMARPRRSRHGPASSSSSSEGEDSAGPARPSQKRPRCSATAQRVAAWTPGPASNREAATASTSRAAYQAAIRGVGSAQSRLGPGPPRGHSKALAPQAALIPEEECLAGDWLELDMPLTRSRRPRPRGTGDNRRPSSTSGSDSEESRPRARAKQVRLTCMQSCSAPVNAGPSSLASEPPGSPSTPRVSEPSGDSSAAGQPLGPAPPPPIRVRVQVQDHLFLIPVPHSSDTHSVAWLAEQAAQRYYQTCGLLPRLTLRKEGALLAPQDLIPDVLQSNDEVLAEVTSWDLPPLTDRYRRACQSLGQGEHQQVLQAVELQGLGLSFSACSLALDQAQLTPLLRALKLHTALRELRLAGNRLGDKCVAELVAALGTMPSLALLDLSSNHLGPEGLRQLAMGLPGQATLQSLEELDLSMNPLGDGCGQSLASLLHACPLLSTLRLQACGFGPSFFLSHQTALGSAFQDAEHLKTLSLSYNALGAPALARTLQSLPAGTLLHLELSSVAAGKGDSDLMEPVFRYLAKEGCALAHLTLSANHLGDKAVRDLCRCLSLCPSLISLDLSANPEISCASLEELLSTLQKRPQGLSFLGLSGCAVQGPLGLGLWDKIAAQLRELQLCSRRLCAEDRDALRQLQPSRPGPGECTLDHGSKLFFRRL

SEQ ID NO: 7452 - protein, 224 aa, Homo sapiens
MPTLFKGVWGVVEHSRALGRFCPACLPSGPHLHTQPALGTAEMTLLSSQSSSLVAPSGSVSAENPEQRMLEKRAKVIEELLQTERDYIRDLEMCIERIMVPMQQAQVPNIDFEGLFGNMQMVIKVSKQLLAALEISDAVGPVFLGHRDELEGTYKIYCQNHDEAIALLEIYEKDEKIQKHLQDSLADLKSLYNEWGCTNYINLGSFLIKPVQRVMRYPLLLMEL

SEQ ID NO: 7453 - protein, 117 aa, Homo sapiens
VCGDYLLSRMDVTSCISYRNFASCMGDSRLLNKVDAYIQEHLLQISEEEEFLKLPRLKLEVMLEDNVCLPSNGKLYTKVINWVQRSIWENGDSLEELMEEVSFKVNGIQPFLKIILL

SEQ ID NO: 7454 - protein, 94 aa, Homo sapiens
MLCWGYWSLGQPGISTNLQGIVAEPQVCGFISDRSVKEVACGGNHSVFLLEDGEVYTCGLNTKGQLGHEREGNKPEQIGALADQHIIHVACGES

SEQ ID NO: 7455 - protein, 248 aa, Homo sapiens; identical to SEQ ID NO: 7249

SEQ ID NO: 7456 - protein, 937 aa, Homo sapiens
MEPDIIRMYSSSPPPLDNGAEDDDDDEFGEFGGFSEVSPSGVGFVDFDTPDYTRPKEEFVPSNHFMPIHEFSENVDSLTSFKSIKNGNDKDITAELSAPVKGQSDVLLSTTSKEIISSEMLATSIDGMERPGNLNKVVEQRQNVGTLESFSPGDFRTNMNVVHQNKQLESCNGEKPPCLEILTNGFAVLETVNPQGTDDLDNVADSKGRKPLSTHSTEYNLDSVPSPAEEFADFATFSKKERIQLEEIECAVLNDREALTIRENNKINRVNELNSVKEVALGRSLDNKGDTDGEDQVCVSEISIVTNRGFSVEKQGLPTLQQDEFLQSGVQSKAWSLVDSADNSEAIRREQCKTEEKLDLLTSKCAHLCMDSVKTSDDEVGSPKEESRKFTNFQSPNIDPTEENDLDDSLSVKNGDSSNDFVTCNDINEDDFGDFGDFGSASGSTPPFVTGTQDSMSDATFEESSEHFPHFSEPGDDFGEFGDINAVSCQEETILTKSDLKQTSDNLSEECQLARKSSGTGTEPVAKLKNGQEGEIGHFDSVPNIQDDCNGFQDSDDFADFSSAGPSQVVDWNAFEDEQKDSCSWAAFGDQQATESHHRKEAWQSHRTDENIDTPGTPKTHSVPSATSKGAVASGHLQESATSVQTALLNRLERIFEACFPSILVPDAEEEVTSLKHLLETSTLPIKTREALPESGELLDVWTELQDIHDAHGLRYQWGGSHSNKKLLSSLGIDTRNILFTGNKKQPVIVPMYAAGLGMLEPTKEPLKPLSAAEKIASIGQTATMSPDMNTCTSDQFQESLPPVQFDWSSSGLTNPLDASGGSTLLNLDFFGPVDDSSSSSSTTIPGVDPELYELTTSKLEISTSSLKVTDAFARLMSTVEKTSTSTSRKPKREEHLSEEAIKVIAGLPDLTFMHAKVLMFPATLTPSTSSQEKADG

SEQ ID NO: 7457 - protein, 37 aa, Homo sapiens
MASEDIAKLAETLAKTQVAGGQLSFKGKSLKLNTAED

SEQ ID NO: 7458 - protein, 102 aa, Homo sapiens
MQTSSSRSVHLSEWQKNYFAITSGICTGPKADAYRAQILRIQYAWANSEISQVCATKLFKKYAEKYSAIIDSDNVESGLNNYAENILTLAGSQQTDSDKWQS

SEQ ID NO: 7459 - protein, 157 aa, Homo sapiens; identical to SEQ ID NO: 7296

SEQ ID NO: 7460 - protein, 115 aa, Homo sapiens
MAGAPTVSLPELRSLLASGRARLFDVRSREEAAAGTIPGALNIPVSELESALQMEPAAFQALYSAEKPKLEDEHLVFFCQMGKRGLQATQLARSLGYTGARNYAGAYREWLEKES

SEQ ID NO: 7461 - protein, 1588 aa, Homo sapiens; identical to SEQ ID NO: 5490

SEQ ID NO: 7462 - protein, 126 aa, Homo sapiens
MAAATGDPGLSKLQFAPFSSALDVGFWHELTQKKLNEYRLDEAPKDIKGYYYNGDSAGLPARLTLEFSAFDMSAPTPARCCPAIGTLYNTNTLESFKTADKKLLLEQAANEIWESIKSGTALENPV

SEQ ID NO: 7463 - protein, 477 aa, Homo sapiens
MADGQVAELLLRRLEASDGGLDSAELAAELGMEHQAVVGAVKSLQALGEVIEAELRSTKHWELTAEGEEIAREGSHEARVFRSIPPEGLAQSELMRLPSGKVGFSKAMSNKWIRVDKSAADGPRVFRVVDSMEDEVQRRLQLVRGGQAEKLGEKERSELRKRKLLAEVGSWRDRPFKPYNFLAHGVLPDSGHLHPLLKVRSQFRQIFLEMGFTEMPTDNFIESSFWNFDALFQPQQHPARDQHDTFFLRDPAEALQLPMDYVQRVKRTHSQGGYGSQGYKYNWKLDEARKNLLRTHTTSASARALYRLAQKKPFTPVKYFSIDRVFRNETLDATHLAEFHQIEGVVADHGLTLGHLMGVLREFFTKLGITQLRFKPAYNPYTEPSMEVFSYHQGLKKWVEVGNSGVFRPEMLLPMGLPENVSVIAWGLSLERPTMIKYGINNIRELVGHKVNLQMVYDSPLCRLDAEPRPPPTQEAA

SEQ ID NO: 7464 - protein, 1062 aa, Homo sapiens
MPVQAAQWTEFLSCPICYNEFDENVHKPISLGCSHTVCKTCLNKLHRKACPFDQTAINTDIDVLPVNFALLQLVGAQVPDHQSIKLSNLGENKHYEVAKKCVEDLALYLKPLSGGKGVASLNQSALSRPMQRKLVTLVNCQLVEEEGRVRAMRAARSLGERTVTELILQHQNPQQLSANLWAAVRARGCQFLGPAMQEEALKLVLLALEDGSALSRKVLVLFVVQRLEPRFPQASKTSIGHVVQLLYRASCFKVTKRDEDSSLMQLKEEFRSYEALRREHDAQIVHIAMEAGLRISPEQWSSLLYGDLAHKSHMQSIIDKLQSPESFAKSVQELTIVLQRTGDPANLNRLRPHLELLANIDPNPDAVSPTWEQLENAMVAVKTVVHGLVDFIQNYSRKGHETPQPQPNSKYKTSMCRDLRQQGGCPRGTNCTFAHSQEELEKYRLRNKKINATVRTFPLLNKVGVNNTVTTTAGNVISVIGSTETTGKIVPSTNGISNAENSVSQLISRSTDSTLRALETVKKVGKVGANGQNAAGPSADSVTENKIGSPPKTPVSNVAATSAGPSNVGTELNSVPQKSSPFLTRVPVYPPHSENIQYFQDAAQIPFEVPQYPQTGYYPPPPTVPAGVAPCVPRFVRSNNVPESSLPPASMPYADHYSTFSPRDRMNSSPYQPPPPQPYGPVPPVPSGMYAPVYDSRRIWRPPMYQRDDIIRSNSLPPMDVMHSSVYQTSLRERYNSLDGYYSVACQPPSEAATVPLPREPCGHLKTSCEEQIRRKPDQWAQYHTQKAPLVSSTLPVATQSPTPPSPLFSVDFRADFSESVSGTKFEEDHLSHYSPWSCGTIGSCINAIDSEPKDVIANSNAVLMDLDSGDVKRRVHLFETQRRTKEEDPIIPFSDGPIISKWGAISRSSRTGYHTTDPVQATASQGSATKPISVSDYVPYVNAVDSRWSSYGNEATSSAHYVERDRFIVTDLSGHRKHSSTGDLLSLELQQAKSNSLLLQREANALAMQQKWNSLDEGRHLTLNLLSKEIELRNGEVKKLNLSASCLMYLFSAAASWLYHY

SEQ ID NO: 7465 - protein, 515 aa, Homo sapiens
  VARIANT 1: note = X can be any amino acid
XAGGSPSVVDYFPSEDFYRCGYCKNESGSRSNGMWAHSMTVQDYQDLIDRGWRRSGKYVYKPVMNQTCCPQYTIRCRPLQFQPSKSHKKVLKKMLKFLAKGEVPKGSCEDEPMDSTMDDAVAGDFALINKLDIQCDLKTLSDDIKESLESEGKNSKKEEPQELLQSQDFVGEKLGSGEPSHSVKVHTVPKPGKGADLSKPPCRKAKEIRKERKRLKLMQQNPAGELEGFQAQGHPPSLFPPKAKSNQPKSLEDLIFESLPENASHKLEVRVVRSSPPSSQFKATLLESYQVYKRYQMVIHKNPPDTPTESQFTRFLCSSPLEAETPPNGPDCGYGSFHQQYWLDGKIIAVGVIDILPNCVSSVYLYYDPDYSFLSLGVYSALREIAFTRQLHEKTSQLSYYYMGFYIHSCPKMKYKGQYRPSDLLCPETYVWVPIEQCLPSLENSKYCRFNQDPEAVDEDRSTEPDRLQVFHKRAIMPYGVYKKQQKDPSEEAAVLQYASLVGQKCSERMLLFRN

SEQ ID NO: 7466 - protein, 74 aa, Homo sapiens
MAMAPSPSLVQVYTSPAAVAVWEWQDGLGTWHPYSATVCSFIEQQFVQQKGQRFGLGSLAHSIPLGQADPSLAP

SEQ ID NO: 7467 - protein, 197 aa, Homo sapiens
MAAFRDIEEVSQGLLSLLGANRAEAQQRRLLGRHEQVVERLLETQDGAEKQLREILTMEKEVAQSLLNAKEQVHQGGVELQQLEAGLQEAGEEDTRLKASLLQLTRELEELKEIEADLERQEKEVDEDTTVTIPSAVYVAQLYHQVSKIEWDYECEPGMVKGIHHGPSVAQPIHLDSTQLSRKFISDYLWSLVDTEW

SEQ ID NO: 7468 - protein, 756 aa, Homo sapiens; identical to SEQ ID NO: 6336

SEQ ID NO: 7469 - protein, 646 aa, Homo sapiens
AQGSVSFNDVTVDFTQEEWQHLDHAQKTLYMDVMLENYCHLISVGCHMTKPDVILKLERGEEPWTSFAGHTCLEENWKAEDFLVKFKEHQEKYSRSVVSINHKKLVKEKSKIYEKTFTLGKNPVNSKNLPPEYDTHGRILKNVSELIISNLNPARKRLSEYNGYGKSLLSTKQETTHPEVKSHNQSARAFSHNEVLMQYQKTETPAQSFGYNDCEKSFLQRGGLITHSRPYKGENPSVYNKKRRATNIEKKHTCNECGKSFCRKSVLILHQGIHSEEKPYQCHQCGNAFRRKSYLIDHQRTHTGEKPFVCNECGKSFRLKTALTDHQRTHTGEKSYECLQCRNAFRLKSHLIRHQRTHTGEKPYECNDCGKSFRQKTTLSLHQRIHTGEKPYICKECGKSFHQKANLTVHQRTHTGEKPYICNECGKSFSQKTTLALHEKTHNEEKPYICSECGKSFRQKTTLVAHQRTHTGEKSYECPHCGKAFRMKSYLIDHHRTHTGEKPYECNECGKSFSQKTNLNLHQRIHTGEKPYVCNECGKSFRQKATLTVHQKIHTGQKSYECPQCGKAFSRKSYLIHHQRTHTGEKPYKCSECGKCFRQKTNLIVHQRTHTGEKPYVCNECGKSFSYKRNLIVHQRTHKGENIEMQ

SEQ ID NO: 7470 - protein, 197 aa, Homo sapiens
MGGRKRERKAAVEEDTSLSESEGPRQPDGDEEESTALSINEEMQRMLNQLREYDFEDDCDSLTWEETEETLLLWEDFSGYAMAAAEAQGEQEDSLEKVIKDTESLFKTREKEYQETIDQIELELATAKNDMNRHLHEYMEMCSMKRGLDVQMETCRRLITQSGDRKSPAFTAVPLSDPPPRQARLRTPIAMSHLTAP

SEQ ID NO: 7471 - protein, 140 aa, Homo sapiens
MAMAPSPSLVQVYTSPAAVAVWEWQDGLGTWHPYSATVCSFIEQQFVQQKGQRFGLGSLAHSIPLGQADPSLAPYIIDLPSWTQFRQDTGTMRAVRRHLFPQHSAPGRGVVWEWLSDDGSWTAYEASVCDYLEQQVARGN

SEQ ID NO: 7472 - protein, 1077 aa, Homo sapiens
VCMHPHNVLSDVVNYTLWLMECSHASGCCHATMFFSICFSFRAVLELFDRYDGLRRLVNLISTLEILNLEDQGALLSDDEIFASRQTGKHTCMALRKYFEAHLAIKLEQVKQSLQRTEGGILVHPQPPYKACSYTHEQIVEMMEFLIEYGPAQLYWEPAEVFLKLSCVQLLLQLISIACNWKTYYARNDTVRFALDVLAILTVVPKIQLQLAESVDVLDEAGSTVSTVGISIILGVAEGEFFIHDAEIQKSALQIIINCVCGPDNRISSIGKFISGTPRRKLPQNPKSSEHTLAKMWNVVQSNNGIKVLLSLLSIKMPITDADQIRALACKALVGLSRSSTVRQIISKLPLFSSCQIQQLMKEPVLQDKRSDHVKFCKYAAELIERVSGKPLLIGTDVSLARLQKADVVAQSRISFPEKELLLLIRNHLISKGLGETATVLTKEADLPMTAASHSSAFTPVTAAASPVSLAAPRIANGIATRLGSHAAVGASAPSAPTAHPQPRPPQGPLALPGPSYAGNSPLIGRISFIRERPSPCNGRKIRVLRQKSDHGAYSQSPAIKKQLDRHLPSPPTLDSIITEYLREQHARCKNPVATCPPFSLFTPHQCPEPKQRRQAPINFTSRLNRRASFPKYGGVDGGCFDRHLIFSRFRPISVFREANEDESGFTCCAFSARERFLMLGTCTGQLKLYNVFSGQEEASYNCHNSAITHLEPSRDGSLLLTSATWSQPLSALWGMKSVFDMKHSFTEDHYVEFSKHSQDRVIGTKGDIAHIYDIQTGNKLLTLFNPDLANNYKRNCATFNPTDDLVLNDGVLWDVRSAQAIHKFDKFNMNISGVFHPNGLEVIINTEIWDLRTFHLLHTVPALDQCRVVFNHTGTVMYGAMLQADDEDDLMEERMKSPFGSSFRTFNATDYKPIATIDVKRNIFDLCTDTKDCYLAVIENQGSMDALNMDTVCRLYEVGRQRLAEDEDEEEDQEEEEQEEEDDDEDDDDTDDLDELDTDQLLEAELEEDDNNENAGEDGDNDFSPSDEELANLLEEGEDGEDEDSDADEEVELILGDTDSSDNSDLEDDIILSLNE

SEQ ID NO: 7473 - protein, 148 aa, Homo sapiens
MLSDGCGSEEKISVPSCYGGIGAPVSRQVPASHDSELMAFMTRKLWDLEQQVKAQTDEILSKDQKIAALEDLVQTLRPHPAEATLQRQEELETMCVQLQRQVREMERFLSDYGLQWVGEPMDQEDSESKTVSEHGERDWMTAKKFWKP

SEQ ID NO: 7474 - protein, 584 aa, Homo sapiens
MSLPPEKASELKQLIHQQLSKMDVHGRIREILAETIREELAPDQQHLSTEDLIKALRRRGIIDDVMKELNFVTDSVEQELPSSPKQPICFDRQSTLKKSDGTRMADSTTMLSISDPIHMVLIKTDIFGETTLVASYFLEWRSVLGSENGVTSLTVELMGVGTESKVSVGILNIKLEMYPPLNQTLSQEVVNTQLALERQKTAEKERLFLVYAKQWWREYLQIRPSHNSRLVKIFAQDENGINRPVCSYVKPLRAGRLLDTPRQAARFVNVLGYERAPVIGGGGKQEQWCTLLAFLCRNKGDCEDHANLLCSLLLGYGLEAFVCVGTKAKGVPHAWVMTCGTDGAITFWESLTGHRYIHKPTNPDEPPVAEQPKPLYPYRTIGCVFNHQMFLGNCQPSDAVETCVFDLNDESKWKPMSEEAIKSVCAPGATTSLPPFPPLCASTIDASVTSNEIEMQLRLLVSEHRKDLGLTTVWEDQLSYLLSPALASYEFERTTSISAGNEEFQDAIRRAVPDGHTFKGFPIHFVYRNARRAFATCLRSPFCEEIICCRGDQVRLAVRVRVFTYPESACAVWIMFACKYRSVL

SEQ ID NO: 7475 - protein, 1504 aa, Homo sapiens
MVSESDFSKDVAVQVLPLDKIEENNKQKANDIFISQYTMGQKDALRTVLKQNVSLCLTGWSDHSGVITTHCSLYLLRLMRSSHLSLPSSWDYRAQSMPVFKEVKVHLLEDAGIEKDAVTQETRISPSGIDSATTVAAATAAAIATAAPLIKVQSDLEAKVNSVTELLSKLQETDKHLQRVTEQQTSIQRKQEKLHCHDHEKQMNVFMEQHIRHLEKLQQQQIDIQTHFISAALKTSSFQPVSMPSSRAVEKYSVKPEHPNLGSCNPSLYNTFASKQAPLKEVEDTSFDKQKSPLETPAPRRFAPVPVSRDDELSKRENLLEEKENMEVSCHRGNVRLLEQILNNNDSLTRKSESSNTTSLTRSKIGWTPEKTNRFPSCEELETTKVTMQKSDDVLHDLGQKEKETNSMVQPKESLSMLKLPDLPQNSVKLQTTNTTRSVLKDAEKILRGVQNNKKVLEENLEAIIRAKDGAAMYSLINALSTNREMSEKIRIRKTVDEWIKTISAEIQDELSRTDYEQKRFDQKNQRTKKGQNMTKDIRTNTQDKTVNKSVIPRKHSQKQIEEHFRNLPMRGMPASSLQKERKEGLLKATTVIQDEDYMLQVYGKPVYQGHRSTLKKGPYLRFNSPSPKSRPQRPKVIERVKGTKVKSIRTQTDFYATKPKKMDSKMKHSVPVLPHGDQQYLFSPSREMPTFSGTLEGHLIPMAILLGQTQSNSDTMPPAGVIVSKPHPVTVTTSIPPSSRKVETGVKKPNIAIVEMKSEKKDPPQLTVQVLPSVDIDSISNSSADVLSPLSSPKEASLPPVQTWIKTPEIMKVDEEEVKFPGTNFDEIIDVIQEEEKCDEIPDSEPILEFNRSVKADSTKYNGPPFPPVASTFQPTADILDKVIERKETLENSLIQWVEQEIMSRIISGLFPVQQQIAPSISVSVSETSEPLTSDIVEGTSSGALQLFVDAGVPVNSNVIKHFVNEALAETIAVMLGDREAKKQGPVATGVSGDASTNETYLPARVCTPLPTPQPTPPCSPSSPAKECVLVKTPDSSPCDSDHDMAFPVKEICAEKGDDMPAIMLVNTPTVTPTTTPPPAAAVFTPTLSDISIDKLKVSSPELPKPWGDGDLPLEEENPNSPQEELHPRAIVMSVAKDEEPESMDFPAQPPPPEPVPFMPFPAGTKAPSPSQMPGSDSSTLESTLSVTVTETETLDKPISEGEILFSCGQKLAPKILEDIGLYLTNLNDSLSSTLHDAVEMEDDPPSEGQVIRMSHKKFHADAILSFAKQNQESAVSQQAVYHSEDLENSVGELSEGQRPQLTAAAENILMGHSLYMQPPVTNTQSLDQQCDPKPLSRQFDTVSGSIYEDSCASHGPMSLGELELEPNSKLVLPTTLLTAQENDVNLPVAAEDFSQYQLKQNQDVKQVEHKPSQSYLRVRNKSDIAPSQQQVSPGDMDRTQIELNPYLTCVFSGGKAVPLSASQMPPAKMSVMLPSVNLEDCSQSLSLSTMQEDMESSGADTF

SEQ ID NO: 7476 - protein, 756 aa, Homo sapiens
MVAPVLETSHVFCCPNRVRGVLNWSSGPRGLLAFGTSCSVVLYDPLKRVVVTNLNGHTARVNCIQWICKQDGSPSTELVSGGSDNQVIHWEIEDNQLLKAVHLQGHEGPVYAVHAVYQRRTSDPALCTLIVSAAADSAVRLWSKKGPEGRDLFLASCSQDCLIRIWKLYIKSTSLETQDDDNIRLKENTFTIENESVKIAFAVTLETVLAGHENWVNAVHWQPVFYKDGVLQQPVRLLSASMDKTMILWAPDEESGVWLEQVRVGEVGGNTLGFYDCQFNEDGSMIIAHAFHGALHLWKQNTVNPREWTPEIVISGHFDGVQDLVWDPEGEFIITVGTDQTTRLFAPWKRKDQSQVTWHEIARPQIHGYDLKCLAMINRFQFVSGADEKVLRVFSAPRNFVENFCAITGQSLNHVLCNQDSDLPEGATVPALGLSNKAVFQGDIASQPSDEEELLTSTGFEYQQVAFQPSILTEPPTEDHLLQNTLWPEVQKLYGHGYEIFCVTCNSSKTLLASACKAAKKEHAAIILWNTTSWKQVQNLVFHSLTVTQMAFSPNEKFLLAVSRDRTWSLWKKQDTISPEFEPVFSLFAFTNKITSVHSRIIWSCDWSPDSKYFFTGSRDKKVVVWGECDSTDDCIEHNIGPCSSVLDVGGAVTAVSVCPVLHPSQRYVVAVGLECGKICLYTWKKTDQVPEINDWTHCVETSQSQSHTLAIRKLCWKNCSGKTEQKEAEGAEWLHFASCGEDHTVKIHRVNKCAL

SEQ ID NO: 7477 - protein, 114 aa, Homo sapiens
MQEINQNLAEEAGLNITHICLPPDSSEAEIIDEILKINEDTRVHGLALQISENLFSNKVLNALKPEKDVDGVTDINLGKLVRGDAHECFVSPVAKAVIELLEKSGVNLDGKKIL

SEQ ID NO: 7478 - protein, 248 aa, Homo sapiens; identical to SEQ ID NO: 7249

SEQ ID NO: 7479 - protein, 486 aa, Homo sapiens; identical to SEQ ID NO: 5136

SEQ ID NO: 7480 - protein, 569 aa, Homo sapiens
MALLSEGLDEVPAACLSPCGPPNPTELFSESRRLALEELVAGGPEAFAAFLRRERLARFLNPDEVHAILRAAERPGEEGAAAAAAAEDSFGSSHDCSSGTYFPEQSDLEPPLLELGWPAFYQGAGEGGPYGCKDALRQQLRSAREVIAVVMDVFTDIDIFRDLQEICRKQGVAVYILLDQALLSQFLDMCMDLKVHPEQEKLMTVRTITGNIYYARSGTKIIGKVHEKFTLIDGIRVATGSYSFTWTDGKLNSSNLVILSGQVVEHFDLEFRILYAQSKPISPKLLSHFQSSNKFDHLTNRKPQSKELTLGNLLRMRLARLSSTPRKADLDPEMPAEGKAERKPHDCESSTVSEEDYFSSHRDELQSRKAIDAATQTEPGEEMPGLSVSEVGTQTSITTACAGTQTAVITRIASSQTTIWSRSTTTQTDMDENILFPRGTQSTEGSPVSKMSVSRSSSLKSSSSVSSQGSVASSTGSPASIRTTDFHNPGYPKYLGTPHLELYLSDSLRNLNKERQFHFAGIRSRLNHMLAMLSRRTLFTENHLGLHSGNFSRVNLLAVRDVALYPSYQ

SEQ ID NO: 7481 - protein, 407 aa, Homo sapiens
MVLFSDSSLPHWQQQPPQPAPPPPLFPRQQQVQVNKGRVNCHPRCRYIKTKPCHQLSHQVWVQQKPSHRLLSLQLSPSPKPSPSPQLSLKFRLSLKFRPKQLFHPMSLLKHNPPTHSHPSPKLQQSQPQSNVQGQSPVRVQSPSQTRIRPSTPSQLSPGQQSQVQTTTSQPIPIQPHTSLQIPSQGQPQSQPQVVMKHNAVIEHLKQKKSMTPAEREENQRMIVCNQVMKYILDKIDKEEKQAAKKRKREESVEQKRSKQNATKLSALLFKHKEQLRAEILKKRALLDKDLQIEVQEELKRDLKIKKEKDLMQLAQATAVAAPCPPVTPAPPAPPAPPPSPPPPPAVQHTGLLSTPTLPAASQKRKREEEKDSSSKSKKKKMISTTSKETKKDTKLYCICKTPYDES

SEQ ID NO: 7482 - protein, 159 aa, Homo sapiens; identical to SEQ ID NO: 7300

SEQ ID NO: 7483 - protein, 102 aa, Homo sapiens
MNEAEIVDVALGILIESRKQEKACEQPALAGADNPEHSPPCSVSPHTSSGSSSEEEDSGKQALAPGLSPSQRPGGSSSACSRSPEEEEEEDVLKYVREIFFS

SEQ ID NO: 7484 - protein, 114 aa, Homo sapiens
MQFGELLAAVRKAQANVMLFLEEKEQAALSQANGIKAHLEYRSAEMEKSKQELETMAAISNTVQFLERSMTSELKCLPLFSANIGLPNLSPAPGNSSSNMCMTSRSTRTQHTSI

SEQ ID NO: 7485 - protein, 192 aa, Homo sapiens; identical to SEQ ID NO: 5264

SEQ ID NO: 7486 - protein, 295 aa, Homo sapiens
MKQYGLGPNGGIVTSLNLFATRFDQVMKFIEKAQNMSKYVLIDTPGQIEVFTWSASGTIITEALASSFPTVVIYVMDTSRSTNPVTFMSNMLYACSILYKTKLPFIVVMNKTDIIDHSFAVEWMQDFEAFQDALNQETTYVSNLTRSMSLVLDEFYSSLRVVGVSAVLGTGLDELFVQVTSAAEEYEREYRPEYERLKKSLANAESQQQREQLERLRKDMGSVALDAGTAKDSLSPVLHPSDLILTRGTLDEEDEEADSDTDDIDHRVTEESHEEPAFQNFMQESMAQYWKRNNK

SEQ ID NO: 7487 - protein, 403 aa, Homo sapiens
MPSAEAKLKKNRCANCFDCPGCMHTLSTRATSISTQLPDDPAKTTMKKAYYLACGFCRWTSRDVGMADKSVASGGWQEPENPHTQRMNKLIEYYQQLAQKEKVERDRKKLARRRNYMPLAFSDKYGLGTRLQRPRAGASISTLAGLSLKEGEDQKEIKIEPAQAVDEVEPLPEDYYTRPVNLTEVTTLQQRLLQPDFQPVCASQLYPRHKHLLIKRSLRCRKCEHNLSKPEFNPTSIKFKIQLVAVNYIPEVRIMSIPNLRYMKESQVLLTLTNPVENLTHVTLFECEEGDPDDINSTAKVVVPPKELVLAGKDAAAEYDELAEPQDFQDDPDIIAFRKANKVGIFIKVTPQREEGEVTVCFKMKHDFKNLAAPIRPIEESDQGTEVIWLTQHVELSLGPLLP

SEQ ID NO: 7488 - protein, 557 aa, Homo sapiens; identical to SEQ ID NO: 5676

SEQ ID NO: 7489 - protein, 153 aa, Homo sapiens
MAEQEQRKIPLVPENLLKKRKAYQALKATQAKQALLAKKEQKKGKGLRFKRLESFLHDSWRQKRDKVRLRRLEVKPHALELPDKHSLAFVVRIERIDGVSLLVQRTIARLRLKKIFSGVFVKVTPQNLKMLRIVEPYVTWGEVWRHLLGRPHS

SEQ ID NO: 7490 - protein, 689 aa, Homo sapiens
MIDSVKLRRDSAADFFSHYEYLCALQNSVPLPAVRACLREGVLDFNADRLRGVDWAPLLSTLKINKDLPLVSIKSFFQPWLGDTGSDMNKFCRSRVPAIRYKDVTFQLCKALKGCLSISSVLKNLELNGLILRERDLTILAKGLNKSASLVHLSLANCPIGDGGLEIICQGIKSSITLKTVNFTGCNLTWQGADHMAKILKYQTMRRHEETWAESLRYRRPDLDCMAGLRRITLNCNTLIGDLGACAFADSLSEDLWLRALDLQQCGLTNEGAKALLEALETNTTLVVLDIRKNPLIDHSMMKAVIKKVLQNGRSAKSEYQWITSPSVKEPSKTAKQKRRTIILGSGHKGKATIRIGLATKKPVSSGRKHSLGKEYYAPAPLPPGVSGFLPWRTAERAKRHRGFPLIKTRDICNQLQQPGFPVTVTVESPSSSEVEEVDDSSESVHEVPEKTSIEQEALQEKLEECLKQLKEERVIRLKVDKRVSELEHENAQLRNINFSLSEALHAQSLTNMILDDEGVLGSIENSFQKFHAFLDLLKDAGLGQLATMAGIDQSDFQLLGHPQMTSTVSNPPKEEKKALEDEKPEPKQNALGQMQNIQFQKITGDARIPLPLDSFPVPVSTPEGLGTSSNNLGVPATEQRQESFEGFIARMCSPSPDATSGTGSQRKEEELSRNSRSSSEKKTKTESH

SEQ ID NO: 7491 - protein, 304 aa, Homo sapiens
MNFSEVFKLSSLLCKFSPDGKYLASCVQYRLVVRDVNTLQILQLYTCLDQIQHIEWSADSLFILCAMYKRGLVQVWSLEQPEWHCKIDEGSAGLVASCWSPDGRHILNTTEFHLRITVWSLCTKSVSYIKYPKACLQGITFTRDGRYMALAERRDCKDYVSIFVCSDWQLLRHFDTDTQDLTGIEWAPNGCVLAVWDTCLEVRILNHVTWKMITEFGHPAAINDPKIVVYKEAEKSPQLGLGCLSFPPPRAGAGPLPSSESKYEIASVPVSLQTLKPVTDRANPKIGIGMLAFSPDSYFLATRN

SEQ ID NO: 7492 - protein, 160 aa, Homo sapiens
MKEVGRPREVRGRPGKSRIQKELADITLDPPPNCSAGPKGDNIYEWRSTILGPPGSVYEGGVFFLDITFTPEYPFKPPKVTFRTRIYHCNINSQGVICLDILKDNWSPALTISKVLLSICSLLTDCNPADPLVGSIATQYMTNRAEHDRMARQWTKRYAT

SEQ ID NO: 7493 - protein, 171 aa, Homo sapiens
MSSGNAKIGHPAPNFKATAVMPDGQFKDISLSDYKGKYVVFFFYPLDFTFVCPTEIIAFSDRAEEFKKLNCQVIGASVDSHFCHLAWVNTPKKQGGLGPMNIPLVSDPKRTIAQDYGVLKADEGISFRGLFIIDDKGILRQITVNDLPVGRSVDETLRLVQAFQFTDKHGE

SEQ ID NO: 7494 - protein, 200 aa, Homo sapiens
VLIFACLVPGFPAVMSSRGPCTLETLINPSPSVADVKIYPEEITPLLPAISGEKIAEDQTCFFLQILLKYMVIQAASLEWKNKENQDTGFKFLFTLFRKYYLPHLFPSFTKLTNIYKPVLDIPHLRPKPVYITTTRDNENIYSTKIPYMAARVVFIKWIVTFFLEKKYLTATQNTKNGVDVLPKIIQVCHPSSFYLLMLV

SEQ ID NO: 7495 - protein, 191 aa, Homo sapiens
MSSTLGKLSNQVEETLPLLKKPLKRAITTLMAGILRLVVQWPPGRLQTVTKGVESLICTDWIRHKFTRSRIPEKVFQASPEDHEKYGGDPQNPHKLHIVTRIKSTRRRPYWEKDIIKMLGLEKAHTPQVHKNIPSVNAKLKVVKHLIRIKPLKLPQGLPAEENMSNTCLKSTGELVVQWHLKPVEQKAHES

SEQ ID NO: 7496 - protein, 160 aa, Homo sapiens; identical to SEQ ID NO: 6461

SEQ ID NO: 7497 - protein, 106 aa, Homo sapiens
TFLEQSKTRFNKNYKGMSLSKITTTVGLNIGTVDVGKARLMFWDLGGQEELQSLWDKDKTKCGDLGTLHSSKVSASFRLRDLAADHHRTQKWQRPDVGTAGWLPLP

SEQ ID NO: 7498 - protein, 506 aa, Homo sapiens
MAELQMLLEEEIPGGRRALFDSYTNLERVADYCENNYIQSADKQRALEETKAYTTQSLASVAYLINTLANNVLQMLDIQASQLRRMESSINHISQTVDIHKEKVARREIGILTTNKNTSRTHKIIAPANLERPVRYIRKPIDYTILDDIGHGVKVSTQNMKMGGLAATPPTQKPPSPPMSGKGTLGRHSPYRTLEPVRPPVVPNDYVPSPTRNMAPSQQSPVRTASVNQRNRTYSSSGSSGGSHPSSRSSSRENSGSGSVGVPIAVPTPSPPSVFPAPAGSAGTPPLPATSASAPAPLVPATVPSSTAPDAAAGGAQTLADGFTSPTPPVVSSTPPTGHPVQFYSMNRPASRHTPPTIGGSLPYRRPPSITSQTSLQNQMNGGPFYSQNPVSDTPPPPPPVEEPVFDESPPPPPPPEDYEEEEAAVVEYSDPYAEEDPPWAPRSYLEKVVAIYDYTKDKEDELSFQEGAIIYVIKKNDDGWYEGVMNGVTGLFPGNYVESIMHYSE

SEQ ID NO: 7499 - protein, 100 aa, Homo sapiens
MASAGTQHYSIGLRQKNSFKQSGPSGTVPATPPEKPSEGRVWPQAHQQVKPIWKLEKKQVETLSAGLGPGLLGVPPQPAYFFCPSTLCSSGTTAVIAGHS

SEQ ID NO: 7500 - protein, 403 aa, Homo sapiens
MASALRPPRVPKPKGVLPSHYYESFLEKKGPCDRDYKKFWAGLQGLTIYFYNSNRDFQHVEKLNLGAFEKLTDEIPWGSSRDPGTHFSLILRDQEIKFKVETLECREMWKGFILTVVELRVPTDLTLLPGHLYMMSEVLAKEEARRALETPSCFLKVSRLEAQLLLERYPECGNLLLRPSGDGADGVSVTTRQMHNGTHVVRHYKVKREGPKYVIDVEQPFSCTSLDAVVNYFVSHTKKALVPFLLDEDYEKVLGYVEADKENGENVWVAPSAPGPGPAPCTGGPKPLSPASSQDKLPPLPPLPNQEENYVTPIGDGPAVDYENQDVASSSWPVILKPKKLPKPPAKLPKPPVGPKPEPKVFNGGLGRKLPVSSAQPLFPTAGLADMTAELQKKLEKRRALEH

SEQ ID NO: 7501 - protein, 516 aa, Homo sapiens
MLRRGSQALRRFSTGRVYFKNKLKLALIGQSLFGQEVYSHLRKEGHRVVGVFTVPDKDGKADPLALAAEKDGTPVFKLPKWRVKGKTIKEVAEAYRSVGAELNVLPFCTQFIPMDIIDSPKHGSIIYHPSILPRHRGASAINWTLIMGDKKAGFSVFWADDGLDTGPILLQRSCDVEPNDTVDALYNRFLFPEGIKAMVEAVQLIADGKAPRIPQPEEGATYEGIQKKENAEISWDQSAEVLHNWIRGHDKVPGAWTEINGQMVTFYGSTLLNSSVPPGEPLEIKGAKKPGLVTKNGLVLFGNDGKALTVRNLQFEDGKMIPASQYFSTGETSVVELTAEEVKVAETIKVIWAGILSNVPIIEDSTDFFKSGASSMDVARLVEEIRQKCGGLQLQNEDVYMATKFEGFIQKVVRKLRGEDQEVELVVDYISKEVNEIMVKMPYQCFINGQFTDADDGKTYDTINPTDGSTICKVSYASLADVDKAVAAAKDAFENGEWGRMNARERGRLMYSMRMN

SEQ ID NO: 7502 - protein, 526 aa, Homo sapiens
MEEIPAQEAAGSPRVQFQSLETQSECLSPEPQFVQDTDMEQGLTGGFPISKPDGISQLEQDLQVFDLETKTREVLRDDCSDGETREENKLLIPKQKISEEVHSYKVRVGRLKHDITQVPETREVYKSEDRLERLQEILRKFLYLEREFRQITISKETFTSEKNNECHEPEKSFSLDSTIDADQRVLRIQNTDDNDKYDMSFNQNSASGKHEHLNLTEDFQSSECKESLMDLSHLNKWESIPNTEKSYKCDVCGKIFHQSSALTRHQRIHTREKPYKCKECEKSFSQSSSLSRHKRIHTREKPYKCEASDKSCEASDKSCSPSSGIIQHKKIHTRAKSYKCSSCERVFSRSVHLTQHQKIHKEMPCKCTVCGSDFCHTSYLLEHQRVHHEEKAYEYDEYGLAYIKQQGIHFREKPYTCSECGKDFRLNSHLIQHQRIHTGEKAHECNECGKAFSQTSCLIQHHKMHRKEKSYECNEYEGSFSHSSDLILQQEVLTRQKAFDCDVWEKNSSQRAHLVQHQSIHTKENS

SEQ ID NO: 7503 - protein, 200 aa, Homo sapiens; identical to SEQ ID NO: 7494

SEQ ID NO: 7504 - protein, 179 aa, Homo sapiens [sequence omitted]

SEQ ID NO: 7505 - protein, 455 aa, Homo sapiens
MMGAPNLIADSMEYGLSYSVISYLKKLSQQAKIESDRVIGSVGKKVVQETGIKVRSRSHGLSMAYRKDFQQLLQGISEDVPHRLLDLNMKEYTGFQVALLNKDLKPQTFRNAYDIPRRNLLDHLTRMRSNLLKSTRRFLKGQDEDQVHSVPIAQMGNYQEYLKQVPSPLRELDPDQPRRLHTFGNPFKLDKKGMMIDEADEFVAGPQNKHKRPGEPNMQGIPKRRRCMSPLLRGRQQNPVVNNHIGGKGPPAPTTQAQPDLIKPLPLHKISETTNDSIIHDVVENHVADQLSSDITPNAMDTEFSASSPASLLERPTNHMEALGHDHLGTNDLTVGGFLENHEEPRDKEQCAEENIPASSLNKGKKLMHCRSHEEVNTELKAQIMKEIRKPGRKYERIFTLLKHVQGSLQTRLIFLQNVIKEASRFKKRMLIEQLENFLDEIHRRANQINHINSN

SEQ ID NO: 7506 - protein, 488 aa, Homo sapiens
LDCGPRLPVEVGPSLSSPSSGCGEGSISVGENVSDVAPTQPWWPNTPGDSVSEELGPGRSGDTEDLSPNWPLNSQEDTAAQSSPGRGEEAEASAAEAQGGEQAYLAGLAGQYHLERYPDSYESMSEPPIAHLLRPVLPRAFAFPVDPQVQSAADETAVQLSELLTLPVLMKRSITAPLAAHISLVNKAAVDYFFVELHLEAHYEALRHFLLMEDGEFAQSLSDLLFEKLGAGQTPGELLNPLVLNSVLSKALQCSLHGDTPHASNLSLALKYLPEVFAPNAPDVLSCLELRYKVDWPLNIVITEGCVSKYSGVFSFLLQLKLMMWALKDVCFHLKRTVPSAAAVQARDAAFREGHPGLHRQPDPARHLVRVQGQVGHRGRPGGDPACARRVPAQGRLQAAPVMNVIHSIFSLVLKFRSQLISQAWGPPGGPRGAEHPNFALMQQSYNTFKYYSHFLFKVVTKLVNRGYQPHLEDFLLRINFNNYYQDA

SEQ ID NO: 7507 - protein, 1272 aa, Homo sapiens
MANDSPAKSLVDIDLSSLRDPAGIFELVEVVGNGTYGQVYKGRHVKTGQLAAIKVMDVTEDEEEEIKLEINMLKKYSHHRNIATYYGAFIKKSPPGHDDQLWLVMEFCGAGSITDLVKNTKGNTLKEDWIAYISREILRGLAHLHIHHVIHRDIKGQNVLLTENAEVKLVDFGVSAQLDRTVGRRNTFIGTPYWMAPEVIACDENPDATYDYRSDLWSCGITAIEMAEGAPPLCDMHPMRALFLIPRNPPPRLKSKKWSKKFFSFIEGCLVKNYMQRPSTEQLLKHPFIRDQPNERQVRIQLKDHIDRTRKKRGEKDETEYEYSGSEEEEEEVPEQEGEPSSIVNVPGESTLRRDFLRLQQENKERSEALRRQQLLQEQQLREQEEYKRQLLAERQKRIEQQKEQRRRLEEQQRREREARRQQEREQRRREQEEKRRLEELERRRKEEEERRRAEEEKRRVEREQEYIRRQLEEEQRHLEVLQQQLLQEQAMLLHDHRRPHPQHSQQPPPPQQERSKPSFHAPEPKAHYEPADRAREVEDRFRKTNHSSPEAQSKQTGRVLEPPVPSRSESFSNGNSESVHPALQRPAEPQVPVRTTSRSPVLSRRDSPLQGSGQQNSQAGQRNSTSIEPRLLWERVEKLVPRPGSGSSSGSSNSGSQPGSHPGSQSGSGERFRVRSSSKSEGSPSQRLENAVKKPEDKKEVFRPLKPADLTALAKELRAVEDVRPPHKVTDYSSSSEESGTTDEEDDDVEQEGADESTSGPEDTRAASSLNLSNGETESVKTMIVHDDVESEPAMTPSKEGTLIVRQSTVDQKRASHHESNGFAGRIHLLPDLLQQSHSSSTSSTSSSPSSSQPTPTMSPQTPQDKLTANETQSASSTLQKHKSSSSFTPFIDPRLLQISPSSGTTVTSVVGFSCDGMRPEAIRQDPTRKGSVVNVNPTNTRPQSDTPEIRKYKKRFNSEILCAALWGVNLLVGTESGLMLLDRSGQGKVYPLINRRRFQQMDVLEGLNVLVTISGKKDKLRVYYLSWLRNKILHNDPEVEKKQGWTTVGDLEGCVHYKVVKYERIKFLVIALKSSVEVYAWAPKPYHKFMAFKSFGELVHKPLLVDLTVEEGQRLKVIYGSCAGFHAVDVDSGSVYDIYLPTHIQCSIKPHAIIILPNTDGMELLVCYEDEGVYVNTYGRITKDVVLQWGEMPTSVAYIRSNQTMGWGEKAIEIRSVETGHLDGVFMHKRAQRLKFLCERNDKVFFASVRSGGSSQVYFMTLGRTSLLSW

SEQ ID NO: 7508 - protein, 120 aa, Homo sapiens
ALQISENLFSNKVLNALKPEKDVDGVTDINLGKLVRGDAHECFVSPVAKAVIELLEKSVGVNLDGKKILVVGAHGSLEAALQCLFQRKGSMTMSIQWKTRQLQSKTESRSVTRLECRRVI

SEQ ID NO: 7509 - protein, 621 aa, Homo sapiens
MVSILSSFESRLMKLENSIIPVHKQTENLQRLQENVEKTLSCLDHVISYYHVASDTEKIIREGPTGRLEEYLGSMAKIQKAVEYFQDNSPDSPELNKVKLLFERGKEALESEFRSLMTRHSKVVSPVLILDLISGDDDLEAQEDVTLEHLPESVLQDVIRISRWLVEYGRNQDFMNVYYQIRSSQLDRSIKGLKEHFHKSSSSSGVPYSPAIPNKRKDTPTKKPVKRPGTIRKAQNLLKQYSQHGLDGKKGGSNLIPLEGRDDMLDVETDAYIHCVSAFVKLAQSEYQLLADIIPEHHQKKTFDSLIQDALDGLMLEGENIVSAARKAIVRHDFSTVLTVFPILRHLKQTKPEFDQVLQGTAASTKNKLPGLITSMETIGAKALEDFADNIKNDPDKEYNMPKDGTVHELTSNAILFLQQLLDFQETAGAMLASQGKVLGNLQLNLLSKSKVYEDPALSAIFLHNNYNYILKSLEKSELIQLVAVTQKTAERSYREHIEQQIQTYQRSWLKVTDYIAEKNLPVFQPGVKLRDKERQIIKERFKGFNDGLEELCKIQKAWAIPDTEQRDRIRQAQKTIVKETYGAFLQKFGSVPFTKNPEKYIKYGVEQVGDMIDRLFDTSA

SEQ ID NO: 7510 - protein, 447 aa, Homo sapiens
MDFLLGNPFSSPVGQRIEKATDGSLQSEDWALNMEICDIINETEEGPKDALRAVKKRIVGNKNFHEVMLALTVLETCVKNCGHRFHVLVASQDFVESVLVRTILPKNNPPTIVHDKVLNLIQTVFNSETQSGQDSVGTDSSQQEDSGQHAAPLPAPPILSGDTPIAPTPEQIGKLRSELEMVSGNVRVMSEMLTELVPTQAEPADLELLQELNRTCRAMQQRVLELIPQIANEQLTEELLIVNDNLNNVFLRHERFERFRTGQTTKAPSEAEPAADLIDMGPDPAATGNLSSQLAGMNLGSSSVRAGLQSLEASGRLEDEFDMFALTRGSSLADQRKEVKYEAPQATDGLAGALDARQQSTGAIPVTQACLMEDIEQWLSTDVGNDAEEPKGVTSEEFDKFLEERAKAADRLPNLSSPSAEGPPGPPSGPAPRKKTQEKDDDMLFAL

SEQ ID NO: 7511 - protein, 700 aa, Homo sapiens
MATMIPPVKLKWLEHLNSSWITEDSESIATREGVAVLYSKLVSNKEVVPLPQQVLCLKGPQLPDFERESLSSDEQDHYLDALLSSQLALAKMVCSDSPFAGALRKRLLVLQRVFYALSNKYHDKGKVKQQQHSPESSSGSADVHSVSERPRSSTDALIEMGVRTGLSLLFALLRQSWMMPVSGPGLSLCNDVIHTAIEVVSSLPPLSLANESKIPPMGLDCLSQVTTFLKGVTIPNSGADTLGRRLASELLLGLAAQRGSLRYLLEWIEMALGASAVVHTMEKGKLLSSQEGMISFDCFMTILMQMRRSLISENQDSADVDPQEHSFTRTIDEEAEMEEQAERDREEGHPEPEDEEEEREHEVMTAGKIFQCFLSAREVARSRDRDRMNSGAGSGARADDPPPQSQQERRVSTDLPEGQDVYTAACNSVIHRCALLILGVSPVIDELQKRREEGQLQQPSTSASEGGGLMTRSESLTAESRLVHTSPNYRLIKSRSESDLSQPESDEEGYALSGRRNVDLDLAASHRKRGPMHSQLESLSDSWARLKHSRDWLCNSSYSFESDFDLTKSLGVHTLIENVVSFVSGDVGNAPGFKEPEESMSTSPQASIIAMEQQQLRAELRLEALHQILVLLSGMEEKGSISLAGSRLSSGFQSSTLLTSVRLQFLAGCFGLGTVGHTGGKGESGRLHHYQDGIRAARGY

SEQ ID NO: 7512 - protein, 178 aa, Homo sapiens
MADRAAAERACKDPNPIIDGRKANVNLAYLGAKPRIMQPGFAFGVQQLHPALIQRPFGIPAHYVYPQAFVQPGVVIPHVQPTAAAASTTPYIDYTGAAYAQYSAAAAAAAAAAAYDQYPYAASPAAAGYVTAGGYGYAVQQPITAAAPGTAAAAAAAAAAAAAFGQYQPQQLQTDRMQ

SEQ ID NO: 7513 - protein, 192 aa, Homo sapiens; identical to SEQ ID NO: 6709

SEQ ID NO: 7514 - protein, 184 aa, Homo sapiens
MNRSQPGLLRTDPVPEEGEDVAATISATETLSEEEQEELRRELAKVEEEIQTLSQVLAAKEKHLAEIKRKLGINSLQELKQNIAKGWQDVTATSAYKKTSETLSQAGQKASAAFSSVGSVITKKLEDVKNSPTFKSFEEKVENLKSKVGGTKPAGGDFGEVLNSAANASATTTEPLPEKTQESL

SEQ ID NO: 7515 - protein, 539 aa, Homo sapiens; identical to SEQ ID NO: 5502

SEQ ID NO: 7516 - protein, 203 aa, Homo sapiens
MEPPMEPSGGEQEPGAVRFLDLPWEDVLLPHVLNRVPLRQLLRLQRVSRAFRSLVQLHLAGLRRFDAAQVGPQIPRAALARLLRDAEGLQELALAPCHEWLSDEDLVPVLARNPQLRSVALGGCGQLSRRALGALAEGCPRLQRLSLAHCDWVDGLALRGLADRCPALEELDLTACRQLKDEAIVYLAQRRGAGLRSLSLAVN

SEQ ID NO: 7517 - protein, 607 aa, Homo sapiens
MARGLGKASGFPAGPSGAELPASGRRRGPLISLFPAVLASEAAMSYPADDYESEAAYDPYAYPSDYDMHTGDPKQDLAYERQYEQQTYQVIPEVIKNFIQYFHKTVSDLIDQKVYELQASRVSSDVIDQKVYEIQDIYENSWTKLTERFFKNTPWPEAEAIAPQVGNDAVFLILYKELYYRHIYAKVSGGPSLEQRFESYYNYCNLFNYILNADGPAPLELPNQWLWDIIDEFIYQFQSFSQYRCKTAKKSEEEIDFLRSNPKIWNVHSVLNVLHSLVDKSNINRQLEVYTSGGDPESVAGEYGRHSLYKMLGYFSLVGLLRLHSLLGDYYQAIKVLENIELNKKSMYSRVPECQVTTYYYVGFAYLMMRRYQDAIRVFANILLYIQRTKSMFQRTTYKYEMINKQNEQMHALLAIALTMYPMRIDESIHLQLREKYGDKMLRMQKGDPQVYEELFSYSCPKFLSPVVPNYDNVHPNYHKEPFLQQLKVFSDEVQQQAQLSTIRSFLKLYTTMPVAKLAGFLDLTEQEFRIQLLVFKHKMKNLVWTSGISALDGEFQSASEVDFYIDKDMIHIADTKVARRYGDFFIRQIHKFEELNRTLKKMGQRP

SEQ ID NO: 7518 - protein, 434 aa, Homo sapiens
MAASSLEQKLSRLEAKLKQENREARRRIDLNLDISPQRPRPIIVITLSPAPAPSQRAALQLPLANDGGSRSPSSESSPQHPTPPARPRHMLGLPSTLFTPRSMESIEIDQKLQEIMKQTGYLTIGGQRYQAEINDLENLGEMGSGTCGQVWKMRFRKTGHVIAVKQMRRSGNKEENKRILMDLDVVLKSHDCPYIVQCFGTFITNTDVFIAMELMGTCAEKLKKRMQGPIPERILGKMTVAIVKALYYLKEKHGVIHRDVKPSNILLDERGQIKLCDFGISGRLVDSKAKTRSAGCAAYMAPERIDPPDPTKPDYDIRADVWSLGISLVELATGQFPYKNCKTDFEVLTKVLQEEPPLLPGHMGFSGDFQSFVKDCLTKDHRKRPKYNKLLEHSFIKRYETLEVDVASWFKDVMAKTESAASGVLSQPHLPFFR

SEQ ID NO: 7519 - protein, 1000 aa, Homo sapiens
MASSPLPGPNDILLASPSSAFQPDTLSQPRPGHANLKPNQVGQVILYGIPIVSLVIDGQERLCLAQISNTLLKNFSYNEIHNRRVALGITCVQCTPVQLEILRRAGAMPISSRRCGMITKREAERLCKSFLGENRPPKLPDNFAFDVSHECAWGCRGSFIPARYNSSRAKCIKCSYCNMYFSPNKFIFHSHRTPDAKYTQPDAANFNSWRRHLKLTDKSPQDELVFAWEDVKAMFNGGSRKRALPQPGAHPACHPLSSVKAAAVAAAAAVAGGGGLLGPHLLGAPPPPPPPPPPLAELAGAPHAHHKRPRFDDDDDSLQEAAVVAAASLSAAAASLSVAAASGGAGTGGGGAGGGCVAGVGVGAGAGAGAGAGAKGPRSYPVIPVPSKGSFGGVLQKFPGCGGLFPHPYTFPAAAAAFSLCHKKEDAGAAAEALGGAGAGGAGAAPKAGLSGLFWPAGRKDAFYPPFCMFWPAAPGGLPVPTYLQPPPQPPSALGCALGESPALLRQAFLDLAEPGGAAGSAEAAPPPGQPPQVVANGPGSGPPPPAGGAGSRDALFESPPGGSGGDCSAGSTPPADSVAAAGAGAAAAGSGPAGSRVPAPHHPHLLEGRKAGGGSYHHSSAFRPVGGKDDAESLAKLHGASAGAPHSAQTHPHHHHHPHHHHHHHHPPQPPSPLLLLPPQPDEPGSERHHPAPPPPPPPPPPPPLAQHPHHRGLLSPGGTSCCYPSEDSSEDEDDEEEEQEVDVEGHKPPEGEEEEEGRDPDDDEEEDEETEVLLGDPLVGGGRFLQGRGPSEKGSSRDRAPAVAGAFPLGLNSSRLLQEDGKLGDPGSDLPPPPPPPLAPQKASGGGSSSPGSPVHHPSLEEQPSYKDSQKTKENNQVIVSTKDDNSFSDKNKEHSFFITDSDASGGDFWRERSGEHTQETNSPHSLKKDVENMGKEELQKVLFEQIDLRRRLEQEFQVLKGNTSFPVFNNFQDQMKRELAYREEMVQQLQIVSCIST

SEQ ID NO: 7520 - protein, 65 aa, Homo sapiens
MAMAPSPSLVQVYTSPAAVAVWEWQDGLGTWHPYSATVCSFIEQQFVQQKGQRFGLGSLAHSIPL

SEQ ID NO: 7521 - protein, 346 aa, Homo sapiens
MISRPAWLWGAEMGANEHGVCIANEAINTREPAAEIEALLGMDLVRLGLERGETAKEALDVIVSLLEEHGQGGNYFEDANSCHSFQSAYLIVDRDEAWVLETIGKYWAAEKVTEGVRCICSQLSLTTKMDAEHPELRSYAQSQGWWTGEGEFNFSEVFSPVEDHLDCGAGKDSLEKQEESITVQTMMNTLRDKASGVCIDSEFFLTTASGVSVLPQNRSSPCIHYFTGTPDPSRSIFKPFIFVDDVKLVPKTQSPCFGDDDPAKKEPRFQEKPDRRHELYKAHEWARAIIESDQEQGRKLRSTMLELEKQGLEAMEEILTSSEPLDPAEVGDLFYDCVDTEIKFFK

SEQ ID NO: 7522 - protein, 539 aa, Homo sapiens; identical to SEQ ID NO: 5502

SEQ ID NO: 7523 - protein, 129 aa, Homo sapiens; identical to SEQ ID NO: 6440

SEQ ID NO: 7524 - protein, 579 aa, Homo sapiens
MSAANPETPNSTISREASTQSSSAAASQGWVLPEGKIVPNTVFVGGIDARMDETEIGSCFGRYGSVKEVKIITNRTGVSKGYGFVSFVNDVDVQKIVGSQIHFHGKKLKLGPAIRKQKLCARHVQPRPLVVNPPPPPQFQNVWRNPNTETYLQPQITPNPVTQHVQSAANPETPNSTISREASTQSSSAAASQGWVLPEGKIVPNTVFVGGIDARMDETEIGSCFGRYGSVKEVKIITNRTGVSKGYGFVSFVNDVDVQKIVGSQIHFHGKKLKLGPAIRKQKLCARHVQPRPLVVNPPPPPQFQNVWRNPNTETYLQPQITPNPVTQHVQAYSAYPHSPGQVITGCQLLVYNYQEYPTYPDSAFQVTTGYQLPVYNYQPFPAYPRSPFQVTAGYQLPVYNYQAFPAYPNSPFQVATGYQFPVYNYQPFPAYPSSPFQVTAGYQLPVYNYQAFPAYPNSPFQVATGYQFPVYNYQAFPAYPNSPVQVTTGYQLPVYNYQAFPAYPSSPFQVTTGYQLPVYNYQAFPAYPNSAVQVTTGYQFHVYNYQMPPQCPVGEQRRNLWTEAYKWWYLVCLIQRRD

SEQ ID NO: 7525 - protein, 276 aa, Homo sapiens
MYASWTKACRGLEELINLTRLNVSYNHIDDLSGLIPLHGIKHKLRYIDLHSNRIDSIHHLLQCMVGLHFLTNLILEKDGDDNPVCRLPGYRAVILQTLPQLRILDCKNIFGEPVNLTEINSSQLQCLEGLLDNLVSSDSPLNISEDEIIDRMPVITAPIDELVPLEQFASTPSDAVLTSFMSVCQSSEPEKNNHENDLQNEIKLQKLDDQILQLLNETSNSIDNVLEKDPRPKRDTDITSESDYGNSRKNGETKKAAAGSTDKTDPRGGTQSFSCR

SEQ ID NO: 7526 - protein, 663 aa, Homo sapiens
MGDDGSPPAKKMITDIHANGKTINKVPTVKKEHLDDYGEAPVETDGEHVKRTCTSVPETLHLNPSLKHTLAQFHLSSQSSLGGPAAFSARHSQESMSPTVFLPLPSPQVLPGPLLIPSDSSTELTQTVLEGESISCFQVGGEKRLCLPQVLNSVLREFTLQQINTVCDELYIYCSRCTSDQLHILKVLGILPFNAPSCGLITLTDAQRLCNALLRAAFPQNGSVLPAKSSLAQLKETGSAFEVEHECLGKCQGLFAPQFYVQPDAPCIQCLECCGMFAPQTFVMHSHRSPDKRTCHWGFESAKWHCYLHVNQKYLGTPEEKKLKIILEEMKEKFSMRSGKRNQSKTDAPSGMELQSWYPVIKQEGDHVSQTHSFLHPSYYLYMCDKVVAPNVSLTSAVSQSKELTKTEASKSISRQSEKAHSSGKLQKTVSYPDVSLEEQEKMDLKTSRELCSRLDASISNNSTSKRKSESATCNLVRDINKVGIGLVAAASSPLLVKDVICEDDKGKIMEEVMRTYLKQQEKLNLILQKKQQLQMEVKMLSSSKSMKELTEEQQNLQKELESLQNEHAQRMEEFYVEQKDLEKKLEQIMKQKCTCDSNLEKDKEAEYAGQLAELRQRLDHAEADRQELQDELRQEREARQKLEMMIKELKLQILKSSKTAKE

SEQ ID NO: 7527 - protein, 355 aa, Homo sapiens
MGRRDLVSGGSNEGNGKEDWAMKTVSLRWTKLPPVKSAIRGQAPVVPYMRYGHSTVLIDDTVLLWGGRNDTEGACNVLYAFDVNTHKWFTPRVSGTVPGARDGHSACVLGKIMYIFGGYEQQADCFSNDIHKLDTSTMTWTLICTKGSPARWRDFHSATMLGSHMYVFGGRADRFGPFHSNNEIYCNRIRVFDTRTEAWLDCPPTPVLPEGRRSHSAFGYNGELYIFGGYNARLNRHFHDLWKFNPVSFTWKKIEPKGKGPCPRRRQCCCIVGDKIVLFGGTSPSPEEGLGDEFDLIDHSDLHILDFSPSLKTLCKLAVIQYNLDQSCLPHDIRWELNAMTTNSNISRPIVSSHG

SEQ ID NO: 7528 - protein, 413 aa, Homo sapiens; identical to SEQ ID NO: 4779

SEQ ID NO: 7529 - protein, 399 aa, Homo sapiens
MATGDLKRSLRNLEQVLRLLNYPEEVDCVGLIKGDPAASLPIISYSFTSYSPYVTELIMESNVELIAKNDLRFIDAVYKLLRDQFNYKPILTKKQFIQCGFAEWKIQIVCDILNCVMKKHKELSSLQKIPSQQRKKISSGKSEPPLGNEKISAEAVGVDISGRFMTSGKKKAVVIRHLYNEDNVDISEDTLSPITDVNEAVDVSDLNATEIKMPEVKVPEIKAEQQDVNVNPEITALQTMLAECQENLKKLTSIEKRLDCLEQKMKGKVMVDENTWTNLLSRVTLLETEMLLSKKNDEFIEFNEVSEDYASCSDMDLLNPHRKSEVERPASIPLSSGYSTASSDSTPRASTVNYCGLNEISENFPAWSATSSCSSLSWLLRGHTSYLSSQSFAWPLSCV

SEQ ID NO: 7530 - protein, 437 aa, Homo sapiens
  VARIANT 1: note = X can be any amino acid
XCAGAERPRRRGRLWDSSGVPQRQKRPGPWRTQTQEQMSRDVCIHTWPCTYYLEPKRRWVTGQLSLTSLSLRFMTDSTGEILVSFPLSSIVEIKKEASHFIFSSITILEKGHAKHWFSSLRPSRNVVFSIIEHFWRELLLSQPGAVADASVAARGEELTGLMAGSQKRLEDTARVLHHQGQQLDSVMRGLDKMESDLEVADRLLTELESPAWWPFSSKLWKTPPETKPREDVSMTSCEPFGKEGILIKIPAVISHRTESHVKPGRLTVLVSGLEIHDSSSLLMHRFEREDVDDIKVHSPYEISIRQRFIGKPDMAYRLISAKMPEVIPILEVQFSKKMELLEDALVLRSARTSSPAEKSCSVWHAASGLMGRTLHREPPAGDQEGTALHLQTSLPALSEADTQELTQGFRPMSLSTQTVLVMLCSESAGALWRQRLS

SEQ ID NO: 7531 - protein, 236 aa, Homo sapiens
MTGYEARLITFGTWMYSVNKEQLARAGFYAIGQEDKVQCFHCGGGLANWKPKEDPWEQHAKWYPGCKYLLEEKGHEYINNIHLTRSLEGALVQTTKKTPSLTKRISDTIFPNPMLQEAIRMGFDFKDVKKIMEERIQTSGSNYKTLEVLVADLVSAQKDTTENELNQTSLQREISPEEPLRRLQEEKLCKICMDRHIAVVFIPCGHLVTCKQCAEAVDRCPMCSAVIDFKQRVFMS

SEQ ID NO: 7532 - protein, 94 aa, Homo sapiens
MNPTNPFSGQQPSAFSASSSNVGTLPSKPPFRFGQPSLFGQNSTLSGKSSGFSQVSSFPASSGVSHSSSVQTLGFTQTSSVGPFSGLEHTSTFV

SEQ ID NO: 7533 - protein, 240 aa, Homo sapiens
MAIVQTLPVPLEPAPEAATAPQAPVMGSVSSLISGRPCPGGPAPPRHHGPPGPTFFRQQDGLLRGGYEAQEPLCPAVPPRKAVPVTSFTYINEDFRTESPPSPSSDVEDAREQRAHNAHLRGPPPKLIPVSGKLEKNMEKILIRPTAFKPVLPKPRGAPSLPSFMGPRATGLSGSQGSLTQLFGGPASSSSSSSSSSAADKPLAFSGWASGCPSGTLSDSGRNSLSSLPTYSTGGAEPTT

SEQ ID NO: 7534 - protein, 438 aa, Homo sapiens; identical to SEQ ID NO: 5383

SEQ ID NO: 7535 - protein, 225 aa, Homo sapiens
MEEEEMNDGSQMVRSQESLTFQDVAVDFTREEWDQLYPAQKNLYRDVMLENYRNLVALGYQLCKPEVIAQLELEEEWVIERDSLLDTHPGDQSHVMSVVRSSVHARWIVGKVIGTKMQKTAKVRVTRLVLDPYLLKYFNKRKTYFAHDALQQCTVGDIVLLRALPVPRAKHVKHELAEIVFKVGKVIDPVTGKPCAGTTYLESPLSSETTQLSKNLEELNISSAQ

SEQ ID NO: 7536 - protein, 250 aa, Homo sapiens
MTTKNLETKVTVTSSPIRGAGDGMETEEPPKSVEVTSGVQSRKHHSLQSPWKKAVPSESPGVLQLGKMLTEKAMEVKAVRILVPKAAITHDIPNKNTKVKSLGHHKGEFLGQSEGVIEPNKELSEVKNVLEKLKNSERRLLQDKEGLSNQLRVQTEVNRELKKLLVASVGDDLQYHFERLAREKNQLILENEALGRNTAQLSEQLERMSIQCDVWRSKFLASRVMADELTNSRAALQRQNRDAHGAIQDL

SEQ ID NO: 7537 - protein, 128 aa, Homo sapiens
MLCWGYWSLGQPGISTNLQGIVAEPQVCGFISDRSVKEVACGGNHSVFLLEDGEVYTCGLNTKGQLGHEREGNKPEQIGALADQHIIHVACGESHSLALSDRGQLFSWGAGSDGQLGLMTTEDSVAVP

SEQ ID NO: 7538 - protein, 538 aa, Homo sapiens
MDVDKELGMESVKAGASGKPEMRLGTQEETSEGDANESSLLVLSSNVPLLALEFLEIAQAKEKAFLPMVSHTFHMRTEESDASQEGDDLPKSSANTSHPKQDDSPKSSEETIQPKEGDIPKAPEETIQSKKEDLPKSSEKAIQPKESNIPKSSAKPIQPKLGNIPKASVKPSQPKEGDIPKAPEETIQSKKEDLPKSSEEAIQPKEGDIPKSSAKPIQPKLGNIAKTSVKPSQPKESDIPKSPEETIQPKEGDIPKSSAKPIQPKLGNIPKASVKPSQPKEGDISKSPEEAIQPKEGDLPKSLEEAIQPKEGDIPKSLEEAIQPKEGDIPKSPEETIQPKKGDIPKSPEEAIQPKEGDIPKSPKQAIQPKEGDIPKSLEEAIPPKEIDIPKSPEETIQPKEDDSPKSLEEATPSKEGDILKPEEETMEFPEGDKVKVILSKEDFEASLKEAGERLVAVDFSATWCGPCRTIRPFFHALSVKHEDVVFLEVDADNCEEVVRECAIMCVPTFQFYKKEEKVDELCGALKEKLEAVIAELK

SEQ ID NO: 7539 - protein, 50 aa, Homo sapiens
MASEELQKDLEEVKVLLEKATRKRVRDALTAEKSKIETEIKNKMQQKSQK

SEQ ID NO: 7540 - protein, 508 aa, Homo sapiens; identical to SEQ ID NO: 5363

SEQ ID NO: 7541 - protein, 1281 aa, Homo sapiens [sequence omitted]

SEQ ID NO: 7542 - protein, 356 aa, Homo sapiens; identical to SEQ ID NO: 6379

SEQ ID NO: 7543 - protein, 914 aa, Homo sapiens
MQGPDAPLLLSARELGPGRRGSASWYRQEGGAVCNWLRKPQPLEAASFPSARRSEFRPPRRLPWAGPASAQSEEGHAGGRCQAGSPAPARRLSGAFKTLVPGTHAQGASDTHPLGPPHTPVLDPSPQDGFPVLWRGSSKASHMNRLRNAKIYVERAVKQKKIFTIQGCYPVIRCLLRRRGWVEKKMVHRSGPTLLPPQKDLDSSAMGDSDTTEDEDEDEDEEFQPSQLFDFDDLLKFDDLDGTHALMVGLCLNLRNLPWFDEVDANSFFPRCYCLGAEDDKKAFIEDFWLTAARNVLKLVVKSEWKSYPIQAVEEEASGDKQPKKQEKNPVLVSPEFVDEALCACEEYLSNLAHMDIDKDLEAPLYLTPEGWSLFLQRYYQVVHEGAELRHLDTQVQRCEDILQQLQAVVPQIDMEGDRNIWIVKPGAKSRGRGIMCMDHLEEMLKLVNGNPVVMKDGKWVVQKYIERPLLIFGTKFDLRQWFLVTDWNPLTVWFYRDSYIRFSTQPFSLKNLDNSVHLCNNSIQKHLENSCHRHPLLPPDNMWSSQRFQAHLQEMGAPNAWSTIIVPGMKDAVIHALQTSQDTVQCRKASFELYGADFVFGEDFQPWLIEINASPTMAPSTAVTARLCAGVQADTLRVVIDRMLDRNCDTGAFELIYKQPAVEVPQYVGIRLLVEGFTIKKPMAMCHRRMGVRPAVPLLTQRGSGEARHHFPSLHTKAQLPSPHVLRHQGQVLRRQHSKLVGTKALSTTGKALRTLPTAKVFISLPPNLDFKVAPSILKPRKAPALLCLRGPQLEVPCCLCPLKSEQFLAPVGRSRPKANSRPDCDKPRAEACPMKRLSPLKPLPLVGTFQRRRGLGDMKLGKPLLRFPTALVLDPTPNKKKQVKYLGLDSIAVGGSRVDGARPCTPGSTARA

SEQ ID NO: 7544 - protein, 820 aa, Homo sapiens
MRISSCSDESSNSNSSRKSDNHSPAVVTTTVSSKKQPSVLVTFPKEERKSVSGKASIKLSETISEGTSNSLSTCTKSGPSPLSSPNGKLTVASPKRGQKREEGWKEVVRRSKKVSVPSTVISRVIGRGGCNINAIREFTGAHIDIDKQKDKTGDRIITIRGGTESTRQATQLINALIKDPDKEIDELIPKNRLKSSSANSKIGSSAPTTTAANTSLMGIKMTTVALSSTSQTATALTVPAISSASTHKTIKNPVNNVRPGFPVSLPLAYPPPQFAHALLAAQTFQQIRPPRLPMTHFGGTFPPAQSTWGPFPVRPLSPARATNSPKPHMVPRHSNQNSSGSQVNSAGSLTSSPTTTTSSSASTVPGTSTNGSPSSPSVRRQLFVTVVKTSNATTTTVTTTASNNNTAPTNATYPMPTAKEHYPVSSPSSPSPPAQPGGVSRNSPLDCGSASPNKVASSSEQEAGSPPVVETTNTRPPNSSSSSGSSSAHSNQQQPPGSVSQEPRPPLQQSQVPPPEVRMTVPPLATSSAPVAVPSTAPVTYPMPQTPMGCPQPTPKMETPAIRPPPHGTTAPHKNSASVQNSSVAVLSVNHIKRPHSVPSSVQLPSTLSTQSACQNSVHPANKPIAPNFSAPLPFGPFSTLFENSPTSAHAFWGGSVVSSQSTPESMLSGKSSYLPNSDPLHQSDTSKAPGFRPPLQRPAPSPSGIVNMDSPYGSVTPSSTHLGNFASNISGGQMYGPGAPLGGAPAAANFNRQHFSPLSLLTPCSSASNDSSAQSVSSGVRAPSPAPSSVPLGSEKPSNVSQDIVASGPLKGLVAIKTK

SEQ ID NO: 7545 - protein, 2012 aa, Homo sapiens
MEKATVPVAAATAAEGEGSPPAVAAVAGPPAAAEVGGGVGGSSRARSASSPRGMVRVCDLLLKKKPPQQQHHKAKRNRTCRPPSSSESSSDSDNSGGGGGGGGGGGGGGGTSSNNSEEEEDDDDEEEEVSEVESFILDQDDLENPMLETASKLLLSGTADGADLRTVDPETQARLEALLEAAGIGKLSTADGKAFADPEVLRRLTSSVSCALDEAAAALTRMRAESTANAGQSDNRSLAEACSEGDVNAVRKLLIEGRSVNEHTEEGESLLCLACSAGYYELAQVLLAMHANVEDRGIKGDITPLMAAANGGHVKIVKLLLAHKADVNAQSSTGNTALTYACAGGYVDVVKVLLESGASIEDHNENGHTPLMEAGSAGHVEVARLLLENGAGINTHSNEFKESALTLACYKGHLEMVRFLLEAGADQEHKTDEMHTALMEACMDGHVEVARLLLDSGAQVNMPADSFESPLTLAACGGHVELAALLIERGASLEEVNDEGYTPLMEAAREGHEEMVALLLGQGANINAQTEETQETALTLACCGGFLEVADFLIKAGADIELGCSTPLMEAAQEGHLELVKYLLAAGANVHATTATGDTALTYACENGHTDVADVLLQAGADLEHESEGGRTPLMKAARAGHVCTVQFLISKGANVNRTTANNDHTVLSLACAGGHLAVVELLLAHGADPTHRLKDGSTMLIEAAKGGHTSVVCYLLDYPNNLLSAPPPDVTQLTPPSHDLNRAPRVPVQALPMVVPPQEPDKPPANVATTLPIRNKAASKQKSSSHLPANSQDVQGYITNQSPESIVEEAQGKLTELEQRIKEAIEKNAQLQSLELAHADQLTKEKIEELNKTREEQIQKKQKILEELQKVERELQLKTQQQLKKQYLEVKAQRIQLQQQQQQSCQHLGLLTPVGVGEQLSEGDYARLQQVDPVLLKDEPQQTAAQMGFAPIQPLAMPQALPLAAGPLPPGSIANLTELQVLSSLLQPCFLSTLPLILMHRLRVIMTRPKSSSTSESGDSDNMRISSCSDESSNSNSSARGSSDNHSPAVVTTTVSSKKQPSVLVTFPKEERKSVSGKASIKLSETISEGTSNSLSTCTKSGPSPLSSPNGKLTVASPKRGQKREEGWKEVVRRSKKVSVPSTVISRVIGRGGCNINAIREFTGAHIDIDKQKDKTGDRIITIRGGTESTRQATQLINALIKDPDKEIDELIPKNRLKSSSANSKIGSSAPTTTAANTSLMGIKMTTVALSSTSQTATALTVPAISSASTHKTIKNPVNNVRPGFPVSLPLAYPPPQFAHALLAAQTFQQIRPPRLPMTHFGGTFPPAQSTWGPFPVRPLSPARATNSPKPHMVPRHSNQNSSGSQVNSAGSLTSSPTTTTSSSASTVPGTSTNGSPSSPSVRRQLFVTVVKTSNATTTTVTTTASNNNTAPTNATYPMPTAKEHYPVSSPSSPSPPAQPGGVSRNSPLDCGSASPNKVASSSEQEAGSPPVVETTNTRPPNSSSSSGSSSAHSNQQQPPGSVSQEPRPPLQQSQVPPPEVRMTVPPLATSSAPVAVPSTAPVTYPMPQTPMGCPQPTPKMETPAIRPPPHGTTAPHKNSASVQNSSVAVLSVNHIKRPHSVPSSVQLPSTLSTQSACQNSVHPANKPIAPNFSAPLPFGPFSTLFENSPTSAHAFWGGSVVSSQSTPESMLSGKSSYLPNSDPLHQSDTSKAPGFRPPLQRPAPSPSGIVNMDSPYGSVTPSSTHLGNFASNISGGQMYGPGAPLGGAPAAANFNRQHFSPLSLLTPCSSASNDSSAQSVSSGVRAPSPAPSSVPLGSEKPSNVSQDRKVPVPIGTERSARIRQTGTSAPSVIGSNLSTSVGHSGIWSFEGIGGNQDKVDWCNPGMGNPMIHRPMSDPGVFSQHQAMERDSTGIVTPSGTFHQHVPAGYMDFPKVGGMPFSVYGNAMIPPVAPIPDGAGGPIFNGPHAADPSWNSLIKMVSSSTENNGPQTVWTGPWAPHMNSVHMNQLG

SEQ ID NO: 7546 - protein, 481 aa, Homo sapiens
MASAASVTSLADEVNCPICQGTLREPVTIDCGHNFCRACLTRYCEIPGPDLEESPTCPLCKEPFRPGSFRPNWQLANVVENIERLQLVSTLGLGEEDVCQEHGEKIYFFCEDDEMQLCVVCREAGEHATHTMRFLEDAAAPYREQIHKCLKCLRKEREEIQEIQSRENKRMQVLLTQVSTKRQQVISEFAHLRKFLEEQQSILLAQLESQDGDILRQRDEFDLLVAGEICRFSALIEELEEKNERPARELLTDIRSTLIRCETRKCRKPVAVSPELGQRIRDFPQQALPLQREMKMFLEKLCFELDYEPAHISLDPQTSHPKLLLSEDHQRAQFSYKWQNSPDNPQRFDRATCVLAHTGITGGRHTWVVSIDLAHGGSCTVGVVSEDVQRKGELRLRPEEGVWAVRLAWGFVSALGSFPTRLTLKEQPRQVRVSLDYEVGWVTFTNAVTREPIYTFTASFTRKVIPFFGLWGRGSSFSLSS

SEQ ID NO: 7547 - protein, 521 aa, Homo sapiens
MPSPQLLVLFGSQTGTAQDVSERLGREARRRRLGCRVQALDSYPVVNLINEPLVIFVCATTGQGDPPDNMKNFWRFIFRKNLPSTALCQMDFAVLGLGDSSYAKFNFVAKKLHRRLLQLGGSALLPVCLGDDQHELGLPSKFTLLFLQEAPSTGSEGQRVAHPGSQEPPSESKPFLAPMISNQRVTGPSHFQDVRLIEFDILGSGISFAAGDVVLIQPSNSAAHVQRFCQVLGLDPDQLFMLQPREPDVSSPTRLPQPCSMRHLVSHYLDIASVPRRSFFELLACLSLHELEREKLLEFSSAQGQEELFEYCNRPRRTILEVLCDFPHTAAAIPPDYLLDLIPVIRPRAFSIASSLLTHPSRLQILVAVVQFQTRLKEPRRGLCSSWLASLDPGQGPVRVPLWVRPGSLAFPETPDTPVIMVGPGTGVAPFRAAIQERVAQGQTGNFLFFGCRWRDQDFYWEAEWQELEKRDCLTLIPAFSREQEQKVYVQHRLRELGSLVWELLDRQATPSPCQRTSRKP

SEQ ID NO: 7548 - protein, 250 aa, Homo sapiens
  VARIANT 1: note = X can be any amino acid
XQPSPVEPRGPFYFCRLLLDDLGMNSWDRRKNFHLLKKNSKLLRELKNLDSRQCRETHKIAVFYIAEGQEDKCSILSNERGSQAYEDFVAGLGWEVDLSTHCGFMGGLQRNGSTGQTAPYYATSTVEVIFHVSTRMPSDSDDSLTKKLRHLGNDEVHIVWSEHSRDYRRGIIPTAFGDVSIIIYPMKNHMFFIAITKKPEVPFFGPLFDGAIVSGKLLPSLVCATCINASRAVKCLIPLYQSLYLFALNV

SEQ ID NO: 7549 - protein, 114 aa, Homo sapiens
MVLILGRRLNREDLGVRDSPATKRKVFEMDPKSLTGHEFFDFSSGSSHAENILQIFNEFRDSRLFTDVIICVEGKEFPCHRAVLSACSSYFRAMFCNDHRESREMLVEINGILA

SEQ ID NO: 7550 - protein, 609 aa, Homo sapiens
MASLSRALRVAAAHPRQSPTRGMGPCNLSSAAGPTAEKSVPYQRTLKEGQGTSVVAQGPSRPLPSTANVVVIGGGSLGCQTLYHLAKLGMSGAVLLERERLTSGTTWHTAGLLWQLRPSDVEVELLAHTRRVVSRELEEETGLHTGWIQNGGLFIASNRQRLDEYKRLMSLGKAYGVESHVLSPAETKTLYPLMNVDDLYGTLYVPHDGTMDPAGTCTTLARAASARGAQVIENCPVTGIRVWTDDFGVRRVAGVETQHGSIQTPCVVNCAGVWASAVGRMAGVKVPLVAMHHAYVVTERIEGIQNMPNVRDHDASVYLRLQGDALSVGGYEANPIFWEEVSDKFAFGLFDLDWEVFTQHIEGAINRVPVLEKTGIKSTVCGPESFTPDHKPLMGEAPELRGFFLGCGFNSAGMMLGGGCGQELAHWIIHGRPEKDMHGYDIRRFHHSLTDHPRWIRERSHESYAKNYSVVFPHDEPLAGRNMRRDPLHEELLGQGCVFQERHGWERPGWFHPRGPAPVLEYDYYGAYGSRAHEDYAYRRLLADEYTFAFPPHHDTIKKECLACRGAAAVFDMSYFGKFYLVGLDARKAADWLFSADVSRPPGLHRVHV

SEQ ID NO: 7551 - protein, 42 aa, Homo sapiens
MDNMSPRLRAFLSEPIGEKDVCWVDGISHELAINLVTKGINK

SEQ ID NO: 7552 - protein, 1039 aa, Homo sapiens
MVSSAQMGFNLQALLEQLSQDELSKFKYLITTFSLAHELQKIPHKEMASLQVFEKMHRMDLSERAKDEVREAALKSFNKRKPLSLGITRKERPPLDVDEMLERFKTEAQAFTETKGNVICLGKEVFKGKKPDKDNRCRYILKTKFREMWKSWPGDSKEVQVMAERYKMLIPFSNPRVLPGPFSYTVVLYGPAGLGKTTLAQKLMLDWAEDNLIHKFKYAFYLSCRELSRLGPCSFAELVFRDWPELQDDIPHILAQARKILFVIDGFDELGAAPGALIEDICGDWEKKKPVPVLLGSLLNRVMLPKAALLVTTRPRALRDLRILAEEPIYIRVEGFLEEDRRAYFLRHFGDEDQAMRAFELMRSNAALFQLGSAPAVCWIVCTTLKLQMEKGEDPVPTCLTRTGLFLRFLCSRFPQGAQLRGALRTLSLLAAQGLWAQTSVLHREDLERLGVQESDLRLFLDGDILRQDRVSKGCYSFIHLSFQQFLTALFYTLEKEEEEDRDGHTWDIGDVQKLLSGVERLRNPDLIQAGYYSFGLANEKRAKELEATFGCRMSPDIKQELLRCDISCKGGHSTVTDLQELLGCLYESQEEELVKEVMAQFKEISLHLNAVDVVPSSFCVKHCRNLQKMSLQVIKENLPENVTASESDAEVERSQDDQHMLPFWTDLCSIFGSNKDLMGLAINDSFLSASLVRILCEQIASDTCHLQRVVFKNISPADAHRNLCLALRGHKTVTYLTLQGNDQDDMFPALCEVLRHPECNLRYLGLVSCSATTQQWADLSLALEVNQSLTCVNLSDNELLDEGAKLLYTTLRHPKCFLQRLSLENCHLTEANCKDLAAVLVVSRELTHLCLAKNPIGNTGVKFLCEGLRYPECKLQTLVLWNCDITSDGCCDLTKLLQEKSSLLCLDLGLNHIGVKGMKFLCEALRKPLCNLRCLWLWGCSIPPFSCEDLCSALSCNQSLVTLDLGQNPLGSSGVKMLFETLTCSSGTLRTLRLKIDDFNDELNKLLEEIEEKNPQLIIDTEKHHPWAERPSSHDFMI

SEQ ID NO: 7553 - protein, 631 aa, Homo sapiens; identical to SEQ ID NO: 5339

SEQ ID NO: 7554 - protein, 62 aa, Homo sapiens
MSISSDEVNFLVYRYLQESGFSHSAFTFGIESHISQSNINGALVPPAALISIIQKGLQYVEA

SEQ ID NO: 7555 - protein, 138 aa, Homo sapiens
MEPSAQQLQLAASLPANLSNFCQGSEMPTTSRPALDVKGGTSPAKEDANQEMSSVAYSNLAVKDRKAVAILHYPGVASNGTKASGAPTSSSGSPIGSPTTTPPTKPPSFNLHPAPHLLASMHLQKLNSQYQGMAAATP

SEQ ID NO: 7556 - protein, 490 aa, Homo sapiens; identical to SEQ ID NO: 5369

SEQ ID NO: 7557 - protein, 118 aa, Homo sapiens
MASSAREHLLFVRRRNPQMRYTLSPENLQSLAAQSSMPENMTLQRANSDTDLVTSESRSSLTASMYEYTLGQAQNLIIFWDIKEEVDPSDWIGLYHIDENSPANFWDSKNRGVTGTQK

SEQ ID NO: 7558 - protein, 539 aa, Homo sapiens; identical to SEQ ID NO: 5502

SEQ ID NO: 7559 - protein, 89 aa, Homo sapiens; identical to SEQ ID NO: 6950

SEQ ID NO: 7560 - protein, 302 aa, Homo sapiens; identical to SEQ ID NO: 4818

SEQ ID NO: 7561 - protein, 506 aa, Homo sapiens
MSVLSPGDLKPKRGSPHRGSLDRTDASTDLAMRSWPSELGSRTCSTSATTTAPSNSTPIARHPGRTKGYNSDDNLCEPSLEFEVPNHRQYVSRPSSLESSRNTSSNSSPLNLKGSSEQLHGRSESFSSEDLIPSRDLATLPREASTPGRNALGRHEYPLPRNGPLPQEGAQKRGTAPPYVGVRPCSASPSSEMVTLEEFLEESNRSSPTHDTPSCRDDLLSDYFRKASDPPAIGGQPGPPAKKEGAKMPTNFVAPTVKMAAPTSEGRPLKPGQYVKPNFRLTEAEAPPSVAPRQAQPPQSLSLGRPRQAPEALGGRETGSHTLQSPAPPSSHSLARERTPLVGKAGSSCQGPGPRSRPLDTRRFSLAPPKEERLAPLHQSATAPAIATAGAGAAAAGSGSNSQLLHFSPAAAPAARTKPKAPPRSGEVATITPVRAGLSLSEGDGVPGQGCSEGLPAKSPGRSPDLAPHLGRALEDCSRGSVSKSSPASPEPGGDPQTVWYEYGCV

SEQ ID NO: 7562 - protein, 225 aa, Homo sapiens
MAQTVPPCELPCKEYDVARNTGAYTSSGLATASFRTSKYLLEEWFQNCYARYHQAFADRDQSERQRHESQQLATETQALAQRTQQDSTRTVGERLQDTHSWKSELQREMEALAAETNLLLAQKQRLERALDATEVPFSITTDNLQCRERREHPNLVRDHVETELLKALPPALSQCLKNSCSSRKLSARNKGTCQLMETLTVHGEANPGIEGRRTRALAHKEVPSG

SEQ ID NO: 7563 - protein, 102 aa, Homo sapiens
MANDSPAKSLVDIDLSSLRDPAGIFELVEVVGNGTYGQVYKGRHVKTGQLAAIKVMDVTEDEEEEIKLEINMLKKYSHHRNIATYYGAFIKKSPPGHDDQLW

SEQ ID NO: 7564 - protein, 122 aa, Homo sapiens
MATSAPLRSLEEEVTCSICLDYLRDPVTIDCGHVFCRSCTTDVRPISGSRPVCPLCKKPFKKENIRPVWQLASLVENIERLKVDKGRQPGEVTREQQDAKLCERHREKLHYYCEDDGKLLCV

SEQ ID NO: 7565 - protein, 103 aa, Homo sapiens
MSGGLLKALRSDSYVELSQYRDQHFRGDNEEQEKLLKKSYAENAMRYINGTRLDDRIIRTDWDAGFKEGRQYGRGRSGGQVRDEYRQDYDAGRGGYGKLAQNQ

SEQ ID NO: 7566 - protein, 297 aa, Homo sapiens
MWPFPSRSLFPPPTQAWLQTVSSDPEAQGWGAWNETKEILGPEGGEGKEEKEEEEDAEEDQDGDAGFLLSLLEQENLAECPLPDQELEAIKMKVCAMEQAEGTPRPPGVQQQAEEEEGTAAGQLLSPETVGCPLSGTPEEKVEADHRSVYVGNLCLHRVCHQGLRAGRRGAGPEPLPGPGHQGAAEKNQLPWDQLHRPRGPSRTPRLQGGTLPPQRPPGQAPAQTTRAEPGPWKILTMVFTVLKGRPDFERGAGAWIRSKPLVLHPGAGAGSGAGARPEERGVQSSHWPPLGGGMAQ

SEQ ID NO: 7567 - protein, 352 aa, Homo sapiens; identical to SEQ ID NO: 6708

SEQ ID NO: 7568 - protein, 120 aa, Homo sapiens
MELDLFLGLDDVFPRLLHGLLHRAFSVFLFNTENKLLLQQRSDAKITFPGCFTNTCCSHPLSNPAELEESDALGVRRAAQRRLKAELGIPLEEVTSSPTQPYKLKPKHTIKRFLIKFLNS

SEQ ID NO: 7569 - protein, 112 aa, Homo sapiens
MEEIPAQEAAGSPRVQFQSLETQSECLSPEPQFVQDTDMEQGLTGGFPISKPDGISQLEQDLQVFDLETKTREVLRDDCSDGETREENKLLIPKQKISEEVHSYKVRVGRLK

SEQ ID NO: 7570 - protein, 604 aa, Homo sapiens
MSEILKQKDTEPTNFKVAAGTLDASTKIYAVRVDAVHADVYRVLGGLGKDAPSLEEVEGHVADGSATEMGTTKKAVKPKKKHLHRTIEQNINNLNVSEADRKCEIDPMFQKTAASFDECSTAGVFLSTLHCQDYRSELLFPSDVQTLSTGEPLELPELGCVEMTDLKAPLQQCAEDRQICPSLAGFQFTQWDSETHNESVSALVDKFKKNDQVFDINAEVDESDCGDFPDGSLGDDFDANDEPDHTAVGDHEEFRSWKEPCQVQSCQEEMISLGDGDIRTMCPLLSMKPGEYSYFSAAMSMWAGPDHWRFRPRRKQDAPSQSENKKKSTKKDFEIDFEDDIDFDVYFRKTKAATILTKSTLENQNWRATTLPTDFNYNVDTLVQLHLKPGTRLLKMAQGHRVETEHYEEIEDYDYNNPNDTSNFCPGLQAADSDDEDLDDLFVGPVGNSDLSPYPCHPPKTAQQNGDTPEAQGLDITTYGESNLVAEPQKVNKIEIHYAKTAKKMDMKKLKQSMWSLLTALSGKEADAEANHREAGKEAALAEVADEKMLSGLTKDLQRSLPPVMAQNLSIPLAFACLLHLANEKNLKLEGTEDLSDVLVRQGD

SEQ ID NO: 7571 - protein, 750 aa, Homo sapiens
MSSSPVNVKKLKVSELKEELKKRRLSDKGLKAELMERLQAALDDEEAGGRPAMEPGNGDDQGFQEGEDELGDEEEGAGDENGHGEQQPQPPATQQQQPQQQRGAAKEAAGKSSGPTSLFAVTVAPPGARQGQQQAGGKKKAEGGGGGGRPGAPAAGDGKTEQKGGDKKRGVKRPREDHGRGYFEYIEENKYSRAKSPQPPVEEEDEHFDDTVVCLDTYNCDLHFKISRDRLSASSLTMESFAFLWAGGRASYGVSKGKVCFEMKVTEKIPVRHLYTKDIDIHEVRIGWSLTTSGMLLGEEEFSYGYSLKGIKTCNCETEDYGEKFDENDVITCFANFESDEVELSYAKNGQDLGVAFKISKEVLAGRPLFPHVLCHNCAVEFNFGQKEKPYFPIPEEYTFIQNVPLEDRVRGPKGPEEKKDCEVVMMIGLPGAGKTTWVTKHAAENPGKYNILGTNTIMDKMMVAGFKKQMADTGKLNTLLQRAPQCLGKFIEIAARKKRNFILDQTNVSAAAQRRKMCLFAGFQRKAVVVCPKDEDYKQRTQKKAEVEGKDLPEHAVLKMKGNFTLPEVAECFDEITYVELQKEEAQKLLEQYKEESKKALPPEKKQNTGSKKSNKNKSGKNQFNRGGGHRGRGGFNMRGGNFRGGAPGNRGGYNRRGNMPQRGGGGGGSGGIGYPYPRAPVFPGRGSYSNRGNYNRGGMPNRGNYNQNFRGRGNNRGYKNQSQGYNQWQQGQFWGQKPWSQHYHQGYY

SEQ ID NO: 7572 - protein, 267 aa, Homo sapiens
MWDQRLVKLALLQHLRAFYGIKVKGVRGQCDRRRHETAATEIGGKIFGVPFNALPHSAVPEYGHIPSFLVDACTSLEEHIHTEGLFRKSGSVIRLKALKNKVDHGEGCLSSAPPCDIAGLLKQFFRELPEPILPADLHEALLKAQQLGTEEKNKAILLLSCLLADHTVHVLRYFFNFLRNVSLRSSENKMDSSNLAVIFAPNLLQTSEGHEKMSSNAEKKGVYQTLSWKRYQPCWVLMVSVLLHHWKALKKVNMKLLVNIREREDNV

SEQ ID NO: 7573 - protein, 199 aa, Homo sapiens
MPHKIGFVVVSSSGHEDGFSARELMIHAPTVSGWRSPSYVSLCDNEKTGCKARELKSVYVDAVGQFLKLIFHQNHVNKYNIYNQVALVAINIIGDPADFSDESNTASREKLIDHYLGHNSEDPALEGTYARKSDYISPLDDLAFDMYQDPEVAQIIRKLDERKREAVQKERYDYAKKLKQAIADLQKVGERLGRYEVEK

SEQ ID NO: 7574 - protein, 156 aa, Homo sapiens
MTEDSQRNFRSVYYEKVGFRGVEEKKSLEILLKDDRLDTEKLCTFSQRFPLPSMYRALVWKVLLGILPPHHESHAKVMMYRKEQYLDVLHALKVVRFVSDATPQAEVYLRMYQLESGKLPRSPSFPLEPDDEVFLAIAKAMEEMVEDSVDCYWITR

SEQ ID NO: 7575 - protein, 908 aa, Homo sapiens
MIRHAGAPARGDPTGPVPVVGKGEEEEEEDGMRLCLPANPKNCLPHRRGISILEKLIKTCPVWLQLSLGQAEVARILHRVVAGMFLVRRDSSSKQLVLCVHFPSLNESSAEVLEYTIKEEKSILYLEGSALVFEDIFRLIAFYCVSRDLLPFTLRLPQAILEASSFTDLETIANLGLGFWDSSLNPPQERGKPAEPPRDRAPGFPLVSSLRPTAHDANCACEIELSVGNDRLWFVNPIFIEDCSSALPTDQPPLGNCPARPLPPTSDATSPTSRWAPRRPPPPPPVLPLQPCSPAQPPPLPAKKNLPTAPPRRRVSERVSLEDQSPGMAAEGDQLSLPPQGTSDGPEDTPRESTEQGQDTEVKASDPHSMPELAAAKQPPVPPPRKKRISRQLASTLPAPLENAELCTQAMALETPTPGPPREGQSPASQAGTQHPPAQATAHSQSSPEFKGSLASLSDSLGVSVMATDQDSYSTSSTEEELEQFSSPSVKKKPSMILGKARHRLSFASFSSMFHAFLSNNRKLYKKVVELAQDKGSYFGSLVQDYKVYSLEMMARQTSSTEMLQEIRTMMTQLKSYLLQSTELKALVDPALHSEEELEAIVESALYKCVLKPLKEAINSCLHQIHSKDGSLQQLKENQLVILATTTTDLGVTTSVPEVPMMEKILQKFTSMHKAYSPEKKISILLKTCKLIYDSMALGNPGKPYGADDFLPVLMYVLARSNLTEMLLNVEYMMELMDPALQLGEGSYYLTTTYGALEHIKSYDKITVTRQLSVEVQDSIHRWERRRTLNKARASRSSVQDFICVSYLEPEQQARTLASRADTQAQALCAQCAEKFAVERPQAHRLFVLVDGRCFQLADDALPHCIKGYLLRSEPKRDFHFVYRPLDGGGGGGGGSPPCLVVREPNFL

SEQ ID NO: 7576 - protein, 574 aa, Homo sapiens
MSSDEEKYSLPVVQNDSSRGSSVSSNLQEEYEELLHYAIVTPNIEPCASQSSHPKGELVPDVRISTIHDILHSQGNNSEVRETAIEVGKGCDFHISSHSKTDESSPVLSPRKPSHPVMDFFSSHLLADSSSPATNSSHTDAHEILVSDFLVSDENLQKMENVLDLWSSGLKTNIISELSKWRLNFIDWHRMEMRKEKEKHAAHLKQLCNQINELKELQKTFEISIGRKDEVISSLSHAIGKQKEKIELMRTFFHWRIGHVRARQDVYEGKLADQYYQRTLLKKVWKVWRSVVQKQWKDVVERACQARAEEVCIQISNDYEAKVAMLSGALENAKAEIQRMQHEKEHFEDSMKKAFMRGVCALNLEAMTIFQNRNDAGIDSTNNKKEEYGPGVQGKEHSAHLDPSAPPMPLPVTSPLLPSPPAAVGGASATAVPSAASMTSTRAASASSVHVPVSALGAGSAATAASEEMYVPRVVTSAQQKAGRTITARITGRCDFASKNRISSSLAIMGVSPPMSSVVVEKHHPVTVQTIPQATAAKYAAIHPESSTSASRSLGTRSAHTQSLTSVHSIKVVD

SEQ ID NO: 7577 - protein, 696 aa, Homo sapiens
MANYRNTSEIPLVLVGTQDAISSANPRVIDDARARKLSNDLKRCTYYETCATYGLNVERVFQDVAQKIVATRKKQQLSIGPCKSLPNSPSHSSVCSAQVSAVHISQTSNGGGSLSDYSSSVPSTPSTSQKELRIDVPPTANTPTPVRKQSKRRSNLFTSRKGSDPDKEKKGLESRADSIGSGRAIPIKQGMLLKRSGKSLNKEWKKKYVTLCDNGVLTYHPSLHDYMQNVHGKEIDLLRTTVKVPGKRPPRATSACAPISSPKTNGLSKDMSSLHISPNSGNVTSASGSQMASGISLVSFNSRPDGMHQRSYSVSSADQWSEATVIANSAISSDTGLGDSVCSSPSISSTTSPKLDPPPSPHANRKKHRRKKSTSNFKADGLSGTAEEQEENFEFIIVSLTGQTWHFEATTYEERDAWVQAIESQILASLQSCESSKNKSRLTSQSEAMALQSIRNMRGNSHCVDCETQNPNWASLNLGALMCIECSGIHRNLGTHLSRVRSLDLDDWPVELIKVMSSIGNELANSVWEESSQGRTKPSVDSTREEKERWIRAKYEQKLFLAPLPCTELSLGQHLLRATADEDLRTAILLLAHGSRDEVNETCGEGDGRTALHLACRKGNVVLAQLLIWYGVDVTARDAHGNTALAYARQASSQECIDVLLQYGCPDERFVLMATPNLSRRNNNRNNSSGRVPTII

SEQ ID NO: 7578 - protein, 89 aa, Homo sapiens; identical to SEQ ID NO: 6950

SEQ ID NO: 7579 - protein, 594 aa, Homo sapiens
MTDTRRRVKVYTLNEDRQWDDRGTGHVSSGYVERLKGMSLLVRAESDGSLLLESKINPNTAYQKQQEDEKFLTDLFAQLTDEATDEEKRQELVNFLKEFCAFSQTLQPQNRDAFFKTLSNMGILPALEVILGMDDTQVRSAATDIFSYLVEYNPSMVREFVMQEAQQNDDVSKKLTEQKITSKDILLINLIIEHMICDTDPELGGAVQLMGLLRTLVDPENMLATANKTEKTEFLGFFYKHCMHVLTAPLLANTTEDKPSKDDFQTAQLLALVLELLTFCVEHHTYHIKNYIINKDILRRVLVLMASKHAFLALCALRFKRKIIGLKDEFYNRYIMKSFLFEPVVKAFLNNGSRYNLMNSAIIEMFEFIRVEDIKSLTAHVIENYWKALEDVDYVQTFKGLKLRFEQQRERQDNPKLDSMRSILRNHRYRRDARTLEDEEEMWFNTDEDDMEDGEAVVSPSDKTKNDDDIMDPISKFMERKKLKESEEKEVLLKTNLSGRQSPSFKLSLSSGTKTNLTSQSSTTNLPGSPGSPGSPGSPGSPGSVPKNTSQTAAITTKGGLVGLVDYPDDDEDDDEDEDKEDTLPLSKKAKFDS

SEQ ID NO: 7580 - protein, 172 aa, Homo sapiens
MFTEGEEMYLQGSTVWHPDCKQSTKTEEKLRPTRTSSESIYSRPGSSIPGSPGHTIYAKVDNEILDYKDLAAIPKVKAIYDIERPDLITYEPFYTSGYDDKQERQSLGESAALSPTPSAEGYQDVRDRMIHRSTSQGSINSPVYSRHSYTPTTSRSPQHFHRPDQGINIYRK

SEQ ID NO: 7581 - protein, 539 aa, Homo sapiens; identical to SEQ ID NO: 5502

SEQ ID NO: 7582 - protein, 703 aa, Homo sapiens
MFRYESLEDCPLDEDEDAFQGLGEEDEEIDQFNDDTFGSGAVDDDWQEAHERLAELEEKLPVAVNEQTGNGERDEMDLLGDHEENLAERLSKMVIENELEDPAIMRAVQTRPVLQPQPGSLNSSIWDGSEVLRRIRGPLLAQEMPTVSVLEYALPQRPPQGPEDDRDLSERALPRRSTSPIIGSPPVRAVPIGTPPKQMAVPSFTQQILCPKPVHVRPPMPPRYPAPYGERMSPNQLCSVPLQPGRMSPSQFARVPGFVGSPLAAMNPKLLQGRVGQMLPPAPGFRAFFSAPPSATPPPQQHPPGPGPHLQNLRSQAPMFRPDTTHLHPQHRRLLHQRQQQNRSQHRNLNGAGDRGSHRSSHQDHLRKDPYANLMLQREKDWVSKIQMMQLQSTDPYLDDFYYQNYFEKLEKLSAAEEIQGDGPKKERTKLITPQVAKLEHAYKPVQFEGSLGKLTVSSVNNPRKMIDAVVTSRSEDDETKEKQVRDKRRKTLVIIEKTYSLLLDVEDYERRYLLSLEEERPALMDDRKHKICSMYDNLRGKLPGQERPSDDHFVQIMCIRKGKRMVARILPFLSTEQAADILMTTARNLPFLIKKDAQDEVLPCLLSPFSLLLYHLPSVSITSLLRQLMNLPSSDPATESTQNNQWTEVMFMATRELLRIPQAALAKPISIPTNLVSLFSRYVDRQKLNLLETKLQLVQGIR

SEQ ID NO: 7583 - protein, 318 aa, Homo sapiens
MSAHNRGTELDLSWISKIQVNHPAVLRRAEQIQARRTVKKEWQAAWLLKAVTFIDLTTLSGDDTSSNIQRLCYKAKYPIREDLLKALNMHDKGITTAAVCVYPARVCDAVKALKAAGCNIPVASVAAGFPAGQTHLKTRLEEIRLAVEDGATEIDVVINRSLVLTGQWEALYDEIRQFRKACGEAHLKTILATGELGTLTNVYKASMIAMMAGSDFIKTSTGKETVNATFPVAIVMLRAIRDFFWKTGNKIGFKPAGGIRSAKDSLAWLSLVKEELGDEWLKPELFRIGASTLLSDIERQIYHHVTGRYAAYHDLPMS

SEQ ID NO: 7584 - protein, 395 aa, Homo sapiens; identical to SEQ ID NO: 6506

SEQ ID NO: 7585 - protein, 1095 aa, Homo sapiens
MAEGAAGREDPAPPDAAGGEDDPRVGPDAAGDCVTAASGGRMRDRRSGVALPGAAGTPADSEAGLLEAARATPRRSSIIKDPSNQKCGGRKKTVSFSSMPSEKKISSANDCISFMQAGCELKKVRPNSRIYNRFFTLDTDLQALRWEPSKKDLEKAKLDISAIKEIRLGKNTETFRNNGLADQICEDCAFSILHGENYESLDLVANSADVANIWVSGLRYLVSRSKQPLDFMEGNQNTPRFMWLKTVFEAADVDGNGIMLEDTSVELIKQLNPTLKEAKIRLKFKEIQKSKEKLTTRVTEEEFCEAFCELCTRPEVYFLLVQISKNKEYLDANDLMLFLEAEQGVTHITEDICLDIIRRYELSEEGRQKGFLAIDGFTQYLLSSECDIFDPEQKKVAQDMTQPLSHYYINASHNTYLIEDQFRGPADINGYIRALKMGCRSVELDVSDGSDNEPILCNRNNMTTHVSFRSVIEVINKFAFVASEYPLILCLGNHCSLPQQKVMAQQMKKVFGNKLYTEAPLPSESYLPSPEKLKRMIIVKGKKLPSDPDVLEGEVTDEDEEAEMSRRMSVDYNGEQKQIRLCRELSDLVSICKSVQYRDFELSMKSQNYWEMCSFSETEASRIANEYPEDFVNYNKKFLSRIYPSAMRIDSSNLNPQDFWNCGCQIVAMNFQTPGPMMDLHTGWFLQNGGCGYVLRPSIMRDEVSYFSANTKGILPGVSPLALHIKIISGQNFPKPKGACAKGDVIDPYVCIEIHGIPADCSEQRTKTVQQNSDNPIFDETFEFQVNLPELAMIRFVVLDDDYIGDEFIGQYTIPFECLQPGYRHVPLRSFVGDIMEHVTLFVHIAITNRSGGGKAQKRSLSVRMGKKVREYTMLRNIGLKTIDDIFKIAVHPLREAIDMRENMQNAIVSIKELCGLPPIASLKQCLLTLSSRLITSDNTPSVSLVMKDSFPYLEPLGAIPDVQKKMLTAYDLMIQESRFLIEMADTVQEKIVQCQKAGMEFHEELHNLGAKEGLKGRKLNKATESFAWNITVLKGQGDLLKNAKNEAIENMKQIQLACLSCGLSKAPSSSAEAKSKRSLEAIEEKESSEENGKL

SEQ ID NO: 7586 - protein, 180 aa, Homo sapiens
MEQPKGVDWTVIILTCQYKDSVQVFQRELEVRQKREQIPAGTLLLAVEDPEKRVGSGGATLNALLVAAEHLSARAGFTGRDFPFDDCGRAFTCLPVENPEAPVEALVCNLDCLLDIMTYRLGPGSPPGVWVCSTDMLLSVPANPGEPETTWDCLPSSQPQQEASSALLAHPASGPAPLPY

SEQ ID NO: 7587 - protein, 142 aa, Homo sapiens
MNEVVHTSPTIGSNVEEIVINNTRFLMWDIGGQESLRSSWNTYYTNTEFVIVVVDSTDRERISVTREELYKMLAHEDLRKAGLLIFANKQDVKECMTVAEISQFLKLTSIKDHQWHIQACCALTGEGLCQGLEWMMSRLKIR

SEQ ID NO: 7588 - protein, 113 aa, Homo sapiens
MEGVLYKWTNYLSGWQPRWFLLCGGILSYYDSPEDAWKGCKGSIQMAVCEIQVHSVDNTRMDLIIPGEQYFYLKARSVAERQRWLVALGSAKACLTDSRTQKEKGNLLKTLKT

SEQ ID NO: 7589 - protein, 372 aa, Homo sapiens
MASNHKSSAARPVSRGGVGLTGRPPSGIRPLSGNIRVATAMPPGTARPGSRGCPIGTGGVLSSQIKVAHRPVTQQGLTGMKTGTKGPQRQILDKSYYLGLLRSKISELTTEVNKLQKGIEMYNQENSVYLSYEKRAETLAVEIKELQGQLADYNMLVDKLNTNTEMEEVMNDYNMLKAQNDRETQSLDVIFTERQAKEKQIRSVEEEIEQEKQATDDIIKNMSFENQVKYLEMKTTNEKLLQELDTLQQQLDSQNMKKESLEAEIAHSQVKQEAVLLHEKLYELESHRDQMIAEDKSIGSPMEEREKLLKQIKDDNQEIASMERQLTDTKEKINQFIEEIRQLDMDLEEHQDPTNYGWKILEKNTGSFKKQV

SEQ ID NO: 7590 - protein, 114 aa, Homo sapiens; identical to SEQ ID NO: 7330

SEQ ID NO: 7591 - protein, 108 aa, Homo sapiens
MAMAPSPSLVQVYTSPAAVAVWEWQDGLGTWHPYSATVCSFIEQQFVQQKGQRFGLGSLAHSIPLGQADPSLAPYIIDLPSWTQFRQDTGTMRAVRRHLFPQHSAPGR

SEQ ID NO: 7592 - protein, 182 aa, Homo sapiens
MRECISIHVGQAGVQIGNACWELYCLEHGIQPDGQMPSDKTIGGGDDSFNTFFSETGAGKHVPRAVFVDLEPTVIDWCPTGFKVGINYQPPTVVPGGDLAKVQRAVCMLSNTTAIAEAWARLDHKFDLMYAKRAFVHWYVGEGMEEGEFSEAREDMAALEKDYEEVGVDSVEGEGEEEGEEY

SEQ ID NO: 7593 - protein, 160 aa, Homo sapiens; identical to SEQ ID NO: 6461

SEQ ID NO: 7594 - protein, 1160 aa, Homo sapiens
MACRRRYFVEGEAPSSETGTSLDSPSAYPQGPLVPGSSLSPDHYEHTSVGAYGLYSGPPGQQQRTRRPKLQHSTSILRKQAEEEAIKRSRSLSESYELSSDLQDKQVEMLERKYGGRLVTRHAARTIQTAFRQYQMNKNFERLRSSMSENRMSRRIVLSNMRMQFSFEGPEKVHSSYFEGKQVSVTNDGSQLGALVSPECGDLSEPTTLKSPAPSSDFADAITELEDAFSRQVKSLAESIDDALNCRSLHTEEAPALDAARARDTEPQTALHGMDHRKLDEMTASYSDVTLYIDEEELSPPLPLSQAGDRPSSTESDLRLRAGGAAPDYWALAHKEDKADTDTSCRSTPSLERQEQRLRVEHLPLLTIEPPSDSSVDLSDRSERGSLKRQSAYERSLGGQQGSPKHGPHSGAPKSLPREEPELRPRPPRPLDSHLAINGSANRQSKSESDYSDGDNDSINSTSNSNDTINCSSESSSRDSLREQTLSKQTYHKEARNSWDSPAFSNDVIRKRHYRIGLNLFNKKPEKGVQYLIERGFVPDTPVGVAHFLLQRKGLSRQMIGEFLGNRQKQFNRDVLDCVVDEMDFSTMELDEALRKFQAHIRVQGEAQKVERLIEAFSQRYCICNPGVVRQFRNPDTIFILAFAIILLNTDMYSPNVKPERKMKLEDFIKNLRGVDDGEDIPREMLMGIYERIRKRELKTNEDHVSQVQKVEKLIVGKKPIGSLHPGLGCVLSLPHRRLVCYCRLFEVPDPNKPQKLGLHQREIFLFNDLLVVTKIFQKKKNSVTYSFRQSFSLYGMQVLLFENQYYPNGIRLTSSVPGADIKVLINFNAPNPQDRKKFTDDLRESIAEVQEMEKHRIESELEKQKGVVRPSMSQCSSLKKESGNGTLSRACLDDSYASGEGLKRSALSSSLRDLSEAGKRGRRSSAGSLESNVEGSIISSPHMRRRATSTRECPSRPHQTMPNSSSLLGSLFGSKRGKPPPQAHLPSAPALATPPPTGGPASLAALCGWPPPGAPRGAAAGRHARASHPVLPHAEPSPVPPSPPPPPTPAHPARTPVPPRPPWGPPSLRGPCPRPPAAALGPRGAHSAPPWAAPCPAAPHQQQGQTQRHQHNCVDSLGRGPRLPETPAHHTGHARGSPAAHQTRGTSVAISPLCPSRPN

SEQ ID NO: 7595 - protein, 125 aa, Homo sapiens
MKKEHVLHCQFSAWYPFFRGVTIKSVILPLPQNVKDYLLDDGTLVVSGRDDPPTHSQPDSDDEAEEIQWSDDENTATLTDAYWIAMNSSLKCKTLSDIFLLFKSSDFITRDFTQPFIHCTDDSPD

SEQ ID NO: 7596 - protein, 137 aa, Homo sapiens; identical to SEQ ID NO: 7226

SEQ ID NO: 7597 - protein, 1073 aa, Homo sapiens
MEERKHETMNPAHVLFDRFVQATTCKGTLKAFQELCDHLELKPKDYRSFYHKLKSKLNYWKAKALWAKLDKRGSHKDYKKGKACTNTKCLIIGAGPCGLRTAIDLSLLGAKVVVIEKRDAFSRNNVLHLWPFTIHDLRGLGAKKFYGKFCAGAIDHISIRQLQLILLKVALILGIEIHVNVEFQGLIQPPEDQENERIGWRALVHPKTHPVSEYEFEVIIGGDGRRNTLEGFRRKEFRGKLAIAITANFINRNTTAEAKVEEISGVAFIFNQKFFQELREATGIDLENIVYYKDDTHYFVMTAKKQSLLDKGVILHDYADTELLLSRENVDQEALLSYAREAADFSTQQQLPSLDFAINHYGQPDVAMFDFTCMYASENAALVREQNGHQLLVALVGDSLLEPFWPMGTGIARGFLAAMDSAWMVRSWSLGTSPLEVLAERESIYRLLPQTTPENVSKNFSQYSIDPVTRYPNINVNFLRPSQVRHLYDTGETKDIHLEMESLVNSRTTPKLTRNESVARSSKLLGWCQRQTDGYAGVNVTDLTMSWKSGLALCAIIHRYRPDLIDFDSLDEQNVEKNNQLAFDIAEKELGISPIMTGKEMASVGEPDKLSMVMYLTQFYEMFKDSLPSSDTLDLNAEEKAVLIASTRSPISFLSKLGQTISRKRSPKDKKEKDLDGAGKRRKTSQSEEEEAPRGHRGERPTLVSTLTDRRMDVAVGNQNKVKYMATQLLAKFEENAPAQSIGIRRQQREKECSRTCPKKVITLSPPPTPPPCRAHGGQQTYRDLDADNRGKQSPHHERPEPEPPRRFFVDQWELSLSLRSSARPASPSSDSLRQKYIKMYTGGVSSLAEQIANQLQRKEQPKALLDKKELGSMKKEFPQNLGGSDTCYFCQKRVYVMERLSAEGKFFHRSCFKCEYCATTLRLSAYAYDIEDGKFYCKPHYCYRLSGYAQRKRPAVAPLSGKEAKGPLQDGATTDANGRANAVASSTERTPGSLTSLFGWVARHSLGLCDKAKGMSQHLQSNISSFGQQVAQNPLDSFFMCQLLAFGVPFLYGLSEVLVQIRGEFHWQAVAQ

SEQ ID NO: 7598 - protein, 180 aa, Homo sapiens
MFLSCGSLHQRGPETDGTVFRIHTKAEGFMDVDIPLELVFHLPVNYPSCLPGISINSEQLTRAQCVTVKENLLEQAESLLSEPMVHELVLWIQQNLRHILSQPETGSGSEKCTFSTSTTMDDGLWITLLHLDHMRAKTKYVKIVEKWASDLRLTGRLMFMGKIILILLQGDRNNLKVPKS

SEQ ID NO: 7599 - protein, 506 aa, Homo sapiens
MKRRSVTMTDGLTADKVTRSDGCPTSTSLPRPRDSIRSCALSMDQIPDLHSPMSPISESPSSPAYSTVTRVHAAPAAPSATALPASPVARRSSEPQLCPGSAPKTHGESDKGPHTSPSHTLGKASPSPSLSSYSDPDSGHYCQLQPPVRGSREWAATETSSQQARSYGERLKELSENGAPEGDWGKTFTVPIVEVTSSFNPATFQSLLIPRDNRPLEVGLLRKVKELLAEVDARTLARHVTKVDCLVARILGVTKEMQTLMGVRWGMELLTLPHGRQLRLDLLERFHTMSIMLAVDILGCTGSAEERAALLHKTIQLAAELRGTMGNMFSFAAVMGALDMAQISRLEQTWVTLRQRHTEGAILYEKKLKPFLKSLNEGKEGPPLSNTTFPHVLPLITLLECDSAPPEGPEPWGSTEHGVEVVLAHLEAARTVAHHGGLYHTNAEVKLQGFQARPELLEVFSTEFQMRLLWGSQGASSSQARRYEKFDKVLTALSHKLEPAVRSSEL

SEQ ID NO: 7600 - protein, 122 aa, Homo sapiens; identical to SEQ ID NO: 7564

SEQ ID NO: 7601 - protein, 122 aa, Homo sapiens
MPEINTNHLDKQQVQLLAEMCILIDENDNKIGAETKKNCHLNENIEKGLLHRAFSVFLFNTENKLLLQQRSDAKITFPGCFTNTCCSHPLSNPAELEESDALGVRRAAQRRLKAELGIPLEE

SEQ ID NO: 7602 - protein, 135 aa, Homo sapiens [sequence omitted]

SEQ ID NO: 7603 - protein, 1093 aa, Homo sapiens
MGTGDFICISMTGGAPWGFRLQGGKEQKQPLQVAKIRNQSKASGSGLCEGDEVVSINGNPCADLTYPEVIKLMESITDSLQMLIKRPSSGISEALISENENKNLEHLTHGGYVESTTLQIRPATKTQCTEFFLAPVKTEVPLAENQRSGPDCAGSLKEETGPSYQRAPQMPDSQRGRVAEELILREKVEAVQPGPVVELQLSLSQERHKGASGPLVALPGAEKSKSPDPDPNLSHDRIVHINSIPTNEKADPFLRSSKIIQISSGRELRVIQESEAGDAGLPRVEVILDCSDRQKTEGCRLQAGKECVDSPVEGGQSEAPPSLVSFAVSSEGTEQGEDPRSEKDHSRPHKHRARHARLRRSESLSEKQVKEAKSKCKSIALLLTDAPNPNSKGVLMFKKRRRRARKYTLVSYGTGELEREADEEEEGDKEDTCEVAFLGASESEVDEELLSDVDDNTQVVNFDWDSGLVDIEKKLNRGDKMEMLPDTTGKGALMFAKRRERMDQITAQKEEDKVGGTPSREQDAAQTDGLRTTTSYQRKEEESVRTQSSVSKSYIEVSHGLGHVPQQNGFSGTSETANIQRMVPMNRTAKPFPGSVNQPATPFSPTRNMTSPIADFPAPPPYSAVTPPPDAFSRGVSSPIAGPAQPPPWPQPAPWSQPAFYDSSERIASRDERISVPAKRTGILQEAKRRSTTKPMFTFKEPKVSPNPELLSLLQNSEGKRGTGAGGDSGPEEDYLSLGAEACNFMQSSSAKQKTPPPVAPKPAVKSSSSQPVTPVSPVWSPGVAPTQPPAFPTSNPSKGTVVSSIKIAQPSYPPARPASTLNVAGPFKGPQAAVASQNYTPKPTVSTPTVNAVQPGAVGPSNELPGMSGRGAQLFAKRQSRMEKYVVDSDTVQAHAARAQSPTPSLPASWKYSSNVRAPPPVAYNPIHSPSYPLAALKSQPSAAQPSKMGKKKGKKPLNALDVMKHQPYQLNASLFTFQPPDAKDGLPQKSSVKVNSALAMKQALPPRPVNAASPTNVQASSVYSVPAYTSPPSFFAEASSPVSASPVPVGIPTSPKQESASSSYFVAPRPKFSAKKSGVTIQVWKPSVVEE

SEQ ID NO: 7604 - protein, 199 aa, Homo sapiens
MAIVQTLPVPLEPAPEAATAPQAPVMGSVSSLISGRPCPGGPAPPRHHGPPGPTFFRQQDGLLRGGYEAQEPLCPAVPPRKAVPVTSFTYINEDFRTESPPSPSSDVEDAREQRAHNAHLRGPPPKLIPVSGKLEKNMEKILIRPTAFKPVLPKPRGAPSLPSFMGPRATGLSGSQGSLTQLFGGPASSSSSSSSSSAA

SEQ ID NO: 7605 - protein, 203 aa, Homo sapiens
MPSTPASTISAREELVQRIPEASLNFQKVPPGSLNSRDFDQNMNDSCEDALANKTRPRNREEVIFDNLMLNPVSQLSQAIRENTEHLAEKMKILFQNTGRAWEDLEARINAENEVPILKTSNKEISSILKELRRVQKQLEVINAIVDPSGSLDLLLPTLSSFVPPPPAFAWELVLVCRASRRVHCTFVLRWSCGCLSENGYFI

SEQ ID NO: 7606 - protein, 106 aa, Homo sapiens
  VARIANT 1: note = X can be any amino acid
XPTTSRPALDVKGGTSPAKEDANQEMSSVAYSNLAVKDRKAVAILHYPGVASNGTKSPAIIDSDPVDEEVLMSLVVELGLDRANELPELWLGQNEFDFTADFPSSC

SEQ ID NO: 7607 - protein, 151 aa, Homo sapiens
MAAFRDIEEVSQGLLSLLGANRAEAQQRRLLGRHEQVVERLLETQDGAEKQLREILTMEKEVAQSLLNAKEQERQEKEVDEDTTVTIPSAVYVAQLYHQVSKIEWDYECEPGMVKGIHHGPSVAQPIHLDSTQLSRKFISDYLWSLVDTEW

SEQ ID NO: 7608 - protein, 147 aa, Homo sapiens
MLRCGQMIFAQALVCRHLGRDWRWTQRKRQPDSYFSVLNAFIDRKDSYYSIHQIAQMGVGEGKSIGQWYGPNTVAQVLKKLAVFDTWSSLAVHIAMDNTVVMEEIRRLCRTSVPCAGATAFPADSDRHCNGFPAGAEVTNRPSPWRP

SEQ ID NO: 7609 - protein, 493 aa, Homo sapiens
MEKYENLGLVGEGSYGMVMKCRNKDTGRIVAIKKFLESDDDKMVKKIAMREIKLLKQLRHENLVNLLEVCKKKKRWYLVFEFVDHTILDDLELFPNGLDYQVVQKYLFQIINGIGFCHSHNIIHRDIKPENILVSQSGVVKLCDFGFARTLAAPGEVYTDYVATRWYRAPELLVGDVKYGKAVDVWAIGCLVTEMFMGEPLFPGDSDIDQLYHIMMCLGNLIPRHQELFNKNPVFAGVRLPEIKEREPLERRYPKLSEVVIDLAKKCLHIDPDKRPFCAELLHHDFFQMDGFAERFSQELQLKVQKDARNVSLSKKSQNRKKEKEKDDSLVEERKTLVVQDTNADPKIKDYKLFKIKGSKIDGEKAEKGNRASNASCLHDSRTSHNKIVPSTSLKDCSNVSVDHTRNPSVAIPPLTHNLSAVAPSINSGMGTETIPIQGYRVDEKTKKCSIPFVKPNRHSPSGIYNINVTTLVSGPPLSDDSGADLPQMEHQH

SEQ ID NO: 7610 - protein, 2062 aa, Homo sapiens
MDGCLDTETPTVSIQENVDVASLKPISDSGINFTDAIWSPTCERRTCECHESIEKNKDKTDLPQSVVYQNEEGRWVTDLAYYTSFNSKQNLNVSLSDEMNEDFRSGSEAFDLIAQDEEEFNKEHQFIQPSFGYFIRSPEKREPIALIRKSDVSRGNLEKEMAHLNHDLYSGDLNEQSQAQLSEGSITLQVEAVESTSQVDENDVTLTADKGKTEDTFFMSNKPQRYKDKLPDSGDSMLRISTIASAIAEASVNTDPSQLAAMIKALSNKTRDKTFQEDEKQKDYSHVRHFLPNDLEKSNGSNALDMEKYLKKTEVSRYESALENFSRASMSDTWDLSLPKEQTTQDIHPVDLSATSVSVRAPEENTAAIVYVENGESENQESFRTINSSNSVTNRENNSAVVDVKTCSIDNKLQDVGNDEKATSISTPSDSYSSVRNPRITSLCLLKDCEEIRDNRENQRQNECVSEISNSEKHVTFENHRIVSPKNSDLKNTSPEHGGRGSEDEQESFRPSTSPLSHSSPSEISGTSSSGCALESFGSAAQQQQPPCEQELSPLVCSPAGVSRLTYVSEPESSYPTTATDDALEDRKSDITSELSTTIIQGSPAALEERAMEKLREKVPFQNRGKGTLSSIIQNNSDTRKATETTSLSSKPEYVKPDFRWSKDPSSKSGNLLETSEVGWTSNPEELDPIRLALLGKSGLSCQVGSATSHPVSCQEPIDEDQRISPKDKSTAGREFSGQVSHQTTSENQCTPIPSSTVHSSVADMQNMPAAVHALLTQPSLSAAPFAQRYLGTLPSTGSTTLPQCHAGNATVCGFSGGLPYPAVAGEPVQNSVAVGICLGSNIGSGWMGTSSLCNPYSNTLNQNLLSTTKPFPVPSVGTNCGIEPWDSGVTSGLGSVRVPEELKLPHACCVGIASQTLLSVLNPTDRWLQVSIGVLSISVNGEKVDLSTYRCLVFKNKAIIRPHATEEIKVLFIPSSPGVFRCTFSVASWPCSTDAETIVQAEALASTVTLTAIAESPVIEVETEKKDVLDFGDLTYGGWKALPLKLINRTHATVPIRLIINANAVAWRCFTFSKESVRAPVEVAPCADVVTRLAGPSVVNHMMPASYDGQDPEFLMIWVLFHSPKKQISSSDILDSAEEFSAKVDIEVDSPNPTPVLRSVSLRARAGIARIHAPRDLQTMHFLAKVASSRKQHLPLKNAGNIEVYLDIKVPEQGSHFSVDPKNLLLKPGEEHEVIVSFTPKDPEACEERILKIFVQPFGPQYEVVLKGEVISSGSKPLSPGPCLDIPSILSNKQFLAWGGVPLGRTQLQKLALRNNSASTTQHLRLLIRGQDQDCFQLQNTFGSEQRLTSNCEIRIHPKEDIFISVLFAPTRLSCMLARLEIKQLGNRSQPGIKFTIPLSGYGGTSNLILEGVKKLSDSYMVTVNGLVPGKESKIVFSVRNTGSRAAFVKAVGFKDSQKKVLLDPKVLRIFPDKFVLKERTQENVTLIYNPSDRGINNKTATELSTVYLFGGDEISRQQYRRALLHKPEMIKQILPEHSVLQNINFVEAFQDELLVTEVYDLPQRPNDVQLFYGSMCKIILSVIGEFRDCISSREFLQPSSKASLESTSDLGASGKHGGNVSLDVLPVKGPQGSPLLSRAARPPLDQLASEEPWTVLPEHLILVAPSPCDMAKTGRFQIVNNSVRLLRFELCWPAHCLTVTPQHGCVAPESKLQILVSPNSSLSTKQSMFPWSGLIYIHCDDGQKKIVKVQIREDLTQVELLTRLTSKPFGILSPVSEPSVSHLVKPMTKPPSTKVEIRNKSITFPTTEPGETSESCLELENHGTTDVKWHLSSLAPPYVKGVDESGDVFRATYAAFRCSPISGLLESHGIQKVSITFLPRGRGDYAQFWDVECHPLKEPHMKHTLRFQLSGQSIEAENEPENACLSTDSLIKIDHLVKPRRQAVSEASARIPEQLDVTARGVYAPEDVYRFRPTSVGESRTLKVNLRNNSFITHSLKFLSPREPFYVKHSKYSLRAQHYINMPVQFKPKSAGKFEALLVIQTDEGKSIAIRLIGEALGKN

SEQ ID NO: 7611 - protein, 514 aa, Homo sapiens
MSISSDEVNFLVYRYLQESGFSHSAFTFGIESHISQSNINGALVPPAALISIIQKGLQYVEAEVSINEDGTLFDGRPIESLSLIDAVMPDVVQTRQQAYRDKLAQQQAAAAAAAAAAASQQGSAKNGENTANGEENGAHTIANNHTDMMEVDGDVEIPPNKAVVLRGHESEVFICAWNPVSDLLASGSGDSTARIWNLSENSTSGSTQLVLRHCIREGGQDVPSNKDVTSLDWNSEGTLLATGSYDGFARIWTKDGNLASTLGQHKGPIFALKWNKKGNFILSAGVDKTTIIWDAHTGEAKQQFPFHSAPALDVDWQSNNTFASCSTDMCIHVCKLGQDRPIKTFQGHTNEVNAIKWDPTGNLLASCSDDMTLKIWSMKQDNCVHDLQAHNKEIYTIKWSPTGPGTNNPNANLMLASASFDSTVRLWDVDRGICIHTLTKHQEPVYSVAFSPDGRYLASGSFDKCVHIWNTQTGALVHSYRGTGGIFEVCWNAAGDKVGASASDGSVCVLDLRK

SEQ ID NO: 7612 - protein, 677 aa, Homo sapiens
MEETMKLATMEDTVEYCLFLIPDESRDSDKHKEILQKYIERIITRFAPMLVPYIWQNQPFNLKYKPGKGGVPAHMFGVTKFGDNIEDEWFIVYVIKQITKEFPELVARIEDNDGEFLLIEAADFLPKWLDPENSTNRVFFCHGELCIIPAPRKSGAESWLPTTPPTIPQALNIITAHSEKILASESIRAAVNRRIRGYPEKIQASLHRAHCFLPAGIVAVLKQRPRLVAAAVQAFYLRDPIDLRACRVFKTFLPETRIMTSVTFTKCLYAQLVQQRFVPDRRSGYRLPPPSDPQYRAHELGMKLAHGFEILCSKCSPHFSDCKKSLVTASPLWASFLESLKKNDYFKGLIEGSAQYRERLEMAENYFQLSVDWPERLEVQWRDPGLLQAPPPGFTPFICLSLLSTWDNSSLAMSPGEEILTLLQTIPFDIEDLKKEAANLPPEDDDQWLDLSPDQLDQLLQEAVGKKESESVSKEEKEQNYDLTEVSESMKAFISKVSTHKGAELPREPSEAPITFDADSFLNYFDKILGPRPNESDSDDLDDEDFECLDSDDDLDFETHEPGEEASLKGTLDNLKSYMAQMDQELAHTCISKSFTTRNQVEPVSQTTDNNSDEEDSGTGESVMAPVDVDLNLVSNILESYSSQAGLAGPASNLLQSMGVQLPDNTDHRPTSKPTKN

SEQ ID NO: 7613 - protein, 606 aa, Homo sapiens
MEESPLSRAPSRGGVNFLNVARTYIPNTKVECHYTLPPGTMPSASDWIGIFKVEAACVRDYHTFVWSSVPESTTDGSPIHTSVQFQEPRPMDELVTLEEADGGSDILLVVPKATVLQNQLDESQQERNDLMQLKLQLEGQVTELRSRVQELERALATARQEHTELMEQYKGISRSHGEITEERDILSRQQGDHVARILELEDDIQTISEKVLTKEVELDRLRDTVKALTREQEKLLGQLKEVQADKEQSEAELEPLKEQLRGAQELAASSQQKATLLGEELASAAAARDRTIAELHRSRLEVAEVNGRLAELGLHLKEEKCQWSKERAGLLQSVEAEKDKILKLSAEILRLEKAVQEERTQNQVFKTELAREKDSSLVQLSESKRELTELRSALRVLQKEKEQLQEEKQELLEYMRKLEARLEKVADEKWNEDATTEDEEAAVGLSCPAALTDSEDESPEDMRLPPYGLCERGDPGSSPAGPREASPLVVISQPAPISPHLSGPAEDSSSDSEAEDEKSVLMAAVQSGGEEANLLLPELGSAFYDMASGFTVGTLSETSTGGPATPTWKECPICKERFPAESDKDALEDHMDGHFFFSTQDPFTFE

SEQ ID NO: 7614 - protein, 998 aa, Homo sapiens
MNRRRKFLLASVLALQNSSFIYPSCQKCFSRIILVSKRSNCPKCGSTGESGNANYRYKLSLKVAESNKLFVITVFGSCLDTFFGLTATGLHRYIQDPNKIPETLDNDTTQNLLTKAVETCFVGQSFIFGVTNFENQPGQGSDASNFLQQCSDHKRKAKALVACQIVLPDPGIAGFTVIDYFHQLLQTFNFRKLQCDSQAPNNHLLALDHSNSDLSSIYTSDSTSDFFKSCSKDTFSKFWQPSLEFTCIVSQLTDNDDFSASEQSKAFGTLQQNRKSISIAEATGSSSCHDPIQDSWSLVSYMDKKSTAEKLGKELGLQAKELSAVHSSHHEIGVNDSNLFSLEMREPLESSNTKSFHSAVEIKNRSQHELPCFQHHGIDTPTSLQKRSACCPPSLLRLEETASSSQDGDPQIWDDLPFSESLNKFLAVLESEIAVTQADVSSRKHHVDNDIDKFHADHSRLSVTPQRTTGALHTPPIALRSSQVIVKANCSKDDFLFNCKGNLSPSVEKESQPDNKVEAVSVNHNGRDMSEYFLPNPYLSALSSSSKDLETIVTLKKTIRISPHRESDHSSLNNKYLNGCGEISVSEMNEKLTTLCYRKYNDVSDLCKLENKQYCRWSKNQDDSFTICRKLTYPLETLCNSPNRSTNTLKEMPWGHINNNVTQSYSIGYEGSYDASADLFDDIAKEMDIATEITKKSQDILLKWGTSLAESHPSESDFSLRSLSEDFIQPSQKLSLQSLSDSRHSRTCSPTPHFQSDSEYNFENSQDFVPCSQSTPISGFHQTRIHGINRAFKKPVFYSDLDGNYEKIRIFPENDKQQASPSCPKNIKTPSQKIRSPIVSGVSQPDVFNHYPFAECHETDSDEWVPPTTQKIFPSDMLGFQGIGLGKCLAAYHFPDQQELPRKKLKHIRQGTNKGLIKKKLKNMLAAVVTKKKTHKYNCKSSGWISKCPDIQVLAAPQLHPILGPDSCSEVKCCLPFSEKGPPSVCETRSAWSPELFS

SEQ ID NO: 7615 - protein, 156 aa, Homo sapiens
MADSPGGYKECGTNEGPQEDENGSSASGSSKVRQLWSEDSCESGKLPATRTVYCMNEAEIVDVALGILIESRKQEKACEQPALAGADNPEHSPPCSVSPHTSSGSSSEEEDSGKQALAPGLSPSQRPGGSSSACSRSPEEEEEEDVLKYVREIFFS

SEQ ID NO: 7616 - protein, 457 aa, Homo sapiens
MAELQMLLEEEIPGGRRALFDSYTNLERVADYCENNYIQSADKQRALEETKAYTTQSLASVAYLINTLANNVLQMLDIQASQLRRMESSINHISQTVDIHKEKVARREIGILTTNKNTSRTHKIIAPANLERPVRYIRKPIDYTILDDIGHGVKVSTQNMKMGGLAATPPTQKPPSPPMSGKGTLGSSGSSGGSHPSSRSSSRENSGSGSVGVPIAVPTPSPPSVFPAPAGSAGTPPLPATSASAPAPLVPATVPSSTAPDAAAGGAQTLADGFTSPTPPVVSSTPPTGHPVQFYSMNRPASRHTPPTIGGSLPYRRPPSITSQTSLQNQMNGGPFYSQNPVSDTPPPPPPVEEPVFDESPPPPPPPEDYEEEEAAVVEYSDPYAEEDPPWAPRSYLEKVVAIYDYTKDKEDELSFQEGAIIYVIKKNDDGWYEGVMNGVTGLFPGNYVESIMHYSE

SEQ ID NO: 7617 - protein, 1740 aa, Homo sapiens
  VARIANT 1: note = X can be any amino acid
XKIYPEEITPLLPAISGEKIAEDQTCFFLQILLKYMVIQAASLEWKNKENQDTGFKFLFTLFRKYYLPHLFPSFTKLTNIYKPVLDIPHLRPKPVYITTTRDNENIYSTKIPYMAARVVFIKWIVTFFLEKKYLTATQNTKNGVDVLPKIIQTVGGGAVQERAPELDGGGPTEQDKSHSNSSTLSDRRLSNSSLCSIEEEHRMVYEMVQRILLSTRGYVNFVNEVFHQAFLLPSCEIAVTRKVVQVYRKWILQDKPVFMEEPDRKDVAQEDAEKLGFSETDSKEASSESSGHKRSSSWGRTYSFTSAMSRGCVTEEENTNVKAGVQALLQVFLTNSANIFLLEPCAEVPVLLKEQVDACKAVLIIFRRMIMELTMNKKTWEQMLQILLRITEAVMQKPKDKQIKDLFAQSLAGLLFRTLMVAWIRANLCVYISRELWDDFLGVLSSLTEWEELINEWANIMDSLTAVLARTVYGVEMTNLPLDKLSEQKEKKQRGKGCVLDPQKGTTVGRSFSLSWRSHPDVTEPMRFRSATTSGAPGVEKARNIVRQKATEVEECQQSENAPAAGSGHLTVGQQQQVLRSSSTSDIPEPLCSDSSQGQKAENTQNSSSSEPQPIQENKGHVKREHEGITILVRRSSSPAELDLKDDLQQTQGKCRERQKSESTNSDTTLGCTNEAELSMGPWQTCEEDPELNTPTDVVADADARHWLQLSPTDASNLTDSSECLTDDCSIIAGGSLTGWHPDSAAVLWRRVLGILGDVNNIQSPKIHARVFCYLYELWYKLAKIRDNLAISLDNQSSPSPPVLIPPLRMFASWLFKAATLPNEYKEGKLQAYRLICAMMTRRQDVLPNSDFLVHFYLVMHLGLTSEDQDILNTIIRHCPPRFFSLGFPGFSMLVGDFITAAARVLSTDILTAPRSEAVTVLGSLVCFPNTYQEIPLLQSVPEVNEAITGTEDVKHYLINILLKNATEEPNEYARCIAVCSLGVWICEELAQCTSHPQVKEAINVIGVTLKFPNKIVAQVACDVLQLLVSYWEKLQMFETSLPRKMAEILVATVAFLLPSAEYSSVETDKKFIVSLLLCLLDWCMALPVSVLLHPVSTAVLEEQHSARAPLLDYIYRVLHCCVCGSSTYTQQSHYILTLADLSSTDYDPFLPLANVKSSEPVQYHSSAELGNLLTVEEEKKRRSLELIPLTARMVMAHLVNHLGHYPLSGGPAILHSLVSENHDNAHVEGSELSFEVFRSPNLQLFVFNDSTLISYLQTPTEGPVGGSPVGSLSDVRVIVRDISGKYSWDGKVLYGPLEGCLAPNGRNPSFLISSWHRDTFGPQKDSSQVEEGDDVLDKLLENIGHTSPECLLPSQLNLNEPSLTPCGMNYDQEKEIIEVILRQNAQEDEYIQSHNFDSAMKVTSQGQPSPVEPRGPFYFCRLLLDDLGMNSWDRRKNFHLLKKNSKLLRELKNLDSRQCRETHKIAVFYIAEGQEDKCSILSNERGSQAYEDFVAGLGWEVDLSTHCGFMGGLQRNGSTGQTAPYYATSTVEVIFHVSTRMPSDSDDSLTKKLRHLGNDEVHIVWSEHSRDYRRGIIPTAFGDVSIIIYPMKNHMFFIAITKKPEVPFFGPLFDGAIVSGKLLPSLVCATCINASRAVKCLIPLYQSFYEERALYLEAIIQNHREVMTFEDFAAQVFSPSPSYSLSGTGALASSLSADLEEPLSEEETEHPLLPLPRATKPRISRKFRCCTSALSRSSH

SEQ ID NO: 7618 - protein, 611 aa, Homo sapiens
MPHLDMKTHVCPSVEGPKKKGGITCFCCGGPFRAADRSKTRSPKLSHSPQPPSLGDPVEHLSETSADSLEAMSEGDAPTPFSRGSRTRASLPVVRSTNQTKERSLGVLYLQYGDETKQLRMPNEITSADTIRALFVSAFPQQLTMKMLESPSVAIYIKDESRNVYYELNDVRNIQDRSLLKVYNKDPAHAFNHTPKTMNGDMRMQRELVYARGDGPGAPRPGSTAHPPHAIPNSPPSTPVPHSMPPSPSRIPYGGTRSMVVPGNATIPRDRISSLPVSRPISPSPSAILERRDVKPDEDMSGKNIAMYRNEGFYADPYLYHEGRMSIASSHGGHPLDVPDHIIAYHRTAIRSASAYCNPSMQAEMHMEQSLYRQKSRKYPDSHLPTLGSKTPPASPHRVSDLRMIDMHAHYNAHGPPHTMQPDRASPSRQAFKKEPGTLVYIEKPRSAAGLSSLVDLGPPLMEKQVFAYSTATIPKDRETSEKMMKTTANRNHTDSAGTPHVSGGKMLSALESTVPPSQPPPVGTSAIHMSLLEMRRSVAELRLQLQQMRQLQLQNQELLRAMMKKAELEISGKVMETMKRLEDPVQRQRVLVEQERQKYLHEEEKIVKKL

SEQ ID NO: 7619 - protein, 62 aa, Homo sapiens
  VARIANT 1: note = X can be any amino acid
XENPLVYCDGHGCSVAVHQACYGIVQVPTGPWFCRKCESQERAARVVGPMWFVPCIFQRYNL

SEQ ID NO: 7620 - protein, 622 aa, Homo sapiens; identical to SEQ ID NO: 5475

SEQ ID NO: 7621 - protein, 181 aa, Homo sapiens
MGGRSAQAGLGTRITPMMELKPNAGSDRAWVWNTHADFADECPKPELLAIRFLNAENAQKFKTKFEECRKEIEEREKKGDVVPWVGGLLCRLTLHLTILPGGCFFCLPDKHSRVLWPPHVSRVMQLPGDTGASWGALSTCQCCWPQSNWAGIGVRALPGAHQKVLYDGPRFVSQRAWSPLP

SEQ ID NO: 7622 - protein, 125 aa, Homo sapiens
MSSSGYPPNQGAFSTEQSRYPPHSVQYTFPNTRHQQEFAVPDYRSSHLEVSQASQLLQQQQQQQLRRRPSLLSEFHPGSDRPQERRTSYEPFHPGPSPVDHDSLESKRPRLEQVSDSHFQRVSAA

SEQ ID NO: 7623 - protein, 105 aa, Homo sapiens
MLRCGQMIFAQALVCRHLGRDWRWTQRKRQPDSYFSVLNAFIDRKDSYYSIHQIAQMGVGEGKSIGQWYGPNTVAQVLKKLAVFDTWSSLAVHIAMDNTVVMEEI

SEQ ID NO: 7624 - protein, 434 aa, Homo sapiens
MDIDKDLEAPLYLTPEGWSLFLQRYYQVVHEGAELRHLDTQVQRCEDILQQLQAVVPQIDMEGDRNIWIVKPGAKSRGRGIMCMDHLEEMLKLVNGNPVVMKDGKWVVQKYIERPLLIFGTKFDLRQWFLVTDWNPLTVWFYRDSYIRFSTQPFSLKNLDNSVHLCNNSIQKHLENSCHRHPLLPPDNMWSSQRFQAHLQEMGAPNAWSTIIVPGMKDAVIHALQTSQDTVQCRKASFELYGADFVFGEDFQPWLIEINASPTMAPSTAVTARLCAGVQADTLRVVIDRMLDRNCDTGAFELIYKQPAVEVPQYVGIRLLVEGFTIKKPMAMCHRRMGVRPAVPLLTQRGSGEARHHFPSLHTKAQLPSPHVLRHQGQVLRRQHSKLVGTKALSTTGKALRTLPTAKVFISLPPNLDFKVAPSILKPRKVGLDL

SEQ ID NO: 7625 - protein, 191 aa, Homo sapiens
MAIGKRLATLPTKEQKTQRLISELSLLNHKLPARVWLPTAGFDHHVVRVPHTQAVVLNSKDKAPYLIYVEVLECENFDTTSVPARIPENRIRSTRSVENLPECGITHEQRAGSFSTVPNYDNDDEAWSVDDIGELQVELPEVHTNSCDNISQFSVDSITSQESKEPVFIAAGDIRRRLSEQLAHTPTAFKR

SEQ ID NO: 7626 - protein, 300 aa, Homo sapiens
MAKWGQGNPHWIVEEREDGTNVNNWRWRTERDATSLSKGKFQELLVGIVVENDAGRGEINELKQVEGEASCSSRKGKLIFFYEWNIKLGWKGIVKESGVKHKGLIEIPNLSEENEVDDTEVSLSKKKGDGVILKDLMKTAGTAKVREALGDYLKALKTEFTTGMILPTKAMATQELTVKRKLSGNTLQVQASSPVALGVRIPTVALHMMELFDTTVEQLYSIFTVKELTNKKIIMKWRCGNWPEEHYAMVALNFVPTLGQTELQLKEFLSICKEENMKFCWQKQHFEEIKGSLQLTPLNG

SEQ ID NO: 7627 - protein, 378 aa, Homo sapiens
MKDVPGFLQQSQNSGPGQPAVWHRLEELYTKNFMKTLSVNLNTGKSLSSVFHFENECIDARRCSKAGGFYFRVNPLSLVEIILHVVRQMTDPNVALTFLEKTREKVKSSDEAVILCKTAIGALKLNIGDLQVTKETIEDVEEMLNNLPGVTSVHSRFYDLSSKYYQTIGNHASYYKDALRFLGCVDIKDLPVSEQQERAFTLGLAGLLGEGVFNFGELLMHPVLESLRNTDRQWLIDTLYAFNSGNVERFQTLKTAWGQQPDLAANEAQLLRKIQLLCLMEMTFTRPANHRQLTFEEIAKSAKITVNEVELLVMKALSVGLVKGSIDEVDKRVHMTWVQPRVLDLQQIKGMKDRLEFWCTDVKSMEMLVEHQAHDILT

SEQ ID NO: 7628 - protein, 200 aa, Homo sapiens
MLLEQNLITVDMQKHSLTFWWLVECWPQVFNKLIRRYKYLEKGFEDEVKKLLLFLKGFSESERNKLAMLTGVLLANGTLNASILNSLYNENLVKEGVSAAFAVKLFKSWINEKDINAVAASLRKVSMDNRLMELFPANKQSVEHFTKYFTEAGLKELSEYVRNQQTIGARKELQKELQEQMSRGDPFKDIILYVKEEMKK

SEQ ID NO: 7629 - protein, 481 aa, Homo sapiens; identical to SEQ ID NO: 7546

SEQ ID NO: 7630 - protein, 86 aa, Homo sapiens
MGKMVSVINTVDTSHEDMIHDAQMDYYGTRLATCSSDRSVKIFDVRNGGQILIADLRGHEGPVWQVAWAHPMYGNILASCSYDRKV

SEQ ID NO: 7631 - protein, 219 aa, Homo sapiens
MEPSAQQLQLAASLPANLSNFCQGSEMPTTSRPALDVKGGTSPAKEDANQEMSSVAYSNLAVKDRKAVAILHYPGVASNGTKASGAPTSSSGSPIGSPTTTPPTKPPSFNLHPAPHLLASMHLQKLNSQYQGMAAATPGQPGEAGPLQNWDFGAQAGGAESLSPSAGAQSPAIIDSDPVDEEVLMSLVVELGLDRANELPELWLGQNEFDFTADFPSSC

SEQ ID NO: 7632 - protein, 131 aa, Homo sapiens
MLCWGYWSLGQPGISTNLQGIVAEPQVCGFISDRSVKEVACGGNHSVFLLEDGEVYTCGLNTKGQLGHEREGNKPEQIGALADQHIIHVACGESHSLALSDRGQLFSWGAGSDGQLGLMTTEDSVAVPRLI

SEQ ID NO: 7633 - protein, 1033 aa, Homo sapiens
MEGALTARDKVGVQDFVLLDAYTSESAFVDNLRKRFSENLIYTYIGTLLVSVNPYQELGIYTVSQMELYQGVNFFELPPHVYAIADNAYRMMCAELNNHFILISGESGAGKTEASKKILEYFAVTCPMTQSLQIARDRLLFSNPVLEAFGNARTLRNDNSSRFGKYMDIQFDFQGIPVGGHIISYLIEKSRVVYQNEGERNFHIFYQLLAGGEEERLSYLGLERDPQLYKYLSQGHCAKESSISDKNDWKTVSNAFSVIDFTEADLENLFGIIASVLHLGNIGFEEDDQGCATIPDTHEIKWIAKLLGVHPSVLLEALTHRKIEAKTEEVICPLTLELSVYARDAMAKAVYGRTFTWLVNKINSSLVNKVGQRILDPLLLLTWKTVIGLLDIYGFEVFDKNGFEQFCINYCNEKLQQLLIERTLKAEQAEYEMEGIEWEPIKYFNNKIICDLVEERHKGIISILDEECIRPGPATDLSFLEKLEEKVGKHAHFETRKLAGPKGRKRIGWMEFRLLHYAGEVTYCTKGFLEKNNDLLYRHLKEVLCKSKNIILRECFLLAELENRRRPPTVGTQFKNSLSSLLETLISKEPSYIRCIKPNDRKEPSKFDDFLIRHQIKYLGLMEHLRVRRAGFAYRRKYEHFLQRYKSLCPDTWPHWHGPPAEGVERLIKYIGYKPEEYKLGKTKIFIRFAALFATEDAFEFSKHQLVARIQATYKRCLGRREYVKKRQAAIKLEAHWRGALARKAIQRRKWAVRIIRKFIKGFISRNKPLCPDNEEFIVFVRKNYILNLRYHLPKTVLDKSWLRPPGILENASDLLRKMCVRNLVQKYCRGITAERKAMMQQKVVTSEIFRGRKDGYTESLNQPFVNSRIDEGDINPKVLQLISHEKIQYGVPVIKYDRKGFKARQRQLILTQKAAYVVELAKIKQKIEYSALKGVSTSNLSDGILVIHVSPEDSKQKGDAVLQCGHVFEAVTKLVMLVKKENIVNVVQGSLQFFISPGKEGTIVFDTGLEEQVYKNKNGQLTVVSVRARGSS

SEQ ID NO: 7634 - protein, 391 aa, Homo sapiens
MCSQLWFLTDRRIREDYPQVQILRALRQRCSEQDVRFRAVLMDQIAVTIVGGHLGLQLNQKALTTFPDVVLVRVPTPSVQSDSDITVLRHLEKLGCRLVNRPQSILNCINKFWTFQELAGHGVPMPDTFSYGGHEDFSKMIDEAEPLGYPVVVKSTRGHRGKAVFLARDKHHLSDICHLIRHDVPYLFQKYVKESHGKDIRVVVVGGQVIGSMLRCSTDGRMQSNCSLGGVGVKCPLTEQGKQLAIQVSNILGMDFCGIDLLIMDDGSFVVCEANANVGFLAFDQACNLDVGGIIADYTMSLLPNRQTGKMAVLPGLSSPREKNEPDGCASAQGVAESVYTINSGSTSSESEPELGEIRDSSASTMGAPPSMLPEPGYNINNRIASELKLK

SEQ ID NO: 7635 - protein, 354 aa, Homo sapiens
MDMDHIMTWATDVAKGMHYLHMEAPVKVIHRDLKSRNVVIAADGVLKICDFGASRFHNHTTHMSLVGTFPWMAPEVIQSLPVSETCDTYSYGVVLWEMLTREVPFKGLEGLQVAWLVVEKNERLTIPSSCPRSFAELLHQCWEADAKKRPSFKQIISILESMSNDTSLPDKCNSFLHNKAEWRCEIEATLERLKKLERDLSFKEQELKERERRLKMWEQKLTEQSNTPLLLPLAARMSEESYFESKTEESNSAEMSCQITATSNGEGHGMNPSLQAMMLMGFGDIFSMNKAGAVMHSGMQINMQAKQNSSKTTSKRRGKKVNMALGFSDFDLSEGDDDDDDDGEEEDNDMDNSE

SEQ ID NO: 7636 - protein, 567 aa, Homo sapiens
MLERPPALAMPMPTEGTPPPLSGTPIPVPAYFRHAEPGFSLKRPRGLSRSLPPPPPAKGSIPISRLFPAAPGWHQLQPRRVSFRGEASETLQSPGYDPSRPESFFQQSFQRLSRLGHGSYGEVFKVRSKEDGRLYAVKRSMSPFRGPKDRARKLAEVGSHEKVGQHPCCVRLEQAWEEGGILYLQTELCGPSLQQHCEAWGASLPEAQVWGYLRDTLLALAHLHSQGLVHLDVKPANIFLGPRGRCKLGDFGLLVELGTAGAGEVQEGDPRYMAPELLQGSYGTAADVFSLGLTILEVACNMELPHGGEGWQQLRQGYLPPEFTAGLSSELRSVLVMMLEPDPKLRATAEALLALPVLRQPRAWGVLWCMAAEALSRGWALWQALLALLCWLWHGLAHPASWLQPLGPPATPPGSPPCSLLLDSSLSSNWDDDSLGPSLSPEAVLARTVGSTSTPRSRCTPRVLTPLRLSPAAEPSAPGLGPAAEAPCCVEQRGFLSRHIPRSFSAFQAAPPKSACNALHLHGHTQPSAFVWSLTCSSHHGRTFEARTKVDPLFKICGGFLTVFADL

SEQ ID NO: 7637 - protein, 213 aa, Homo sapiens
MAETEERSLDNFFAKRDKKKKKERSNRAASAAGAAGSAGGSSGAAGAAGGGAGAGTRPGDGGTASAGAAGPGAATKAVTKDEDEWKELEQKEVDYSGLRVQAMQISSEKEEDDNEKRQDPGDNWEEGGGGGGGMEKSSGPWNKTAPVQAPPAPVIVTETPEPAMTSGVYRPPGARLTTTRKTPQGPPEIYSDTQFPSLQSTAKHVESRNRYLK

SEQ ID NO: 7638 - protein, 1379 aa, Homo sapiens
MASSPTKGLTMSVPVAPKKSCYTQLRDNRNAARNNNESILSLGDTNANQIMLEVSSSHDESKTCDLGDEIGNTNSSEPENRTHFHKEFHQLQGFGKGSQAGSASLKDFRLSSTIQRELNEEHTVERGTDSLQTTRSIQGPSLSSWRNVMSEASLDVLAKRDAEIPRHVPKDKLAKTLDNEELRRHSLERASSSVAAVGSLTPQHPQPLSLDSREARGQIPGGGEGPQKTLPDHAVPAAFPATDSTSEGKSVRHPKPSTSESKQSTPSETQTVGAHVLQVCSEHTSHSAHPEPALNLTLASKEIPSKLEAQLGQGKGEAKLDLKYVPPRRVEQEGKAAQEGYLGCHKEENLSALEGRDPCGEAHPEATDALGHLLNSDLHHLGVGRGNCEEKRGVNPGEQDSLHTTPKQGSASLGGADNQPTGKISPCAGEKLGERTSSSFSPGDSHVAFIPNNLTDSKPLDVIEEERRLGSGNKDSVMVLVFNPSVGENKTEVPEPLDPQSGRSEARESKEVTTSVAENRNLLENADKIESTSARADSVLNIPAPLHPETTVNMTYQPTTPSSSFQDVSVFGMDAGSPLVVPPPTDSARLLNTSPKVPDKNTCPSGIPKPVFTHSKDTPSSQEGMENYQVEKTEERTETKPIIMPKPKHVRPKIITYIRRNPQALGQVDASLVPVGLPYAPPTCTMPLPHEEKAAGGDLKPSANLYEKFKPDLQKPRVFSSGLMVSGIKPPGHPFSQMSEKFLQEVTDHPGKEEFCSPPYAHYEVPPTFYRSAMLLKPQLGLGAMSRLPSAKSRILIASQRSSASAIHPPGPITTATSLYSSDPSADLKKASSSNAAKSNLPKSGLRPPGYSRLPAAKLAAFGFVRSSSVSSVSSTQSGDSAQPEQGRPATRSTFGNEEQPVLKASLPSKDTPKGAGRVAPPASSSVTAPRRSLLPAPKSTSTPAGTKKDAQKDQDTNKPAVSSPKRVAASTTKLHSPGYPKQRTAAARNGFPPKPDPQAREAERQLVLRLKERCEQQTRQLGVAQGELKRAICGFDALAVATQHFFRKNESALVKEKELSIELANIRDEVAFHTAKCEKLQKEKEELERRFEDEVKRLGWQQQAELQELEERLQLQFEAEMARLQEEHGDQLLSIRCQHQEQVEDLTASHDAALLEMENNHTVAITILQDDHDHKVQELMSTHELEKKELEENFEKLRLSLQDQVDTLTFQSQSLRDRARRFEEALRKNTEEQLEIALAPYQHLEEDMKSLKQVLEMKNQQIHEQEKKILELEKLAEKNIILEEKIQVLQQQNEDLKARIDQNTVVTRQLSEENANLQEYVEKETQEKKRLSRTNEELLWKLQTGDPTSPIKLSPTSPVYRGSSSGPSSPARVSTTPR

SEQ ID NO: 7639 - protein, 346 aa, Homo sapiens
MQHLKSKKREERWMRASKRQSEKEMEELHHNIDDLLQEKKSLECEVEELHRTVQKRQQQKDFIDGNVESLMTELEIEKSLKHHEDIVDEIECIEKTLLKRRSELREADRLLAEAESELSCTKEKTKNAVEKFTDAKRSLLQTESDAEELERRAQETAVNLVKADQQLRSLQADAKDLEQHKIKQEEILKEINKIVAAKDSDFQCLSKKKEKLTEELQKLQKDIEMAERNEDHHLQVLKESEVLLQAKRAELEKLKSQVTSQQQEMAVLDRQLGHKKEELHLLQGSMVQAKADLQEALRLGETEVTEKCNHIREVKSLLEELSFQKGELNVQISERKTQLTLIKQEI

SEQ ID NO: 7640 - protein, 122 aa, Homo sapiens; identical to SEQ ID NO: 7564

SEQ ID NO: 7641 - protein, 96 aa, Homo sapiens
MSISSDEVNFLVYRYLQESGFSHSAFTFGIESHISQSNINGALVPPAALISIIQKGLQYVEAEVSINEDGTLFDGRPIESLSLIDAVMPDVVQTRQ

SEQ ID NO: 7642 - protein, 970 aa, Homo sapiens
MLQQVNGHNPGSDGQAREYLREDLQEFLGGEVLLYKLDDLTRVNPVTLETVLRCLQARYMADTFYTNAGCTLVALNPFKPVPQLYSPELMREYHAAPQPQKLKPHVFTVGEQTYRNVKSLIEPVNQSIVVSGESGAGKTWTSRCLMKFYAVVATSPASWESHKIAERIEQRILNSNPVMEAFGNACTLRNNNSSRFGKFIQLQLNRAQQMTGAAVQTYLLEKTRVACQASSERNFHIFYQICKGASEDERLQWHLPEGAAFSWLPNPERSLEEDCFEVTREAMLHLGIDTPTQNNIFKVLAGLLHLGNIQFAASEDEAQPCQPMDDAKYSVRTAASLLGLPEDVLLEMVQIRTIRAGRQQQVFRKPCARAECDTRRDCLAKLIYARLFDWLVSVINSSICADTDSWTTFIGLLDVYGFESFPDNSLEQLCINYANEKLQQHFVAHYLRAQQEEYAVEGLEWSFINYQDNQPCLDLIEGSPISICSLINEECRLNRPSSAAQLQTRIETALAGSPCLGHNKLSREPSFIVVHYAGPVRYHTAGLVEKNKDPIPPELTRLLQQSQDPLLMGLFPTNPKEKTQEEPPGQSRAPVLTVVSKFKASLEQLLQVLHSTTPHYIRCIKPNSQGQAQTFLQEEVLSQLEACGLVETIHISAAGFPIRVSHRNFVERYKLLRRLHPCTSSGPDSPYPAKGLPEWCPHSEEATLEPLIQDILHTLPVLTQAAAITGDSAEAMPAPMHCGRTKVFMTDSMLELLECGRARVLEQCARCIQGGWRRHRHREQERQWRAVMLIQAAIRSWLTRKHIQRLHAAATVIKRAWQKWRIRMACLAAKELDGVEEKHFSQAPCSLSTSPLQTRLLEAIIRLWPLGLVLANTAMGVGSFQRKLVVWACLQLPRGSPSSYTVQTAQDQAGVTSIRALPQGSIKFHCRKSPLRYADICPEPSPYSITGFNQILLERHRLIHVTSSAFTGLG

SEQ ID NO: 7643 - protein, 1100 aa, Homo sapiens; identical to SEQ ID NO: 5087

SEQ ID NO: 7644 - protein, 129 aa, Homo sapiens; identical to SEQ ID NO: 6440

SEQ ID NO: 7645 - protein, 165 aa, Homo sapiens
MSLHGKRKEIYKYEAPWTVYAMNWSVRPDKRFRLALGSFVEEYNNKVQLVGLDEESSEFICRNTFDHPYPTTKLMWIPDTKGVYPDLLATSGDYLRVWRVGETETRLECLLNNNKNSDFCAPLTSFDWNEVDPYLLGTSSIDTTCCFQWPVCLSLLCTHCYQKLL

SEQ ID NO: 7646 - protein, 347 aa, Homo sapiens
MSLAQSPGIWGEDPVKLTLALKMTRQDLTRTQMELNNMKANFGDVVPRRDFEMQEKTNKDLQEQLDTLRASYEEVRKEHEILMQLHMSTLKERDQFFSELQEIQRTSTPRPDWTKCKDVVAGGPERWQMLAEGKNSDQLVDVLLEEIGSGLLREKDFFPGLGYGEAIPAFLRFDGLVENKKPSKKDVVNLLKDAWKERLAEEQKETFPDFFFNFLEHRFGPSDAMAWAYTIFENIKIFHSNEVMSQFYAVLMGKRSENVYVTQKETVAQLLKEMTNADSQNEGLLTMEQFNTVLKSTFPLKTEEQIQELMEAGGWHPSSSNADLLNYRSLFMEDEEGQSEPFVQKLW

SEQ ID NO: 7647 - protein, 72 aa, Homo sapiens
MWSLTASEGESTTAHFFLGAGDEGLGTRGIGMRPEESDSELLEDEEDEVPPEPQIIVGICAMTKKSKSKPMT

SEQ ID NO: 7648 - protein, 382 aa, Homo sapiens; identical to SEQ ID NO: 5496

SEQ ID NO: 7649 - protein, 539 aa, Homo sapiens; identical to SEQ ID NO: 5502

SEQ ID NO: 7650 - protein, 129 aa, Homo sapiens; identical to SEQ ID NO: 6440

SEQ ID NO: 7651 - protein, 362 aa, Homo sapiens; identical to SEQ ID NO: 5396

SEQ ID NO: 7652 - protein, 421 aa, Homo sapiens
MSALRRSGYGPSDGPSYGRYYGPGGGDVPVHPPPPLYPLRPEPPQPPISWRVRGGGPAETTWLGEGGGGDGYYPSGGAWPEPGRAGGSHQSLNSYTNGAYGPTYPPGPGANTASYSGAYYAPGYTQTSYSTEVPSTYRSSGNSPTPVSRWIYPQQDCQTEAPPLRGQVPGYPPSQNPGMTLPHYPYGDGNRSVPQSGPTVRPQEDAWASPGAYGMGGRYPWPSSAPSAPPGNLYMTESTSPWPSSGSPQSPPSPPVQQPKDSSYPYSQSDQSMNRHNFPCSVHQYESSGTVNNDDSDLLDSQVQYSAEPQLYGNATSDHPNNQDQSSSLPEECVPSDESTPPSIKKIIHVLEKVQYLEQEVEEFVGKKTDKAYWLLEEMLTKELLELDSVETGGQDSVRQARKEAVCKIQAILEKLEKKGL

SEQ ID NO: 7653 - protein, 106 aa, Homo sapiens
  VARIANT 1: note = X can be any amino acid
XNLREGAEQKVVFITGRVHPGETPSSFVCQGIIDFLVSQHPIACVLREYLVFKIAPMLNPDGVYLGNYRCLSLMRNGSRGRPFFPSSSARMLRTSPIPAHPLTGTL

SEQ ID NO: 7654 - protein, 227 aa, Homo sapiens
  VARIANT 1: note = X can be any amino acid
XLIFACLVPGFPAVMSSRGPCTLETLINPSPSVADVKIYPEEITPLLPAISGEKIAEDQTCFFLQILLKYMVIQAASLEWKNKENQDTGFKFLFTLFRKYYLPHLFPSFTKLTNIYKPVLDIPHLRPKPVYITTTRDNENIYSTKIPYMAARVVFIKWIVTFFLEKKYLTATQNTKNGVDVLPKIIQTVGGGAVQERAPELDGGGPTEQDKSHSNSSTLSDRRLSNS

SEQ ID NO: 7655 - protein, 190 aa, Homo sapiens
MEPPMEPSGGEQEPGAVRFLDLPWEDVLLPHVLNRVPLRQLLRLQRVSRAFRSLVQLHLAGLRRFDAAQVGPQIPRAALARLLRDAEGLQELALAPCHEWLSDEDLVPVLARNPQLRSVALGGCGQLSRRALGALAEGCPRLQRLSLAHCDWVDGLALRGLADRCPALEELDLTACRQLKDEAIVYLAQR

SEQ ID NO: 7656 - protein, 89 aa, Homo sapiens; identical to SEQ ID NO: 6950

SEQ ID NO: 7657 - protein, 126 aa, Homo sapiens
MTTRSVLDVETFVADILKGENLSKKAKEKRESLIKKIKDVKSIYLQEFQDKGDAEDGEEYDDPFAGPPDTISLASERYDKDDEAPSDGAQFPPIAAQDLPFVLKAGYLEKRRKDHSFLGFEWQKRW

SEQ ID NO: 7658 - protein, 225 aa, Homo sapiens
MLSAVARGYQGWFHPCARLSVRMSSTGIDRKGVLANRVAVVTGSTSGIGFAIARRLARDGAHVVISSRKQQNVDRAMAKLQGEGLSVAGIVCHVGKAEDREQLVAKALEHCGGVDFLVCSAGVNPLVGSTLGTSEQIWDKILSVNVKSPALLLSQLLPYMENRRGAVILVSSIAAYNPVVALGVYNVSKTALLGLTRTLALELAPKDIRVNCVVPGIIKTDFSKV

SEQ ID NO: 7659 - protein, 359 aa, Homo sapiens
  VARIANT 1: note = X can be any amino acid
XATAMTSAWLAQGTGEGVNDVRKGACASHVSTMASFLKGAHVTINARAEEDVEPECIMEKVAKASGANYSFHKESGRFQDVGPQAPVGSVYQKTNAVSEIKRVGKDSFWAKAEKEEENRRLEEKRRAEEAQRQLEQERRERELREAARREQRYQEQGGEASPQRTWEQQQEVVSRNRNEQESAVHPREIFKQKERAMSTTSISSPQPGKLRSPFLQKQLTQPETHFGREPAAAISRPRADLPAEEPAPSTPPCLVQAEEEAVYEEPPEQETFYEQPPLVQQQGAGSEHIDHHIQGQGLSGQGLCARALYDYQAADDTEISFDPENLITGIEVIDEGWWRGYGPDGHFGMFPANYVELIE

SEQ ID NO: 7660 - protein, 160 aa, Homo sapiens; identical to SEQ ID NO: 6461

SEQ ID NO: 7661 - protein, 871 aa, Homo sapiens
MGDSDDEYDRRRRDKFRRERSDYDRSRERDERRRGDDWNDREWDRGRERRSRGEYRDYDRNRRERFSPPRHELSPPQKRMRRDWDEHSSDPYHSGYEMPYAGGGGGPTYGPPQPWGHPDVHIMQHHVLPIQARLGSIAEIDLGVPPPVMKTFKEFLLSLDDSVDETEAVKRYNDYKLDFRRQQMQDFFLAHKDEEWFRSKYHPDEVGKRRQEARGALQNRLRVFLSLMETGWFDNLLLDIDKADAIVKMLDAAVIKMEGGTENDLRILEQEEEEEQAGKPGEPSKKEEGRAGAGLGDGERKTNDKDEKKEDGKQAENDSSNDDKTKKSEGDGDKEEKKEDSEKEAKKSSKKRNRKHSGDDSFDEGSVSESESESESGQAEEEKEEAEALKEKEKPKEEEWEKPKDAAGLECKPRPLHKTCSLFMRNIAPNISRAEIISLCKRYPGFMRVALSEPQPERRFFRRGWVTFDRSVNIKEICWNLQNIRLRECELSPGVNRDLTRRVRNINGITQHKQIVRNDIKLAAKLIHTLDDRTQLWASEPGTPPLPTSLPSQNPILKNITDYLIEEVSAEEEELLGSSGGAPPEEPPKEGNPAEINVERDEKLIKVLDKLLLYLRIVHSLDYYNTCEYPNEDEMPNRCGIIHVRGPMPPNRISHGEVLEWQKTFEEKLTPLLSVRESLSEEEAQKMGRKDPEQEVEKFVTSNTQELGKDKWLCPLSGKKFKGPEFVRKHIFNKHAEKIEEVKKEVAFFNNFLTDAKRPALPEIKPAQPPGPAQSLTPGLPYPHQTPQGLMPYGQPRPPILGYGAGAVRPAVPTGGPPYPHAPYGAGRGNYDAFRGQGGYPGKPRNRMVRGDPRAIVEYRDLDAPDDVDFF

SEQ ID NO: 7662 - protein, 674 aa, Homo sapiens; identical to SEQ ID NO: 5910

SEQ ID NO: 7663 - protein, 488 aa, Homo sapiens
MSDEVFSTTLAYTKSPKVTKRTTFQDELIRAITARSARQRSSEYSDDFDSDEIVSLGDFSDTSADENSVNKKMNDFHISDDEEKNPSKLLFLKTNKSNGNITKDEPVCAIKNEEEMAPDGCEDIVVKSFSESQNKDEEFEKDKIKMKPKPRILSIKSTSSENNSLDTDDHFKPSPRPRSMLKKKSHMEEKDGLEDKETALSEELELHSAPSSLPTPNGIQLEAEKKAFSENLDPEDSCLTSLASSSLKQILGDSFSPGSEGNASGKDPNEEITENHNSLKSDENKENSFSADHVTTAVEKSKESQVTADDLEEEKAKAELIMDDDRTVDPLLSKSQSILISTSATASSKKTIEDRNIKNKKSTNNRASSASARLMTSEFLKKSSSKRRTPSTTTSSHYLGTLKVLDQKPSQKQSIEPDRADNIRAAVYQEWLEKKNVYLHEMHRIKRIESENLRIQNEQKKAAKREEALASFEAWKAMKEKEAKKIAA

SEQ ID NO: 7664 - protein, 187 aa, Homo sapiens
MVREPGPRPGTPGCSASGQWTATLRPYLSAVRATLQAALCLENFSSQVVERHNKPEVEVRSSKELLLQPVTISRNEKEKVLIEGSINSVRVSIAVKQADEIEKILCHKFMRFMMMRAENFFILRRKPVEGYDISFLITNFHTEQMYKHKLVDFVIHFMEEIDKEISEMKLSVNARARIVAEEFLKNF

SEQ ID NO: 7665 - protein, 355 aa, Homo sapiens
  VARIANT 1: note = X can be any amino acid
XSLASSLRNKEGTLGSKVGYLDVEARGPGEGRGGGGESPPLQPPPPAPVLLYDQGGGRRRRGEAEAEAEEWEAESVLGTLLQKLREEGYLAYYLQGGFSRFQAECPHLCETSLAGRAGSSMAPVPGPVPVVGLGSLCLGSDCSDAESEADRDSMSCGLDSEGATPPPVGLRASFPVQILPNLYLGSARDSANLESLAKLGIRYILNVTPNLPNFFEKNGDFHYKQIPISDHWSQNLSRFFPEAIEFIDEALSQNCGVLVHCLAGVSRSVTVTVAYLMQKLHLSLNDAYDLVKRKKSNISPNFNFMGQLLDFERSLRLEERHSQEQGSGGQASAASNPPSFFTTPTSDGAFELAPT

SEQ ID NO: 7666 - protein, 16 aa, Homo sapiens
MCTSETFQALDTFEAR

SEQ ID NO: 7667 - protein, 539 aa, Homo sapiens; identical to SEQ ID NO: 5502

SEQ ID NO: 7668 - protein, 157 aa, Homo sapiens; identical to SEQ ID NO: 7296

SEQ ID NO: 7669 - protein, 849 aa, Homo sapiens
MEPERKGLSLASSSDGDGREENKLKQGISQDLASSSRLDRYKIARQLTEKAIKEKKIFSIYGHYPVVRAALRRKGWVEKKFHFLPKVIPDVEDEGARVNDDTCAKVKENQEMALEKTDNIHDVMSRLVKNEMPYLLWTIKRDIIDYHSLTYDQMLNHYAKTASFTTKIGLCVNMRSLPWYVPANPDSFFPRCYSLCTESEQQEFLEDFRRTMASSILKWVVSHQSCSRSSRSKPRDQREEAGSSDLSSRQDAENAEAKLRGLPGQLVDIACKVCQAYLGQLEHEDIDTSADAVEDLTEAEWEDLTQQYYSLVHGDAFISNSRNYFSQCQALLNRITSVNPQTDIDGLRNIWIIKPAAKSRGRDIVCMDRVEEILELAAADHPLSRDNKWVVQKYIETPLLICDTKFDIRQWFLVTDWNPLTIWFYKESYLRFSTQRFSLDKLDSAIHLCNNAVQKYLKNDVGRSPLLPAHNMWTSTRFQEYLQRQGRGAVWGSVIYPSMKKAIAHAMKVAQDHVEPRKNSFELYGADFVLGRDFRPWLIEINSSPTMHPSTPVTAQLCAQVQEDTIKVAVDRSCDIGNFELLWRQPVVEPPPFSGSDLCVAGVSVRRARRQVLPVCNLKASASLLDAQPLKARGPSAMPDPAQGPPSPALQRDLGLKEEKGLPLALLAPLRGAAESGGAAQPTRTKAAGKVELPACPCRHVDSQAPNTGVPVAQPAKSWDPNQLNAHPLEPVLRGLKTAEGALRPPPGGKGEGTVCSRLPHHGHHVAACQTTGTTWDGGPGVCFLRQLLASELPMGPGLPRDPRAPPCLVCRGLLPPAGPCKRCRSFCAAVLQGASFVRLGGRSCSAAP

SEQ ID NO: 7670 - protein, 912 aa, Homo sapiens
MKRGIRRDPFRKRKLGGRAKKVREPTAVNSFYREASLPSVWASLRRREMVRSGARPGQVLSSGRHTGPAKLTNGKKATYLRKIPRFNADSGYSIHSDSESQAETVHGLDGCASLLRDILRNEDSASSDNKKQIPNEASARSERDTSDLEQNWSLQDHYRMYSPIIYQALCEHVQTQMSLMNDLTSKNIPNGIPAVPCHAPSHSESQATPHSSYGLCTSTPVWSLQRPPCPPKVHSEVQTDGNSQFASQGKTVSATCTDVLRNSFNTSPGVPCSLPKTDISAIPTLQQLGLVNGILPQQGIHKETDLLKCIQTYLSLFRSHGKETHLDSQTHRSPTQSQPAFLATNEEKCAREQIREATSERKDLNIHVRDTKTVKDVQKAKNVNKTAEKVRIIKYLLGELKALVAEQEDSEIQRLITEMEACISVLPTVSGNTDIQVEIALAMQPLRSENAQLRRQLRILNQQLREQQKTQKPSGAVDCNLELFSLQSLNMSLQNQLEESLKSQELLQSKNEELLKVIENQKDENKKFSSIFKDKDQTILENKQQYDIEITRIKIELEEALVNVKSSQFKLETAEKENQILGITLRQRDAEVTRLRELTRTLQTSMAKLLSDLSVDSARCKPGNNLTKSLLNIHDKQLQHDPAPAHTSIMSYLNKLETNYSFTHSEPLSTIKNEETIEPDKTYENVLSSRGPQNSNTRGMEEASAPGIISALSKQDSDEGSETMALIEDEHNLDNTIYIPFARSTPEKKSPLSKRLSPQPQIRAATTQLVSNSGLAVSGKENKLCTPVICSSSTKEAEDAPEKLSRASDMKDTQLLKKIKEAIGKIPAATKEPEEQTACHGPSGCLSNSLQVKGNTVCDGSVFTSDLMSDWSISSFSTFTSRDEQDFRNGLAALDANIARLQKSLRTGLLEK

SEQ ID NO: 7671 - protein, 175 aa, Homo sapiens
MELTIFILRLAIYILTFPLYLLNFLGLWSWICKKWFPYFLVRFTVIYNEQMASKKRELFSNLQEFAGPSGKLSLLEVGCGTGANFKFYPPGCRVLRPGGAFYFMEHVAAECSTWNYFWQQVLDPAWHLLFDGCNLTRESWKALERASFSKLKLQHIQAPLSWELVRPHIYGYAVK

SEQ ID NO: 7672 - protein, 463 aa, Homo sapiens
MSGGTPYIGSKISLISKAEIRYEGILYTIDTENSTVALAKVRSFGTEDRPTDRPIPPRDEVFEYIIFRGSDIKDLTVCEPPKPQCSLPQDPAIVQSSLGSSTSSFQSMGSYGPFGRMPTYSQFSPSSLVGQQFGAVGVAGSSLTSFGTETSNSGTLPQSSAVGSAFTQDTRSLKTQLSQGRSSPQLDPLRKSPTMEQAVQTASAHLPAPAAVGRRSPVSTRPLPSASQKAGENQEHRRAEVHKVSRPENEQLRNDNKRQVAPGAPSAPRRGRGGHRGGRGRFGIRRDGPMKFEKDFDFESANAQFNKEEIDREFHNKLKLKEDKLEKQEKPVNGEDKGDSGVDTQNSEGNADEEDPLGPNCYYDKTKSFFDNISCDDNRERRPTWAEERRLNAETFGIPLRPNRGRGGYRGRGGLGFRGGRGRGGGRGGTFTAPRGFRGGFRGGRGGREFADFEYRKTTAFGP

SEQ ID NO: 7673 - protein, 929 aa, Homo sapiens
MAEVEAVQLKEEGNRHFQLQDYKAATNSYSQALKLTKDKALLATLYRNRAACGLKTESYVQAASDASRAIDINSSDIKALYRRCQALEHLGKLDQAFKDVQRCATLEPRNQNFQEMLRRLNTSIQEKLRVQFSTDSRVQKMFEILLDENSEADKREKAANNLIVLGREEAGAEKIFQNNGVALLLQLLDTKKPELVLAAVRTLSGMCSGHQARATVILHAVRIDRICSLMAVENEEMSLAVCNLLQAIIDSLSGEDKREHRGKEEALVLDTKKDLKQITSHLLDMLVSKKVSGQGRDQALNLLNKNVPRKDLAIHDNSRTIYVVDNGLRKILKVVGQVPDLPSCLPLTDNTRMLASILINKLYDDLRCDPERDHFRKICEEYITGKFDPQDMDKNLNAIQTVSGILQGPFDLGNQLLGLKGVMEMMVALCGSERETDQLVAVEALIHASTKLSRATFIITNGVSLLKQIYKTTKNEKIKIRTLVGLCKLGSAGGTDYGLRQFAEGSTEKLAKQCRKWLCNMSIDTRTRRWAVEGLAYLTLDADVKDDFVQDVPALQAMFELAKTSDKTILYSVATTLVNCTNSYDVKEVIPELVQLAKFSKQHVPEEHPKDKKDFIDMRVKRLLKAGVISALACMVKADSAILTDQTKELLARVFLALCDNPKDRGTIVAQGGGKALIPLALEGTDVGKVKAAHALAKIAAVSNPDIAFPGERVYEVVRPLVRLLDTQRDGLQNYEALLGLTNLSGRSDKLRQKIFKERALPDIENYMFENHDQLRQAATECMCNMVLHKEVQERFLADGNDRLKLVVLLCGEDDDKVQNAAAGALAMLTAAHKKLCLKMTQVTTQWLEILQRLCLHDQLSVQHRGLVIAYNLLAADAELAKKLVESELLEILTVVGKQEPDEKKAEVVQTARECLIKCMDYGFIKPVS

SEQ ID NO: 7674 - protein, 81 aa, Homo sapiens
MSHYGSYYGGLGYSCGGFGGLGYGYGCGCGSFCRRGSGCGYGGYGYGSGFGGYGYGSGFGGYGYGCCRPSYNGGYGFSGFY

SEQ ID NO: 7675 - protein, 49 aa, Homo sapiens
MEVPRLDHALNSPTSPCEEVIKNLSLEAIQLCDRDVVFEELTSKQTRKG

SEQ ID NO: 7676 - protein, 165 aa, Homo sapiens
MSRYLRPPNTSLFVRNVADDTRSEDLRREFGRYGPIVDVYVPLDFYTRRPRGFAYVQFEDVRDAEDALHNLDRKWICGRQIEIQFAQGDRKTPNQMKAKEGRNVYSSSRYDDYDRYRRSRSRSYERRRSRSRSFDYNYRRSYSPRKPNCSWNTQYSSAYYTSRKI

SEQ ID NO: 7677 - protein, 600 aa, Homo sapiens; identical to SEQ ID NO: 6614

SEQ ID NO: 7678 - protein, 154 aa, Homo sapiens
MVSSAQMGFNLQALLEQLSQDELSKFKYLITTFSLAHELQKIPHKEVDKADGKQLVEILTTHCDSYWVEMASLQVFEKMHRMDLSERAKDEVREAALKSFNKRKPLSLGITRKERPPLDVDEMLERFKTEAQAFTETKGNVICLGKEVFKGKKP

SEQ ID NO: 7679 - protein, 157 aa, Homo sapiens; identical to SEQ ID NO: 7296

SEQ ID NO: 7680 - protein, 115 aa, Homo sapiens; identical to SEQ ID NO: 7276

SEQ ID NO: 7681 - protein, 143 aa, Homo sapiens
VRELEAELDAEQKKHAEALKGVRKHERRVKELAYQVGDRVSLGSGPGAGPAQASPESPLPAQAEEDRKNLARMQDLVDKLQSKVKSYKRQFEEAEQQANTNLAKYRKAQHELDDAEERADMAETQANKLRARTRDALGPKHKE

SEQ ID NO: 7682 - protein, 275 aa, Homo sapiens; identical to SEQ ID NO: 5785

SEQ ID NO: 7683 - protein, 112 aa, Homo sapiens
  VARIANT 1: note = X can be any amino acid
XCARTAGGCLGCLSGQCCCRLCPLTLPATRSLCPGRVVWARRRWWPSWLAWRCLWCTTRPPACMENTDAFLFLFSFTDRASFEDLPGQLARIAGEAPGVVRMVIGSKFDQYM

SEQ ID NO: 7684 - protein, 1109 aa, Homo sapiens
MGTGDFICISMTGGAPWGFRLQGGKEQKQPLQVAKIRNQSKASGSGLCEGDEVVSINGNPCADLTYPEVIKLMESITDSLQMLIKRPSSGISEALISENENKNLEHLTHGGYVESTTLQIRPATKTQCTEFFLAPVKTEVPLAENQRSGPDCAGSLKEETGPSYQRAPQMPDSQRGRVAEELILREKVEAVQPGPVVELQLSLSQERHKGASGPLVALPGAEKSKSPDPDPNLSHDRIVHINSIPTNEKADPFLRSSKIIQISSGRELRVIQESEAGDAGLPRVEVILDCSDRQKTEGCRLQAGKECVDSPVEGGQSEAPPSLVSFAVSSEGTEQGEDPRSEKDHSRPHKHRARHARLRRSESLSEKQVKEAKSKCKSIALLLTDAPNPNSKGVLMFKKRRRRARKYTLVSYGTGELEREADEEEEGDKEDTCEVAFLGASESEVDEELLSDVDDNTQVVNFDWDSGLVDIEKKLNRGDKMEMLPDTTGKGALMFAKRRERMDQITAQKEEDKVGGTPSREQDAAQTDGLRTTTSYQRKEEESVRTQSSVSKSYIEVSHGLGHVPQQNGFSGTSETANIQRMVPMNRTAKPFPGSVNQPATPFSPTRNMTSPIADFPAPPPYSAVTPPPDAFSRGVSSPIAGPAQPPPWPQPAPWSQPAFYDSSERIASRDERISVPAKRTGILQEAKRRSTTKPMFTFKEPKVSPNPELLSLLQNSEGKRGTGAGGDSGPEEDYLSLGAEACNFMQSSSAKQKTPPPVAPKPAVKSSSSQPVTPVSPVWSPGVAPTQPPAFPTSNPSKGTVVSSIKIAQPSYPPARPASTLNVAGPFKGPQAAVASQNYTPKPTVSTPTVNAVQPGAVGPSNELPGMSGRGAQLFAKRQSRMEKYVVDSDTVQAHAARAQSPTPSLPASWKYSSNVRAPPPVAYNPIHSPSYPLAALKSQPSAAQPSKMGKKKGKKPLNALDVMKHQPYQLNASLFTFQPPDAKDGLPQKSSVKVNSALAMKQALPPRPVNAASPTNVQASSVYSVPAYTSPPSFFAEASSPVSASPVPVGIPTSPKQESASSSYFVAPRPKFSAKKSGVTIQVKCKSGIHSQDIIRTYFPAYLSSST

SEQ ID NO: 7685 - protein, 517 aa, Homo sapiens; identical to SEQ ID NO: 5333

SEQ ID NO: 7686 - protein, 115 aa, Homo sapiens; identical to SEQ ID NO: 7276

SEQ ID NO: 7687 - protein, 337 aa, Homo sapiens
MELKTLWENKLMQSRAVDGFHSEEQQLLLQVQQQHQPQQQQHHHHHHHQQAQPQQTVPQQAQTQQVLIPASQQATAPQVIVPDSKLIQHMNASNMSAAATAATLALPAGVTPVQQILTNSGQLLQVVRAANGAQYIFQPQQSVVLQQQVIPQMQPGGVQAPVIQQVLAPLPGGISPQTGVIIQPQQILFTGNKTQVIPTTVAAPTPAQAQITATGQQQPQAQPAQTQAPLVLQVDGTGDTSSEEDEDEEEDYDDDEEEDKEKDGAEDGQVEEEPLNSEDDVSDEEGQELFDTENVVVCQYDKIHRSKNKWKFHLKDGIMNLNGRDYIFSKAIGDAEW

SEQ ID NO: 7688 - protein, 1002 aa, Homo sapiens
MSQWTPEYNELYTLKVDMKSEIPSDAPKTQESLKGILLHPEPIGAAKSFPAGVEMINSKVGNEFSHLCDDSQKQEKEMNGNQQEQEKSLVVRKKRKSQQAGPSYVQNCVKENQGILGLRQHLGTPSDEDNDSSFSDCLSSPSSSLHFGDSDTVTSDEDKEVSVRHSQTILNAKSRSHSARSHKWAAETESVSGLLMKRPCLHGSSLRRLPCRKRFVKNNSSQRTQKQKERILMQRKKREVLARRKYALLPSSSSSSENDLSSESSSSSSTEGEEDLFVSASENHQNNPAVPSGSIDEDVVVIEASSTPQVTANEEINVTSTDSEVEIVTVGESYRSRSTLGHSRSHWSQGSSSHASRPQEPRNRSRISTVIQPLRQNAAEVVDLTVDEDEPTVVPTTSARMESQATSASINNSNPSTSEQASDTASAVTSSQPSTVSETSATLTSNSTTGTSIGDDSRRTTSSAVTETGPPAMPRLPSCCPQHSPCGGSSQNHHALGHPHTSCFQQHGHHFQHHHHHHHTPHPAVPVSPSFSDPACPVERPPQVQAPCGANSSSGTSYHEQQALPVDLSNSGIRSHGSGSFHGASAFDPCCPVSSSRAAIFGHQAAAAAPSQPLSSIDGYGSSMVAQPQPQPPPQPSLSSCRHYMPPPYASLTRPLHHQASACPHSHGNPPPQTQPPPQVDYVIPHPVHAFHSQISSHATSHPVAPPPPTHLASTAAPIPQHLPPTHQPISHHIPATAPPAQRLHPHEVMQRMEVQRRRMMQHPTGLFVFCVSRRAHERPPPHPHRMHPNYGHGHHIHVPQTMSSHPRQAPERSAWELGIEAGVTAATYTPGALHPHLAHYHAPPRLHHLQLGALPLMVPDMAGYPHIRYISSGLDGTSFRGPFRGNFEELIHLEERLGNVNRGASQGTIERCTYPHKYKKVTTDWFSQRKLHCKQDGEEGTEEDTEEKCTICLSILEEGEDVRRLPCMHLFHQVCVDQWLITNKKCPICRVDIEAQLPSES

SEQ ID NO: 7689 - protein, 1101 aa, Homo sapiens
MAEKEARRKFKQIVTAVYFCHCRNIVHRDLKAENLLLDANLNIKIADFGFSNLFTPGQLLKTWCGSPPYAAPELFEGKEYDGPKVDIWSLGVVLYVLVCGALPFDGSTLQNLRARVLSGKFRIPFFMSTECEHLIRHMLVLDPNKRLSMEQICKHKWMKLGDADPNFDRLIAECQQLKEERQVDPLNEDVLLAMEDMGLDKEQTLQSLRSDAYDHYSAIYSLLCDRHKRHKTLRLGALPSMPRALAFQAPVNIQAEQAGTAMNISVPQVQLINPENQIVEPDGTLNLDSDEGEEPSPEALVRYLSMRRHTVGVADAAEVMEDLQKLLPGFPGVNPQAPFLQVAPNVNFMHNLLPMQNLQPTGQLEYKEQSLLQPPTLQLLNGMGPLGRRASDGGANIQLHAQQLLKRPRGPSPLVTMTPAVPAVTPVDEESSDGEPDQEAVQSSTYKDSNTLHLPTERFSPVRRFSDGAASIQAFKAHLEKMGNNSSIKQLQQECEQLQKMYGGQIDERTLEKTQQQHMLYQQEQHHQILQQQIQDSICPPQPSPPLQAACENQPALLTHQLQRLRIQPSSPPPNHPNNHLFRQPSNSPPPMSSAMIQPHGAASSSQFQGLPSRSAIFQQQPENCSSPPNVALTCLGMQQPAQSQQVTIQVQEPVDMLSNMPGTAAGSSGRGISISPSAGQMQMQHRTNLMATLSYGHRPLSKQLSADSAEAHSAHQQPPHYTTSALQQALLSPTPPDYTRHQQVPHILQGLLSPRHSLTGHSDIRLPPTEFAQLIKRQQQQRQQQQQQQQQQEYQELFRHMNQGDAGSLAPSLGGQSMTERQALSYQNADSYHHHTSPQHLLQIRAQECVSQASSPTPPHGYAHQPALMHSESMEEDCSCEGAKDGFQDSKSSSTLTKGCHDSPLLLSTGGPGDPESLLGTVSHAQELGIHPYGHQPTAAFSKNKVPSREPVIGNCMDRSSPGQAVELPDHNGLGYPARPSVHEHHRPRALQRHHTIQNSDDAYVQLDNLPGMSLVAGKALSSARMSDAVLSQSSLMGSQQFQDGENEECGASLGGHEHPDLSDGSQHLNSSCYPSTCITDILLSYKHPEVSFSMEQAGV

SEQ ID NO: 7690 - protein, 486 aa, Homo sapiens
MTLMVLTFSSYILDFINVLSYDLHGSWERFTGHNSPLFSLPEDPKSSAYAMNYWRKLGAPSEKLIMGIPTYGRTFRLLKASKNGLQARAIGPASPGKYTKQEGFLAYFEICSFVWGAKKHWIDYQYVPYANKGKEWVGYDNAISFSYKAWFIRREHFGGAMVWTLDMDDVRGTFCGTGPFPLVYVLNDILVRAEFSSTSLPQFWLSSAVNSSSTDPERLAVTTAWTTDSKILPPGGEAGVTEIHGKCENMTITPRGTTVTPTKETVSLGKHTVALGEKTEITGAMTMTSVGHQSMTPGEKALTPVGHQSVTTGQKTLTSVGYQSVTPGEKTLTPVGHQSVTPVSHQSVSPGGTTMTPVHFQTETLRQNTVAPRRKAVAREKVTVPSRNISVTPEGQTMPLRGENLTSEVGTHPRMGNLGLQMEAENRMMLSSSPVIQLPEQTPLAFDNRFVPIYGNHSSVNSVTPQTSPLSLKKEIPENSAVDEEA

SEQ ID NO: 7691 - protein, 338 aa, Homo sapiens; identical to SEQ ID NO: 4756

SEQ ID NO: 7692 - protein, 631 aa, Homo sapiens; identical to SEQ ID NO: 5339

SEQ ID NO: 7693 - protein, 596 aa, Homo sapiens
MSNQQEKYEAQNIVNSTEESDDAFDTVTIPVPSEEPQESDQTEEHESGIEQFSESHAIHVEEQSDQSFSSLEPDNEQLMEEVISPRQVSYTPQHHEKQYAMQRPNDDSLAFLDKIKSVKESLQESVEDSLATVKVVLIPVGQEIVIPFKVDTILKYLKDHFSHLLGIPHSVLQIRYSGKILKNNETLVQHGVKPQEIVQVEIFSTNPDLYPVRRIDGLTDVSQIITVTVQTGLDQYQQVPVEIVKSDFHKPFLGGFRHKVTGVEYHNAGTQTVPKRIPERLSIFCRDTQTVFQKKNLQQTTNTTSTQMTNIGVYVSNMTDKLVTPGKYFSAAEYHAQRLKAVIVIQTYYRQWHAKIFVENLRRQKSLRLEWETQQELRKIREKEEWIKLDYHRRHNPKTNEDFEFLYNALEFWRQEELTRINQSFTGAERKAALCELLEKETQIIASIGRHRYIAYMANQEAAIQAFLDKCSAPKIWRTPNGKTIEMDTQFTIRARELQNIYKCIMLKNISQDERLDVLLTLKHTVKEHECKLTQEILELIDREVDLMMRGVKHHNLEGLRKRIATLFFHYIKTPLFNPEVAKYLKMGGEYLSMAL

SEQ ID NO: 7694 - protein, 433 aa, Homo sapiens
MVQDGTFKTRDSTWTCESTRMAAAPPSYCFVAFPPRAKDGLVVFGKNSARPRDEVQEVVYFSAADHEPESKVECTYISIDQVAAYAIMISRPAWLWGAEMGANEHGVCIANEAINTREPAAEIEALLGMDLVRLGLERGETAKEALDVIVSLLEEHGQGGNYFEDANSCHSFQSAYLIVDRDEAWVLETIGKYWAAEKVTEGVRCICSQLSLTTKMDAEHPELRSYAQSQGWWTGEGEFNFSEVFSPVEDHLDCGAGKDSLEKQEESITVQTMMNTLRDKASGVCIDSEFFLTTASGVSVLPQNRSSPCIHYFTGTPDPSRSIFKPFIFVDDVKLVPKTQSPCFGDDDPAKKEPRFQEKPDRRHELYKAHEWARAIIESDQEQGRKLRSTMLELEKQGLEAMEEILTSSEPLDPAEVGDLFYDCVDTEIKFFK

SEQ ID NO: 7695 - protein, 439 aa, Homo sapiens
MAWPCITRACCIARFWNQLDKADIAVPLVFTKYSEATEHPGAPPQPPPPQQQAQPALAPPSARAVAIETQPAQGELDAVARATGPAPGPTGEREPAAGPGRSGPGPGLGSGSTSGPADSVMRQDYRAWKVQRPEPSCRPRSEYQPSDAPFERETQYQKDFRAWPLPRRGDHPWIPKPVQISAASQASAPILGAPKRRPQSQERWPVQAAAEAREQEAAPGGAGGLAAGKASGADERDTRRKAGPAWIVRRAEGLGHEQTPLPAAQAQVQATGPEAGRGRAAADALNRQIREEVASAVSSSYRNEFRAWTDIKPVKPIKAKPQYKPPDDKMVHETSYSAQFKGEASKPTTADNKVIDRRRIRSLYSEPFKEPPKVEKPSVQSSKPKKTSASHKPTRKAKDKQAVSGQAAKKKSAEGPSTTKPDDKEQSKEMNNKLAEAKE

SEQ ID NO: 7696 - protein, 270 aa, Homo sapiens
MGGCFSKPKPVELKIEVVLPEKERGKEELSASGKGSPRAYQGNGTARHFHTEERLSTPHPYPSPQDCVEAAVCHVKDLENGQMREVELGWGKVLLVKDNGEFHALGHKCPHYGAPLVKGVLSRGRVRCPWHGACFNISTGDLEDFPGLDSLHKFQVKIEKEKVYVRASKQALQLQRRTKVMAKCISPSAGYSSSTNVLIVGAGAAGLVCAETLRQEGFSDRIVLCTLDRHLPYDRPKLSKSLDTQPEQLALRPKEFFRAYGIEVLTEAQV

SEQ ID NO: 7697 - protein, 122 aa, Homo sapiens; identical to SEQ ID NO: 7564

SEQ ID NO: 7698 - protein, 422 aa, Homo sapiens
MTPSIPSIRRLGSGYFSSNGKLEEVKTPKNPVKRKDLLRHDPDLHMHQGYDKYDVSEFCSYIKSSSSLGNATSDEDPNTNIMNINENKNIPKAKNKSESENEPKAGTDSPVSCASVTEERVASDSPKPALTLQQGQEFSAGGQNAENLCQFFKISPDLNIKCERKDDFLGAAEGKLQCNRLMPNSQKDCHCLGDVLIENTKESKSQSEDLGRKPMESSSVVSCRDRKDRRRSMCYSDGRSLHLEKNGNHTPSSSVGSSVEISLENSELFKDLSDAIEQTFQRRNSETKVRRSTRLQKDLENEGLVWISLPLPSTSQKAKRRTICTFDSSGFESMSPIKETVSSRQKPQMAPPVSDPENSQGPAAGSSDEPGKRRKSFCISTLANTKATSQFKGYRRRSSLNGKGESSLTALERIEHNGERKQ

SEQ ID NO: 7699 - protein, 1111 aa, Homo sapiens
MVRERKCILCHIVYSSKKEMDEHMRSMLHHRELENLKGRFGIEMVPLVQNEQEALDLDGEPDLSSLEGFQWEGVSISSSPGLARKRSLSESSVIMDRAPSVYSFFSEEGTGKENEPQQMVSPSNSLRAGQSQKATMHLKQEVTPRAASLRTGERAENVATQRRHSAQLSSDHIIPLMHLAKDLNSQERSIPPSENQNSQESNGEGNCLSSSASSALAISSLADAATDSSCTSGAEQNDGQSIRKKRRATGDGSSPELPSLERKNKRRKIKGKKERSQVDQLLNISLREEELSKSLQCMDNNLLQARAALQTAYVEVQRLLMLKQQITMEMSALRTHRIQILQGLQETYEPSEHPDQVPCSLTRERRNSRSQTSIDAALLPTPFFPLFLEPPSSHVSPSPTGASLQITTSPTFQTHGSVPAPDSSVQIKQEPMSPEQDENVNAVPPSSACNVSKELLEANREISDSCPVYPVITARLSLPESTESFHEPSQELKFSVEQRNTRNRENSPSSQSAGLSSINKEGEEPTKGNSGSEACTSSFLRLSFASETPLEKEPHSPADQPEQQAESTLTSAETRGSKKKKKLRKKKSLRAAHVPENSDTEQDVLTVKPVRKVKAGKLIKGGKVTTSTWEDSRTGREQESVRDEPDSDSSLEVLEIPNPQLEVVAIDSSESGEEKPDSPSKKDIWNSTEQNPLETSRSGCDEVSSTSEIGTRYKDGIPVSVAETQTVISSIKGSKNSSEISSEPGDDDEPTEGSFEGHQAAVNAIQIFGNLLYTCSADKTVRVYNLVSRKCIGVFEGHTSKVNCLLVTQTSGKNAALYTGSSDHTIRCYNVKSRECVEQLQLEDRVLCLHSRWRILYAGLANGTVVTFNIKNNKRLEIFECHGPRAVSCLATAQEGARKLLVVGSYDCTISVRDARNGLLLRTLEGHSKTILCMKVVNDLVFSGSSDQSVHAHNIHTGELVRIYKGHNHAVTVVNILGKVMVTACLDKFVRVYELQSHDRLQVYGGHKDMIMCMTIHKSMIYTGCYDGSIQAVRLNLMQNYRCWWHGCSLIFGVVDHLKQHLLTDHTNPNFQTLKCRWKNCDAFFTARKGSKQDAAGHIERHAEDDSKIDS

SEQ ID NO: 7700 - protein, 117 aa, Homo sapiens
MYSPIIYQALCEHVQTQMSLMNDLTSKNIPNGIPAVPCHAPSHSESQATPHSSYGLCTSTPVWSLQRPPCPPKVHSEVQTDGNSQFASQGKTVSATCTDVLRNSFNTSPGVPCSLPK

SEQ ID NO: 7701 - protein, 62 aa, Homo sapiens
MAALRPLVKPKIVKKRTKKFIRHQSDRYVKIKRNWRKPRGIDNRVRRRFKGQILMPNIGYGS

SEQ ID NO: 7702 - protein, 136 aa, Homo sapiens
MSASCDGCVGSRPPVHLASGYSLADLLVLEMGMGTQCWTEDQRRWSSLWPWSHLSSVLLADKEGGPPAVDEVLDEAVPEYRAPGRKSLLEIRQLDPDDRSLAKYKRVLLGPLPPAVDPSLPNVQVTRLTLLSEQAP

SEQ ID NO: 7703 - protein, 600 aa, Homo sapiens
MPEIRVTPLGAGQDVGRSCILVSIAGKNVMLDCGMHMGFNDDRRFPDFSYITQNGRLTDFLDCVIISHFHLDHCGALPYFSEMVGYDGPIYMTHPTQAICPILLEDYRKIAVDKKGEANFFTSQMIKDCMKKVVAVHLHQTVQVDDELEIKAYYAGHVLGAAMFQIKVGSESVVYTGDYNMTPDRHLGAAWIDKCRPNLLITESTYATTIRDSKRCRERDFLKKVHETVERGGKVLIPVFALGRAQELCILLETFWERMNLKVPIYFSTGLTEKANHYYKLFIPWTNQKIRKTFVQRNMFEFKHIKAFDRAFADNPGPMVVFATPGMLHAGQSLQIFRKWAGNEKNMVIMPGYCVQGTVGHKILSGQRKLEMEGRQVLEVKMQVEYMSFSAHADAKGIMQLVGQAEPESVLLVHGEAKKMEFLKQKIEQELRVNCYMPANGETVTLPTSPSIPVGISLGLLKREMAQGLLPEAKKPRLLHGTLIMKDSNFRLVSSEQALKELGLAEHQLRFTCRVHLHDTRKEQETALRVYSHLKSVLKDHCVQHLPDGSVTVESVLLQAAAPSEDPGTKVLLVSWTYQDEELGSFLTSLLKKGLPQAPS

SEQ ID NO: 7704 - protein, 257 aa, Homo sapiens
MLEYALKQERAKYHKLKFGTDLNQGEKKADVSEQVSNGPVESVTLENSPLVWKEGRQLLRQYLEEVGYTDTILDMRSKRVRSLLGRSLELNGAVEPSEGAPRAPPGPAGLSGGESLLVKQIEEQIKRNAAGKDGKERLGGSVLGQIPFLQNCEDEDSDEDDELDSVQHKKQRVKLPSKALVPEMEDEDEEDDSEDAINEFDFLGSGEDGEGAPDPRRCTVDGSPHELGPELHSPTEWQGALSVGKASPMPDWVGTAG

SEQ ID NO: 7705 - protein, 126 aa, Homo sapiens
MPGVKLTTQAYCKMVLHGAKYPHCAVNGLLVAEKQKPRKEHLPLGGPGAHHTLFVDCIPLFHGTLALAPMLEVALTLIDSWCKDHSYVIAGYYQANERVKDASPNQVAEKVASRIAEGFSDTALIM

SEQ ID NO: 7706 - protein, 149 aa, Homo sapiens
VRELEAELDAEQKKHAEALKGVRKHERRVKELAYQVGDRVSLGSGPGAGPAQASPESPLPAQAEEDRKNLARMQDLVDKLQSKVKSYKRQFEEAEQQANTNLAKYRKAQHELDDAEERADMAETQANKLRARTRDALGPKLSLSPQHKE

SEQ ID NO: 7707 - protein, 782 aa, Homo sapiens; identical to SEQ ID NO: 5054

SEQ ID NO: 7708 - protein, 164 aa, Homo sapiens
MMSEVEEAMQCVEELNAQGLLHVFVRVGVESTLERSQITRDHMGQLLYQLVQSEKLSKQDFFKGFSETLELADDMAIDIPHIWLYLAELVTPMLKEGGISMRELTIEFSKPLLPVGRAGVLLSEILHLLCKQMSHKKVGALWREADLSWKDFLPEGEDVHNFLL

SEQ ID NO: 7709 - protein, 122 aa, Homo sapiens; identical to SEQ ID NO: 7564

SEQ ID NO: 7710 - protein, 1114 aa, Homo sapiens
MACRRRYFVEGEAPSSETGTSLDSPSAYPQGPLVPGSSLSPDHYEHTSVGAYGLYSGPPGQQQRTRRPKLQHSTSILRKQAEEEAIKRSRSLSESYELSSDLQDKQVEMLERKYGGRLVTRHAARTIQTAFRQYQMNKNFERLRSSMSENRMSRRIVLSNMRMQFSFEGPEKVHSSYFEGKQVSVTNDGSQLGALVSPECGDLSEPTTLKSPAPSSDFADAITELEDAFSRQVKSLAESIDDALNCRSLHTEEAPALDAARARDTEPQTALHGMDHRKLDEMTASYSDVTLYIDEEELSPPLPLSQAGDRPSSTESDLRLRAGGAAPDYWALAHKEDKADTDTSCRSTPSLERQEQRLRVEHLPLLTIEPPSDSSVDLSDRSERGSLKRQSAYERSLGGQQGSPKHGPHSGAPKSLPREEPELRPRPPRPLDSHLAINGSANRQSKSESDYSDGDNDSINSTSNSNDTINCSSESSSRDSLREQTLSKQTYHKEARNSWDSPAFSNDVIRKRHYRIGLNLFNKKPEKGVQYLIERGFVPDTPVGVAHFLLQRKGLSRQMIGEFLGNRQKQFNRDVLDCVVDEMDFSTMELDEALRKFQAHIRVQGEAQKVERLIEAFSQRYCICNPGVVRQFRNPDTIFILAFAIILLNTDMYSPNVKPERKMKLEDFIKNLRGVDDGEDIPREMLMGIYERIRKRELKTNEDHVSQVQKVEKLIVGKKPIGSLHPGLGCVLSLPHRRLVCYCRLFEVPDPNKPQKLGLHQREIFLFNDLLVVTKIFQKKKNSVTYSFRQSFSLYGMQVLLFENQYYPNGIRLTSSVPGADIKVLINFNAPNPQDRKKFTDDLRESIAEVQEMEKHRIESELEKQKGVVRPSMSQCSSLKKESGNGTLSRACLDDSYASGEGLKRSALSSSLRDLSEAGKRGRRSSAGSLESNVEGSIISSPHMRRRATSTRECPSRPHQTMPNSSSLLGSLFGSKRGKPPPQAHLPSAPALPPPHPPVVLPHLQHSVAGHHLGPPEGLPQAAMHGHHTQYCHMQNPPPYHHHHHHHPPQHIQHAHQYHHGPHGGHPAYGAHAHGHPPLPSAHVGHTVHHHGQPPAPPPPTSSKAKPSGISTIV

SEQ ID NO: 7711 - protein, 300 aa, Homo sapiens
MAEEVSTLMKATVLMRQPGRVQEIVGALRKGGGDRLQVISDFDMTLSRFAYNGKRCPSSYNILDNSKIISEECRKELTALLHHYYPIEIDPHRTVKEKLPHMVEWWTKAHNLLCQQKIQKFQIAQVVRESNAMLREGYKTFFNTLYHNNIPLFIFSAGIGDILEEIIRQMKVFHPNIHIVSNYMDFNEDGFLQGFKGQLIHTYNKNSSACENSGYFQQLEGKTNVILLGDSIGDLTMADGVPGVQNILKIGFLNDKVEERRERYMDSYDIVLEKDETLDVVNGLLQHILCQGVQLEMQGP

SEQ ID NO: 7712 - protein, 277 aa, Homo sapiens
MFPGATTPLPKAAAYPGVYGSNGRTPQPAYLSEAMKLTQSEQAHLSLELQRDSHMKQLLLIQERWKRAQREERLKAQQNTDKDAAAHLQTSHKPSAEDAEGQSPLSQKYSPSTEKCLPEIQGIFDRDPDTLLYLLQQKSEPAEPCIGSKAPKDDKTIIEEQATKIADLKRHVEFLVAENERLRKENKQLKAEKARLLKGPIEKELDVDADFVETSELWSLPPHAETATASSTWQKFAANTGKAKDIPIPNLPPLDFPSPELPLMELSEDILKGFMNN

SEQ ID NO: 7713 - protein, 45 aa, Homo sapiens
MSPQKRVKNVQAQNRTSQGSSSFQTTLSAWKVKQDPSNSKNISKH

SEQ ID NO: 7714 - protein, 272 aa, Homo sapiens
MPGDHRRIRGPEESQPPQLYAADEEEAPGTRDPTRLRPVYARAGLLSQAKGSAYLEAGGTKVLCAVSGPRQAEGGERGGGPAGAGGEAPAALRGRLLCDFRRAPFAGRRRRAPPGGCEERELALALQEALEPAVRLGRYPRAQLEVSALLLEDGGSALAAALTAAALALADAGVEMYDLVVGCGLSLAPGPAPTWLLDPTRLEEERAAAGLTVALMPVLNQVAGLLGSGEGGLTESWAEAVRLGLEGCQRLYPVLQQSLVRAARRRGAAAQP

SEQ ID NO: 7715 - protein, 142 aa, Homo sapiens
MASGNARIGKPAPDFKATAVVDGAFKEVKLSDYKGKYVVLFFYPLDFTFVCPTEIIAFSNRAEDFRKLGCEVLGVSVDSQFTHLAWYEQGPKREVAAKLTPSGPSSVASWPLLNLWNLRFPIVKIMETLPPKSLRMMTVISI

SEQ ID NO: 7716 - protein, 378 aa, Homo sapiens; identical to SEQ ID NO: 6787

SEQ ID NO: 7717 - protein, 107 aa, Homo sapiens
  VARIANT 1: note = X can be any amino acid
XIHEQWEKANVSSPHREFPPATAREVDPLRIPPHHPHTSRQPPWPRRGGMIVDPLRSGFPRALIDPSSGLPNRLPPGAVPPGARFDPFGPIGTSPPGPNPDHLPPPG

SEQ ID NO: 7718 - protein, 66 aa, Homo sapiens
MAAATGDPGLSKLQFAPFSSALDVGFWHELTQKKLNEYRLDEAPKDIKGYYYNGDSAGLPARLTLE

SEQ ID NO: 7719 - protein, 704 aa, Homo sapiens
MLPTASSKRRTFAARYFTRSKSLVMGEQSRSPGRMPCPHRLGPVLKAGWLKKQRSIMKNWQQRWFVLRGDQLFYYKDKDEIKPQGFISLQGTQVTELPPGPEDPGKHLFEISPGGAGEREKVPANPEALLLMASSQRDMEDWVQAIRRVIWAPLGGGIFGQRLEETVHHERKYGPRLAPLLVEQCVDFIRERGLTEEGLFRMPGQANLVRDLQDSFDCGEKPLFDSTTDVHTVASLLKLYLRELPEPVVPFARYEDFLSCAQLLTKDEGEGTLELAKQVSNLPQANYNLLRYICKFLDEVQAYSNVNKMSVQNLATVFGPNILRPQVEDPVTIMEGTSLVQHLMTVLIRKHSQLFTAPVPEGPTSPRGGLQCAVGWGSEEVTRDSQGEPGGPGLPAHRTSSLDGAAVAVLSRTAPTGPGSRCSPGKKVQTLPSWKSSFRQPRSLSGSPKGGGSSLEVPIISSGGNWLMNGLSSLRGHRRASSGDRLKDSGSVQRLSTYDNVPAPGLVPGIPSVASMAWSGASSSESSVGGSLSSCTACRASDSSARSSLHTDWALEPSPLPSSSEDPKSLDLDHSMDEAGAGASNSEPSEPDSPTREHARRSEALQGLVTELRAELCRQRTEYERSVKRIEEGSADLRKRMSRLEEELDQEKKKYIMLEIKLRNSERAREDAERRNQLLQREMEEFFSTLGSLTVGAKGARAPK

SEQ ID NO: 7720 - protein, 209 aa, Homo sapiens
MISNYRNGSELVCFNSGVGCFLIGCDWAFTVLVNTFFSFLRRKTDFFIGGEEGMAEKLITQTFSHHNQLAQKTRREKRARQEAERREKAERAARLAKEAKSETSGPQIKELTDEEAERLQLEIDQKKDAENHEAQLKNGSLDSPGKQDTEEDEEEDEKDKGKLKPNLGNGADLPNYRWTQTLSELDLAVPFCVNFRLKGKDMVVDIQRR

SEQ ID NO: 7721 - protein, 102 aa, Homo sapiens; identical to SEQ ID NO: 7483

SEQ ID NO: 7722 - protein, 90 aa, Homo sapiens
MAMAPSPSLVQVYTSPAAVAVWEWQDGLGTWHPYSATVCSFIEQQFVQQKGQRFGLGSLAHSIPLGQADPSLAPYIIDLPSWTQFRQDTG

SEQ ID NO: 7723 - protein, 68 aa, Homo sapiens
MDANSKDKPPETKESAMNNAGNASFILGTGKIVTPQKHAELPPNPCTPDTFKSPLNFSTVTVEQLGIN

SEQ ID NO: 7724 - protein, 292 aa, Homo sapiens
MDGSFVQHSVRVLQELNKQREKGQYCDATLDVGGLVFKAHWSVLACCSHFFQSLYGDGSGGSVVLPAGFAEIFGLLLDFFYTGHLALTSGNRDQVLLAARELRVPEAVELCQSFKPKTSVGQAAGGQSGLGPPASQNVNSHVKEPAGLEEEEVSRTLGLVPRDQEPRGSHSPQRPQLHSPAQSEGPSSLCGKLKQALKPCPLEDKKPEDCKVPPRPLEAEGAQLQGGSNEWEVVVQVEDDGDGDYMSEPEAVLTRRKSNVIRKPCAAEPALSAGSLAAEPAENRKGTAVPVE

SEQ ID NO: 7725 - protein, 135 aa, Homo sapiens [sequence omitted]

SEQ ID NO: 7726 - protein, 269 aa, Homo sapiens
MKTPVELAVSGMQTLGLQHRCRGGYRVKARTSYVDETLFGSPAGTRPTPPDFDPPWVEKANRTRGVGKEASKALGAKGSCETTPSRGSTPTLTPRKKNKYRPISHTPSYCDESLFGSRSEGASFGAPRMAKGDAAKLRALLWTPPPTPRGSHSPRPREAPLRAIHPAGPSKTEPGPAADSQKLSMGGLHSSRPLKRGLSHSLTHLNVPSTGHPATSAPHTNGPQDLRPSTSGVTFRSPLVTSRARSVSISVPSTPRRGGATQKPKPPWK

SEQ ID NO: 7727 - protein, 279 aa, Homo sapiens
MVDHLANTEINSQRIAAVESCFGASGQPLALPGRVLLGEGVLTKECRKKAKPRIFFLFNDILVYGSIVLNKRKYRSQHIIPLEEVTLELLPETLQAKNRWMIKTAKKSFVVSAASATERQEWISHIEECVRRQLRATGRPPSTEHAAPWIPDKATDICMRCTQTRFSALTRRHHCRKCGFVVCAECSRQRFLLPRLSPKPVRVCSLCYRELAAQQRQEEAEEQGAGSPGQPAHLARPICGASSGDDDDSDEDKEGSRDGDWPSSVEFYASGVAWSAFHS

SEQ ID NO: 7728 - protein, 92 aa, Homo sapiens
  VARIANT 1: note = X can be any amino acid
XRSSTSPCGTSKSPNREWEGKSVAYMPYAEVKRALEQEAQMHNTAARSASPCRLSPREVSKAAPQPDMSAARYSVPPVLQPAPHQVITNLPE

SEQ ID NO: 7729 - protein, 256 aa, Homo sapiens
MSNNLSELDTKIQEKAMKVDMDICRRIDITAKLCDVAQQRNCEDMIQMFQKKLVPSMGGRKRERKAAVEEDTSLSESEGPRQPDGDEEESTALSINEEMQRMLNQLREYDFEDDCDSLTWEETEETLLLWEDFSGYAMAAAEAQGEQQEDSLEKVIKDTESLFKTREKEYQETIDQIELELATAKNDMNRHLHEYMEMCSMKRGLDVQMETCRRLITQSGDRKSPAFTAVPLSDPPPPPSEAEDSDRDVSSDSSMR

SEQ ID NO: 7730 - protein, 539 aa, Homo sapiens; identical to SEQ ID NO: 5502

SEQ ID NO: 7731 - protein, 249 aa, Homo sapiens
MAFMTRKLWDLEQQVKAQTDEILSKDQKIAALEDLVQTLRPHPAEATLQRQEELETMCVQLQRQVREMERFLSDYGLQWVGEPMDQEDSESKTVSEHGERDWMTAKKFWKPGDSLAPPEVDFDRLLASLQDLSELVVEGDTQVTPVPGGARLRTLEPIPLKLYRNGIMMFDGPFQPFYDPSTQRCLRDILDGFFPSELQRLYPNGVPFKVISCSSNHTFGDFEGSGDTQPPQTPPILRGSRCTPWGTPV

SEQ ID NO: 7732 - protein, 918 aa, Homo sapiens
MSEDSEKEDYSDRTISDEDESDEDMFMKFVSEDLHRCALLTADSFGDPFFAATQILLEYQLGRWVPRLREPRDLYGVSSSGPLSPTRWPYHCEVIDEKVQHIDWTPSCPEPVYIPTGLETEPLYPDSKEATVVYLAEDAYKEPCFVYSRVGGNRTPLKQPVDYRDNTLMFEARFESGNLQKVVKVAEYEYQLTVRPDLFTNKHTQWYYFQVTNMRAGIVYRFTIVNFTKPASLYSRGMRPLFYSEKEAKAHHIGWQRIGDQIKYYRNNPGQDGRHYFSLTWTFQFPHNKDTCYFAHCYPYTYTNLQEYLSGINNDPVRSKFCKIRVLCHTLARNMVYILTITTPLKNSDSRKRKAVILTARVHPGETNSSWIMKGFLDYILGNSSDAQLLRDTFVFKVVPMLNPDGVIVGNYRCSLAGRDLNRNYTSLLKESFPSVWYTRNMVHRLMEKREVILYCDLHGHSRKENIFMYGCDGSDRSKTLYLQQRIFPLMLSKNCPDKFSFSACKFNVQKSKEGTGRVVMWKMGIRNSFTMEATFCGSTLGNKRGTHFSTKDLESMGYHFCDSLLDYCDPDRTKYYRCLKELEEMERHITLEKVFEDSDTPVIDITLDVESSSRGSDSSESIDSLTYLLKLTSQKKHLKTKKERNSTIASHQNARGQEVYDRGHLLQRHTQSNSDVKDTRPNEPDDYMVDYFRRQLPNQGLDLHHNLKSKIKECISFQSKKTGINWTDDEKRSYKDKGIVQTQEILQYLLPIVHSTKNMQTTQIKQLFNAANFQIQHQLNPATCRNIKKYSTSWTAPRNHPFVIQGDVMANSSEWVQSKPHRSLESLSPLKGPKKNKHSQIWAIKNEDIKPLSSKWETASSSFGMDANVLKYKSLQAEETNQQSSKHTALHLTKNKDEQANKNDGQPTLYLKFQRES

SEQ ID NO: 7733 - protein, 285 aa, Homo sapiens
MTNAQIILLIDNARMAVDDFNLKYENEHSFKKDLEIEVEGLRRTLDNLTIVTTDLEQEVEGMRKELILMKKHHEQEMEKHHVPSDFNVNVKVDTGPREDLIKVLEDMRQEYELIIKKKHRDLDTWYKEQSAAMSQEAASPATVQSRQGDIHELKRTFQALEIDLQTQYSTKSALENMLSETQSRYSCKLQDMQEIISHYEEELTQLRHELERQNNEYQVLLGIKTHLEKEITTYRRLLEGESEGTREESKSSMKVSATPKIKAITQETINGRLVLCQVNEIQKHA

SEQ ID NO: 7734 - protein, 669 aa, Homo sapiens
MSPCSGGRGELRAACLQPEVPGAPGLSWWPSTAGLRQSQTDLQLSLSIWCGKKMGSYLSVPAYFTSRDLFRCSECQDSLTNWYYEKDGKLYCPKDYWGKFGEFCHGCSLLMTGPFMVAGEFKYHPECFACMSCKVIIEDGDAYALVQHATLYCGKCHNEVVLAPMFERLSTESVQEQLPYSVTLISMPATTEGRRGFSVSVESACSNYATTVQVKEVNRMHISPNNRNAIHPGDRILEINGTPVRTLRVEEVEDAISQTSQTLQLLIEHDPVSQRLDQLRLEARLAPHMQNAGHPHALSTLDTKENLEGTLRRRSLRRSNSISKSPGPSSPKEPLLFSRDISRSESLRCSSSYSQQIFRPCDLIHGEVLGKGFFGQAIKVTHKATGKVMVMKELIRCDEETQKTFLTEVKVMRSLDHPNVLKFIGVLYKDKKLNLLTEYIEGGTLKDFLRSMDPFPWQQKVRFAKGIASGMAYLHSMCIIHRDLNSHNCLIKLDKTVVVADFGLSRLIVEERKRAPMEKATTKKRTLRKNDRKKRYTVVGNPYWMAPEMLNGKSYDETVDIFSFGIVLCEIIGQVYADPDCLAALDFGLNVKLFWEKFVPTDCPPAFFPLAAICCRLEPESRPAFSKLEDSFEALSLYLGELGIPLPAELEELDHTVSMQYGLTRDSPP

SEQ ID NO: 7735 - protein, 152 aa, Homo sapiens
MAHLRGFANQHSRVDPEELFTKLDRIGKGSFGEVYKGIDNHTKEVVAIKIIDLEEAEDEIEDIQQEITVLSQCDSPYITRYFGSYLKSTKLWIIMEYLGGGSALDLLKPGPLEETYIATILREILKGLDYLHSERKIHRDIKAANVLLSEQG

SEQ ID NO: 7736 - protein, 454 aa, Homo sapiens
MAPCRARTGPSTWRSATSSTRRRKGARRHLSALQVLETCVKNCGHRFHVLVASQDFVESVLVRTILPKNNPPTIVHDKVLNLIQSWADAFRSSPDLTGVVTIYEDLRRKGLEFPMTDLDMLSPIHTPQRTVFNSETQSGQDSVGTDSSQQEDSGQHAAPLPAPPILSGDTPIAPTPEQIGKLRSELEMVSGNVRVMSEMLTELVPTQAEPADLELLQELNRTCRAMQQRVLELIPQIANEQLTEELLIVNDNLNNVFLRHERFERFRTGQTTKAPSEAEPAADLIDMGPDPAATGNLSSQLAGMNLGSSSVRAGLQSLEASGRLEDEFDMFALTRGSSLADQRKEVKYEAPQATDGLAGALDARQQSTGAIPVTQACLMEDIEQWLSTDVGNDAEEPKGVTSEEFDKFLEERAKAADRLPNLSSPSAEGPPGPPSGPAPRKKTQEKDDDMLFAL

SEQ ID NO: 7737 - protein, 125 aa, Homo sapiens
MQTSSSRSVHLSEWQKNYFAITSGICTGPKADAYRAQILRIQYAWANSEISQVCATKLFKKYAEKYSAIIDSDNVESGLNNYAENILTLAGSQQTDSDKWQSGLSINNVFKMSSVQKMMQAGKKF

SEQ ID NO: 7738 - protein, 9 aa, Homo sapiens
MSHLQSLLL

SEQ ID NO: 7739 - protein, 89 aa, Homo sapiens; identical to SEQ ID NO: 6950

SEQ ID NO: 7740 - protein, 1243 aa, Homo sapiens
MLIKEYHILLPMSLDEYQVAQLYMIQKKSREESSGEGSGVEILANRPYTDGPGGSGQYTHKVYHVGSHIPGWFRALLPKAALQVEEESWNAYPYTRTRYTCPFVEKFSIEIETYYLPDGGQQPNVFNLSGAERRQRILDTIDIVRDAVAPGEYKAEEDPRLYHSVKTGRGPLSDDWARTAAQTGPLMCAYKLCKVEFRYWGMQAKIEQFIHDVGLRRVMLRAHRQAWCWQDEWTELSMADIRALEEETARMLAQRMAKCNTGSEGSEAQPPGKPSTEARSAASNTGTPDGPEAPPGPDASPDASFGKQWSSSSRSSYSSQHGGAVSPQSLSEWRMQNIARDSENSSEEEFFDAHEGFSDSEEVFPKEMTKWNSNDFIDAFASPVEAEGTPEPGAEAAKGIEDGAQAPRDSEGLDGAGELGAEACAVHALFLILHSGNILDSGPGDANSKQADVQTLSSAFEAVTRIHFPEALGHVALRLVPCPPICAAAYALVSNLSPYSHDGDSLSRSQDHIPLAALPLLATSSSRYQGAVATVIARTNQAYSAFLRSPEGAGFCGQVALIGDGVGGILGFDALCHSANAGTGSRGSSRRGSMNNELLSPEFGPVRDPLADGVEGLGRGSPEPSALPPQRIPSDMASPEPEGSQNSLQAAPATTSSWEPRRASTAFCPPAASSEAPDGPSSTARLDFKVSGFFLFGSPLGLVLALRKTVMPALEAQMRPACEQIYNLFHAADPCASRLEPLLAPKFQAIAPLTVPRYQKFPLGDGSSLLLADTLQTHSSLFLEELEMLVPSTPTSTSGAFWKGSELATDPPAQPAAPSTTSEVVKILERWWGTKRIDYSLYCPEALTAFPTVTLPHLFHASYWESADVVAFILRQVIEKERPQLAECEEPSIYSPAFPREKWQRKRTQVKIRNVTSNHRASDTVVCEGRPQVLSGRFMYGPLDVVTLTGEKVDVYIMTQPLSGKWIHFGTEVTNSSGRLTFPVPPERALGIGVYPVRMVVRGDHTYAECCLTVVARGTEAVVFSIDGSFTASVSIMGSDPKVRAGAVDVVRHWQDSGYLIVYVTGRPDMQKHRVVAWLSQHNFPHGVVSFCDGLTHDPLRQKAMFLQSLVQEVELNIVAGYGSPKDVAVYAALGLSPSQTYIVGRAVRKLQAQCQFLSDGYVAHLGQLEAGSHSHASSGPPRAALGKSSYGVAAPVDFLRKQSQLLRSRGPSQAEREGPGTPPTTLARGKARSISLKLDSEE

SEQ ID NO: 7741 - protein, 537 aa, Homo sapiens
MSSSGYPPNQGAFSTEQSRYPPHSVQYTFPNTRHQQEFAVPDYRSSHLEVSQASQLLQQQQQQQLRRRPSLLSEFHPGSDRPQERRTSYEPFHPGPSPVDHDSLESKRPRLEQVSDSHFQRVSAAVLPLVHPLPEGLRASADAKKDPAFGGKHEAPSSPISGQPCGDDQNASPSKLSKEELIQSMDRVDREIAKVEQQILKLKKKQQQLEEEAAKPPEPEKPVSPPPVEQKHRSIVQIIYDENRKKAEEAHKIFEGLGPKVELPLYNQPSDTKVYHENIKTGVPARRMMKNQVMRKKLILFFKRRNHARKQREQKICQRYDQLMEAWEKKVDRIENNPRRKAKESKTREYYEKQFPEIRKQREQQERFQRVGQRGAGLSATIARSEHEISEIIDGLSEQENNEKQMRQLSVIPPMMFDAEQRRVKFINMNGLMEDPMKVYKDRQFMNVWTDHEKEIFKDKFIQHPKNFGLIASYLERKSVPDCVLYYYLTKKNENYKALVRRNYGKRRGRNQQIARPSQEEKVEEKEEDKAEKTEKK

SEQ ID NO: 7742 - protein, 48 aa, Homo sapiens
MEDLFETFQDEMGFSNMEDDGPEEEERVAEPQANFNTPQALRQLLLLM

SEQ ID NO: 7743 - protein, 265 aa, Homo sapiens
MASSSVPPATVSAATAGPGPGFGFASKTKKKHFVQQKVKVFRAADPLVGVFLWGVAHSINELSQVPPPVMLLPDDFKASSKIKVNNHLFHRENLPSHFKFKEYCPQVFRNLRDRFGIDDQDYLVSLTRNPPSESEGSDGRFLISYDRTLVIKEVSSEDIADMHSNLSNYHQYIVKCHGNTLLPQFLGMYRVSVDNEDSYMLVMRNMFSHRLPVHRKYDLKGSLVSREPAIRKRLKNCPPLRIWTFSTRTRKYILVKRRRKYFWRS

SEQ ID NO: 7744 - protein, 153 aa, Homo sapiens
MSPEVALNRISPMLSPFISSVVRNGKVGLDATNCLRITDLKSGCTSLTPGPNCDRFKLHIPYAGETLKWDIIFNAQYPELPPDFIFGEDAEFLPDPSALQNLASWNPSNPECLLLVVKELVQQYHQFQCSRLRESSRLMFEYQTLLEEPQYGE

SEQ ID NO: 7745 - protein, 25 aa, Homo sapiens
MELRCGGLLFSSRFDSGNLAHVEKV

SEQ ID NO: 7746 - protein, 75 aa, Homo sapiens
MASEVGHNLESPETPGGGGWTRVEFPPPAPKGAATVWCLNRLGSRKLSLIWITFNTGWNMKSRLIILIQQVSCHH

SEQ ID NO: 7747 - protein, 539 aa, Homo sapiens; identical to SEQ ID NO: 5502

SEQ ID NO: 7748 - protein, 129 aa, Homo sapiens
MPGLSCRFYQHKFPEVEDVVMVNVRSIAEMGAYVSLLEYNNIEGMILLSELSRRRIRSINKLIRIGRNECVVVIRVDKEKGYIDLSKRRLTLWETESNLRNTEQRFLAVNPRLESFPVLKTSKLNIFYF

SEQ ID NO: 7749 - protein, 613 aa, Homo sapiens; identical to SEQ ID NO: 5032

SEQ ID NO: 7750 - protein, 660 aa, Homo sapiens
IAKPQGTYQVLPPNTGSLYIDKDCSAVYCHESSSNIYYPFQKREQLRAGRYIMRHTSEVICEVLDPEGNTFQVMADGSISTILPEKKLEDDLNEKTEGYDSLSSMHLEKNHQQIYGEHVPRFFVMYADGSGMELLRDSDIEEYLSLAYKESNTVVLQEPVQEQPGTLTITVLRPFHEASPWQVKKEDTIVPPNLRSRSWETFPSVEKKTPGPPFGTQIWKGLCIESKQLVSAPGAILKSPSVLQMRQFIQHEVIKNEVKLRLQVSLKDYINYILKKEDELQEMMVKDSRTEEERGNAADLLKLVMSFPKMEETTKSHVTEVAAHLTDLFKQSLATPPKCPPDTFGKDFFEKTWRHTASSKRWKEKIDKTRKEIETTQNYLMDIKNRIIPPFFKSELNQLYQSQYNHLDSLSKKLPSFTKKNEDANETAVQDTSDLNLDFKPHKVSEQKSSSVPSLPKPEISADKKDFTAQNQTENLTKSPEEAESYEPVKIPTQSLLQDVAGQTRKEKVKLPHYLLSSKPKSQPLAKVQDSVGGKVNTSSVASAAINNAKSSLFGFHLLPSSVKFGVLKEGHTYATVVKLKNVGVDFCRFKVKQPPPSTGLKVTYKPGPVAAGMQTELNIELFATAVGEDGAKGSAHISHNIEIMTEHEVLFLPVEANIL

SEQ ID NO: 7751 - protein, 824 aa, Homo sapiens
MYSNEDSRQTIVYSEESNTTMSYTQKITNPLPAASSTDPAPFANINTPVLQEDYRQDSQTRRISTLKLTHNQDLGSSSPISTPQFSKSVEVPSFLKRPRSLTPNPVPETHTASLSIQIAPLSGQDLESHKQLPELSPETAKIPLQQERQKSAVAAASQSSDCRVSQITVNGNSGGAVSPMSYYQRPFSPSAYSLPASLNSSIVMQHGTSLDSTDTYPQHAQSLDGTTSSSIPLYRSSEEEKRVTVIKAPHYPGIGPVDESGIPTAIRTTVDRPKDWYKTMFKQIHMVHKPDDDTDMYNTPYTYNAGLYNPPYSAQSHPAAKTQTYRPLSKSHSDNSPNAFKDASSPVPPPHVPPPVPPLRPRDRSSTEKHDWDPPDRKVDTRKFRSEPRSIFEYEPGKSSILQHERPPPLPTTPTPVPREPGRKPLSSSRLGEVTGSPSPPPRSGAPTPSSRAPALSPTRPPKKPLDYVQDHSSGVFNEASLYQSSIDRSLERPMSSASMASDFRKRRKSEPAVGPPRGLGDQSASRTSPGRVDLPGSSTTLTKSFTSSSPSSPSRAKDRESPRSYSSTLTDMGRSAPRERRGTPEKEKLPAKAVYDFKAQTSKELSFKKGDTVYILRKIDQNWYEGEHHGRVGIFPISYVEKLTPPEKAQPARPPPPAQPGEIGEAIAKYNFNADTNVELSLRKGDRVILLKRVDQNWYEGKIPGTNRQGIFPVSYVEVVKKNTKGAEDYPDPPIPHSYSSDRIHSLSSNKPQRPVFTHENIQGGGEPFQALYNYTPRNEDELELRESDVIDVMEKCDDGWFVGTSRRTKFFGTFPGNYVKRL

SEQ ID NO: 7752 - protein, 75 aa, Homo sapiens
MRYYGSYYRGLGYGCGGFGGLGYGCGCGGYRYGSGYGGYRYGCCRPSCREGYGFSGFKKLADSHTLTPRSCPYAS

SEQ ID NO: 7753 - protein, 60 aa, Homo sapiens
MVLILGRRLNREDLGVRDSPATKRKVFEMDPKSLTGHEFFDFSSGSSHAENILQIFNEFR

SEQ ID NO: 7754 - protein, 199 aa, Homo sapiens
MKLGKKPMYKPVDPYSRMQSTYNYNMRGGAYPPRYFYPFPVPPLLYQVELSVGGQQFNGKGKTRQAAKHDAAAKALRILQNEPLPERLEVNGRESEEENLNKSEISQVFEIALKRNLPVNFESFPLKQVARESGPPHMKNFVTKVSVGEFVGEGEGKSKKISKKNAAIAVLEELKKLPPLPAVERVKPRIKKKTKPIVK

SEQ ID NO: 7755 - protein, 894 aa, Homo sapiens
MPEQFSVAEFLAVTAEDLSSPAGAAAFAAKMPRYRGAALAREEILEGDQAILQRIKKAVRAIHSSGLGHVENEEQYREAVESLGNSHLSQNSHELSTGFLNLAVFTREVAALFKNLIQNLNNIVSFPLDSLMKGQLRDGRQASLSLGSRAKLEKERDRARVTGGIPGEVAQDMQRERRIFQLHMCEYLLKAGESQMKQGPDFLQSLIKFFHAQHNFFQDGWKAAQSLFPFIEKLAASVHALHQAQEDELQKLTQLRDSLRGTLQLESREEHLSRKNSGCGYSIHQHQGNKQFGTEKVGFLYKKSDGIRRVWQKRKCGVKYGCLTISHSTINRPPVKLTLLTCQVRPNPEEKKCFDLVTHNRTYHFQAEDEHECEAWVSVLQNSKDEALSSAFLGEPSAGPGSWGSAGHDGEPHDLTKLLIAEVKSRPGNSQCCDCGAADPTWLSTNLGVLTCIQCSGVHRELGVRFSRMQSLTLDLLGPSELLLALNMGNTSFNEVMEAQLPSHGGPKPSAESDMGTRRDYIMAKYVEHRFARRCTPEPQRLWTAICNRDLLSVLEAFANGQDFGQPLPGPDAQAPEELVLHLAVKVANQASLPLVDFIIQNGGHLDAKAADGNTALHYAALYNQPDCLKLLLKGRALVGTVNEAGETALDIARKKHHKECEELLEQAQAGTFAFPLHVDYSWVISTEPGSDSEEDEEEKRCLLKLPAQAHWASGRLDISNKTYETVASLGAATPQGESEDCPPPLPVKNSSRTLVQGCARHASGDRSEVSSLSSEAPETPESLGSPASSSSLMSPLEPGDPSQAPPNSEEGLREPPGTSRPSLTSGTTPSEMYLPVRFSSESTRSYRRGARSPEDGPSARQPLPRRNVPVGITEGDGSRTGSLPASSVQLLQD

SEQ ID NO: 7756 - protein, 117 aa, Homo sapiens; identical to SEQ ID NO: 7263

SEQ ID NO: 7757 - protein, 598 aa, Homo sapiens
MFVSDFRKEFYEVVQSQRVLLFVASDVDALCACKILQALFQCDHVQYTLVPVSGWQELETAFLEHKEQFHYFILINCGANVDLLDILQPDEDTIFFVCDTHRPVNVVNVYNDTQIKLLIKQDDDLEVPAYEDIFRDEEEDEEHSGNDSDGSEPSEKRTRLEEEIVEQTMRRRQRREWEARSGSGSEPVAAALEKSSRLFAGPMSDRTAPRSPRRDILFDYEQYEYHGTSSAMVMFELAWMLSKDLNDMLWWAIVGLTDQWVQDKITQMKYVTDVGVLQRHVSRHNHRNEDEENTLSVDCTRISFEYDLRLVLYQHWSLHDSLCNTSYTAARFKLWSVHGQKRLQEFLADMGLPLKQVKQKFQAMDISLKENLREMIEESANKFGMKDMRVQTFSIHFGFKHKFLASDVVFATMSLMESPEKDGSGTDHFIQALDSLSRSNLDKLYHGLELAKKQLRATQQTIASCLCTNLVISQGPFLYCSLMEGTPDVMLFSRPASLSLLSKHLLKSFVCSTKNRRCKLLPLVMAAPLSMEHGTVTVVGIPPETDSSDRKNFFGRAFEKAAESTSSRMLHNHFDLSVIELKAEDRSKFLDALISLLS

SEQ ID NO: 7758 - protein, 997 aa, Homo sapiens
MPSEKKISSANDCISFMQAGCELKKVRPNSRIYNRFFTLDTDLQALRWEPSKKDLEKAKLDISAIKEIRLGKNTETFRNNGLADQICEDCAFSILHGENYESLDLVANSADVANIWVSGLRYLVSRSKQPLDFMEGNQNTPRFMWLKTVFEAADVDGNGIMLEDTSVELIKQLNPTLKEAKIRLKFKEIQKSKEKLTTRVTEEEFCEAFCELCTRPEVYFLLVQISKNKEYLDANDLMLFLEAEQGVTHITEDICLDIIRRYELSEEGRQKGFLAIDGFTQYLLSSECDIFDPEQKKVAQDMTQPLSHYYINASHNTYLIEDQFRGPADINGYIRALKMGCRSVELDVSDGSDNEPILCNRNNMTTHVSFRSVIEVINKFAFVASEYPLILCLGNHCSLPQQKVMAQQMKKVFGNKLYTEAPLPSESYLPSPEKLKRMIIVKGKKLPSDPDVLEGEVTDEDEEAEMSRRMSVDYNGEQKQIRLCRELSDLVSICKSVQYRDFELSMKSQNYWEMCSFSETEASRIANEYPEDFVNYNKKFLSRIYPSAMRIDSSNLNPQDFWNCGCQIVAMNFQTPGPMMDLHTGWFLQNGGCGYVLRPSIMRDEVSYFSANTKGILPGVSPLALHIKIISGQNFPKPKGACAKGDVIDPYVCIEIHGIPADCSEQRTKTVQQNSDNPIFDETFEFQVNLPELAMIRFVVLDDDYIGDEFIGQYTIPFECLQPGYRHVPLRSFVGDIMEHVTLFVHIAITNRSGGGKAQKRSLSVRMGKKVREYTMLRNIGLKTIDDIFKIAVHPLREAIDMRENMQNAIVSIKELCGLPPIASLKQCLLTLSSRLITSDNTPSVSLVMKDSFPYLEPLGAIPDVQKKMLTAYDLMIQESRFLIEMADTVQEKIVQCQKAGMEFHEELHNLGAKEGLKGRKLNKATESFAWNITVLKGQGDLLKNAKNEAIENMKQIQLACLSCGLSKAPSSSAEAKSKRSLEAIEEKESSEENGKL

SEQ ID NO: 7759 - protein, 203 aa, Homo sapiens
MRNGDFLPTRLQAQQDAVNIVCHSKTRSNPENNVGLITLANDCEVLTTLTPDTGRILSKLHTVQPKGKITFCTGIRVAHLALKHRQGKNHKMRIIAFVGSPVEDNEKDLVKLAKRLKKEKVNVDIINFGEEEVNTEKLTAFVNTLNGKDGTGSHLVTVPPGPSLADALISSPILAGEGGAMLGLGASDFEFGVDPSADPELAL

SEQ ID NO: 7760 - protein, 142 aa, Homo sapiens; identical to SEQ ID NO: 5835

SEQ ID NO: 7761 - protein, 469 aa, Homo sapiens
MCSLASGATGYSHLLKKHFHTVSLSISLILTAWFINMNPTVEYMNSIYNPVPWEKEEYLKPVLEDDLLLQFDVEDLYEPVSVPFSYPNGLSENTSVVEKLKHMEARALSAEAALARAREDLQKMKQFAQDFVMHTDVRTCSSSTSVIADLQEDEDGVYFSSYGHYGIHEEMLKDKIRTESYRDFIYQNPHIFKDKVVLDVGCGTGILSMFAAKAGAKKVLGVDQSEILYQAMDIIRLNKLEDTITLIKGKIEEVHLPVEKVDVIISEWMGYFLLFESMLDSVLYAKNKYLAKGGSVYPDICTISLVAVSDVNKHADRIAFWDDVYGFKMSCMKKAVIPEAVVEVLDPKTLISEPCGIKHIDCHTTSISDLEFSSDFTLKITRTSMCTAIAGYFDIYFEKNCHNRVVFSTGPQSTKTHWKQTVFLLEKPFSVKAGEALKGKVTVHKSKKDPRSLTVTLTLNNSTQTYGLQ

SEQ ID NO: 7762 - protein, 174 aa, Homo sapiens
MASAGTQHYSIGLRQKNSFKQSGPSGTVPATPPEKPSEGRVWPQAHQQVKPIWKLEKKQVETLSAGLGPGLLGVPPQPAYFFCPSTLCSSGTTAVIAGHSSSCYLHSLPDLFNSTLLYRRSSYRQKPYQQLESFCLRSSPSEKSPFSLPQKSLPVSLTANKATSSMVFSMAQPM

SEQ ID NO: 7763 - protein, 523 aa, Homo sapiens
MQKERELQETIYFKNTWPACMFLIVAPLSVLYNWKDELDTWGYFRVTVLHGNRKDNELIRVKQRKCEIALTTYETLRLCLDELNSLEWSAVIVDEAHRIKNPKARVTEVMKALKCNVRIGLTGTILQNNMKELWCVMDWAVPGLLGSGTYFKKQFSDPVEHGQRHTATKRELATGRKAMQRLAKKMSGWFLRRTKTLIKDQLPKKEDRMVYCSLTDFQKAVYQTVLETEDVTLILQSSEPCTCRSGQKRRNCCYKTNSHGETVKTLYLSYLTVLQKVANHVALLQAASTSKQQETLIKRICDQVFSRFPDFVQKSKDAAFETLSDPKYSGKMKVLQQLLNHCRKNRDKVLLFSFSTKLLDVLQQYCMASGLDYRRLDGSTKSEERLKIVKEFNSTQDVNICLVSTMAGGLGLNFVGANVVVLFDPTWNPANDLQAIDRAYRIGQCRDVKVLRLISLGTVEEIMYLRQIYKQQLHCVVVGSENAKRYFEAVQGSKEHQGELFGIHNLFKFRSQGSCLTKDILEV

SEQ ID NO: 7764 - protein, 392 aa, Homo sapiens; identical to SEQ ID NO: 6910

SEQ ID NO: 7765 - protein, 521 aa, Homo sapiens
MEQSSLYFWDLLEGSEKAVVGTTYKHLKDLLSKLLNSGYFESIPVPKNAKEKEVPLEEEMLIQSEKKTQLSKTESVKESESLMEFAQPEIQPQEFLNRRYMTEVDYSNKQGEEQPWEADYARKPNLPKRWDMLTEPDGQEKKQESFKSWEASGKHQEVSKPAVSLEQRKQDTSKLRSTLPEEQKKQEISKSKPSPSQWKQDTPKSKAGYVQEEQKKQETPKLWPVQLQKEQDPKKQTPKSWTPSMQSEQNTTKSWTTPMCEEQDSKQPETPKSWENNVESQKHSLTSQSQISPKSWGVATASLIPNDQLLPRKLNTEPKDVPKPVHQPVGSSSTLPKDPVLRKEKLQDLMTQIQGTCNFMQESVLDFDKPSSAIPTSQPPSATPGSPVASKEQNLSSQSDFLQEPLQAAIPPGKQPSSLASPNPPMAKGSEQGFQSPPASSSSVTINTAPFQAMQTVFNVNAPLPPRKEQEIKESPYSPGYNQSFTTASTQTPPQCQLPSIHVEQTVHSQETAPGNHHSTF

SEQ ID NO: 7766 - protein, 159 aa, Homo sapiens; identical to SEQ ID NO: 7300

SEQ ID NO: 7767 - protein, 89 aa, Homo sapiens; identical to SEQ ID NO: 6950

SEQ ID NO: 7768 - protein, 450 aa, Homo sapiens
MAEGAQPHQPPQLGPGAAARGMKRESELELPVPGAGGDGADPGLSKRAAEEAAADGGGGMQNEPLTPGYHGFPARDSQGNQEPTTTPDAMVQPFTTIPFPPPPQNGIPTEYGVPHTQDYAGQTGEHNLTLYGSTQAHGEQSSNSPSTQNGSLTQTEGGAQTDGQQSQTQSSENSESKSTPKRLHVSNIPFRFRDPDLRQMFGQFGKILDVEIIFNERGSKGFGFVTFENSADADRAREKLHGTVVEGRKIEVNNATARVMTNKKMVTPYANGWKLSPVVGAVYGPELYAASSFQADVSLGNDAAVPLSGRGGINTYIPLISLPLVPGFPYPTAATTAAAFRGAHLRGRGRTVYGAVRAVPPTAIPAYPGVVYQDGFYGADLYGGYAAYRYAQPATATAATAAAAAAAAYSDGYGRVYTADPYHALAPAASYGVGAVASLYRGGYSRFAPY

SEQ ID NO: 7769 - protein, 284 aa, Homo sapiens
MFSRRSHGDVKKSTQKVLDPKKDVLTRLKHLRALLDNVDANDLKQFFETNYSQIYFIFYENFIALENSLKLKGNNKSQREELDSILFLFEKILQFLPERIFFRWHYQSIGSTLKKLLHTGNSIKIRCEGIRLFLLWLQALQTNCAEEQVLIFACLVPGFPAVMSSRGPCTLETLINPSPSVADVKIYPEEITPLLPAISGEKIAEDQTCFFLQILLKYMVIQAASLEWKNKENQDTGFKFLFTLFRKYYLPHLFPSFTKLTNIYKPVLDIPHLRPKPVYITTTR

SEQ ID NO: 7770 - protein, 281 aa, Homo sapiens
MGDTVVEPAPLKPTSEPTSGPPGNNGGSLLSVITEGVGELSVIDPEVAQKACQEVLEKVKLLHGGVAVSSRGTPLELVNGDGVDSEIRCLDDPPAQIREEEDEMGAAVASGTAKGARRRRQNNSAKQSWLLRLFESKLFDISMAISYLYNSKEPGVQAYIGNRLFCFRNEDVDFYLPQLLNMYIHMDEDVGDAIKPYIVHRCRQSINFSLQCALLLGAYSSDMHISTQRHSRGTKLRKLILSDELKPAHRKRELPSLSPAPDTGLSPSKRTHQRSKSDATA

SEQ ID NO: 7771 - protein, 196 aa, Homo sapiens; identical to SEQ ID NO: 5861

SEQ ID NO: 7772 - protein, 539 aa, Homo sapiens; identical to SEQ ID NO: 5502

SEQ ID NO: 7773 - protein, 361 aa, Homo sapiens
VTTEKTYTSTSNNSISGSLKRLEDTTARFTNANFQEVSAHTSSGKDVSETRGSEGKGKKSSAHSSGQRGRKPGGGRNPGTTVSAASPFPQAGYKRAQTSGIEEETVKEKKRKGNKQSKHGPGRPKGNKNQENVSHLSVSSASPTSSVASAAGSITSSSLQKSPTLLRNGSLQSLSVGSSPVGSEISMQYRHDGACPTTTFSELLNAIHNDRGDSSTLTKQELKFIGIYNSNDVAVSFPNVVSGSGSSTPVSSSHLPQQSSGHLQQVGALSPSAVSSAAPAVATTQANTLSGSSLSQAPSHMYGNRSNSSMAALIAQSENNQTDQDLGDNSRNLVGRGSSPRGSLSPRSPVSSLQIRYDQPG

SEQ ID NO: 7774 - protein, 140 aa, Homo sapiens
MAAAPPSYCFVAFPPRAKDGLVVFGKNSARPRDEVQEVVYFSAADHEPESKVECTYISIDQVAAYAIMISRPAWLWGAEMGANEHGVCIANEAINTREPAAEIEALLGMDLVRLGLERGETAKEALDVIVSLLEEHGQGG

SEQ ID NO: 7775 - protein, 190 aa, Homo sapiens
  VARIANT 1: note = X can be any amino acid
XQLAALKEIQAEVQEKESDAVKPKNQDIQGGKAAPAEALGIPDEHYLDNLCIFCGERSESFTEEGLDLHYWKHCLMLTRCDHCKQVVEISSLTEHLLTECDKKDGFGKCYRCSEAVFKEELPRHIKHKDCNPAKPEKLANRCPLCHENFSPGEEAWKAHLMGPAGCTMNLRKTHILQKAPALQPGEGQRR

SEQ ID NO: 7776 - protein, 240 aa, Homo sapiens
MTVGKSSKMLQHIDYRMRCILQDGRIFIGTFKAFDKHMNLILCDCDEFRKIKPKNSKQAEREEKRVLGLVLLRGENLVSMTVEGPPPKDTGIARVPLAGAAGGPGIGRAAGRGIPAGVPMPQAPAGLAGPVRGVGGPSQQVMTPQGRGTVAAAAAAATASIAGAPTQYPPGRGGPPPPMGRGAPPPGMMGPPPGMRPPMGPPMGIPPGRGTPMGMPPPGMRPPPPGMRGPPPPGMRPPRP

SEQ ID NO: 7777 - protein, 139 aa, Homo sapiens
METDCNPMELSSMSGFEEGSELNGFEGTDMKDMRLEAEAVVNDVLFAVNNMFVSKSLRCADDVAYINVETKERNRYCLELTEAGLKVVGYAFDQVDDHLQTPYHETVYSLLDTLSPAYREAFGNALLQRLEALKRDGQS

SEQ ID NO: 7778 - protein, 201 aa, Homo sapiens
MAGLEVLFASAAPAITCRQDALVCFLHWEVVTHGYFGLGVGDQPGPNDKKSELLPAGWNNNKDLYVLRYEYKDGSRKLLVKAITVESSMILNVLEYGSQQVADLTLNLDDYIDAEHLGDFHRCDPLGPFVVGGEDLDPFGPRRGGMIVDPLRSGFPRALIDPSSGLPNRLPPGAVPPGARFDPFGPIGTSPPGPRPDRRGQ

SEQ ID NO: 7779 - protein, 248 aa, Homo sapiens; identical to SEQ ID NO: 7249

SEQ ID NO: 7780 - protein, 613 aa, Homo sapiens; identical to SEQ ID NO: 5032

SEQ ID NO: 7781 - protein, 539 aa, Homo sapiens; identical to SEQ ID NO: 5502

SEQ ID NO: 7782 - protein, 362 aa, Homo sapiens
MAPKPGAEWSTALSHLVLGVVSLHAAVSTAEASRGAAAGFLLQVLAATTTLAPGLSTHEDCLAGAWVATVIGLPLLAFDFHWCTNGHLMCAGCFIHLLADARLKEEQATCPNCRCEISKSLCCRNLAVEKAVSELPSECGFCLRQFPRSLLERHQKEECQDRVTQCKYKRIGCPWHGPFHELTVHEAACAHPTKTGSELMEILDGMDQSHRKEMQLYNSIFSLLSFEKIGYTEVQFRPYRTDDFITRLYYETPRFTVLNQTWVLKARVNDSERNPNLSCKRTLSFQLLLKSKVTAPLECSFLLLKGPYDDVRISPVIYHFVFTNESNETDYVPLPIIDSVECNKLLAAKNINLRLFLFQIQK

SEQ ID NO: 7783 - protein, 90 aa, Homo sapiens; identical to SEQ ID NO: 7722

SEQ ID NO: 7784 - protein, 833 aa, Homo sapiens
MAVEDSTLQVVVRVRPPTPRELDSQRRPVVQVVDERVLVFNPEEPDGGFPGLKWGGTHDGPKKKGKDLTFVFDRVFGEAATQQDVFQHTTHSVLDSFLQGYNCSVFAYGATGAGKTHTMLGREGDPGIMYLTTVELYRRLEARQQEKHFEVLISYQEVYNEQIHDLLEPKGPLAIREDPDKGVVVQGLSFHQPASAEQLLEILTRGNRNRTQHPTDANATSSRSHAIFQIFVKQQDRVPGLTQAVQVAKMSLIDLAGSERASSTHAKGERLREGANINRSLLALINVLNALADAKGRKTHVPYRDSKLTRLLKDSLGGNCRTVMIAAISPSSLTYEDTYNTLKYADRAKEIRLSLKSNVTSLDCHISQYATICQQLQAEVAALRKKLQVYEGGGQPPPQDLPGSPKSGPPPEHLPSSPLPPHPPSQPCTPELPAGPRALQEESLGMEAQVERAMEGNSSDQEQSPEDEDEGPAEEVPTQMPEQNPTHALPESPRLTLQPKPVVGHFSARELDGDRSKQLALKVLCVAQRQYSLLQAANLLTPDMITEFETLQQLVQEEKIEPGAEALRTSGLARGAPLAQELCSESIPVPSPLCPEPPGYTGPVTRTMARRLSGPLHTLGIPPGPNCTPAQGSRWPMEKKRRRPSALEADSPMAPKRGTKRQRQSFLPCLRRGSLPDTQPSQGPSTPKGERASSPCHSPRVCPATVIKSRVPLGPSAMQNCSTPLALPTRDLNATFDLSEEPPSKPSFHECIGWDKIPQELSRLDQPFIPRAPVPLFTMKGPKPTSSLPGTSACKKKRVASSSVSHGRSRIARLPSSTLKRPAGPLVLPGDWH

SEQ ID NO: 7785 - protein, 613 aa, Homo sapiens; identical to SEQ ID NO: 5032

SEQ ID NO: 7786 - protein, 217 aa, Homo sapiens
MNSQPQTRSPFFQRPQIQPPRATIPNSSPSIRPGAQTPTAVYQANQHIMMVNHLPMPYPVPQGPQYCIPQYRHSGPPYVGPPQQYPVQPPGPGPFYPGPGPGDFPNAYGTPFYPSQPVYQSAPIIVPTQQQPPPAKREKKTIRIRDPNQGGKDITEEIMSGGGSRNPTPPIGRPTSTPTPPQQLPSQVPEHSPVVYGTVESAHLAASTPVTAASDQK

SEQ ID NO: 7787 - protein, 322 aa, Homo sapiens
MYFCWGADSRELQRRRTAGSPGAELLQAASGERHSLLLLTNHRVLSCGDNSRGQLGRRGAQRGELPEPIQALETLIVDLVSCGKEHSLAVCHKGRVFAWGAGSEGQLGIGEFKEISFTPKKIMTLNDIKIIQVSCGHYHSLALSKDSQVFSWGKNSHGQLGLGKEFPSQASPQRVRSLEGIPLAQVAAGGAHSFALSLCGTSFGWGSNSAGQLALSGRNVPVQSNKPLSVGALKNLGVVYISCGDAHTAVLTQDGKVFTFGDNRSGQLGYSPTPEKRGPQLVERIDGLVSQIDCGRLRGCSSQTHFCWNICQLCDNSSVKLE

SEQ ID NO: 7788 - protein, 580 aa, Homo sapiens
MRALTVQRVKFAMDLPLLKRAGQDLAEKTKNFVSRSLVIGEVLSMADMATGVKCGIIYWLFGGAIRNLGSPEHVTKWFQPLQEQKYTGMFAMTERGHGSNARGIQTEATFDLSAQEFVIDTPCENAEKMYIGNAMYGNYAAVFAQLIIDGRSQGPHCFIVPVRDENGSLYPGVTAIDMMYKEGLHGVDNGILIFDKVRIPRENLLDKFGSVAPDGQYHSPIRNKSARFNAMLAALTPSRLAVAFQAMGAMKLGLTIAIRYSHSRRQFGPKTKEEVKIIEHQTQTLRLMPHLATALALTFVSRYAGALLDEDVFQGKELVNSRSLQALVAGLKAYSTWENIRCLQDCRECTGGMVVGRELLAQYTKQYEEKPLFGLLQNWAESVGDKLRTSFLAFNMDTVDDLAFLLKAVKFRERVLQRGLVARIYYKVKTKKEDFFHAWNSCLHHVASLSLAHTHRVTLEQFSLAVKSCPDQEDQTLLMKFCLLYGTKLVFQERAWYLEHKYLTPMASTRIRNQLLDLCDSVKDDARRVISTFNIPHTYLHAPIAGISNPRAAWAFYPAPLQPRPREEARSRRPKLGAKL

SEQ ID NO: 7789 - protein, 186 aa, Homo sapiens [sequence omitted]

SEQ ID NO: 7790 - protein, 539 aa, Homo sapiens; identical to SEQ ID NO: 5502

SEQ ID NO: 7791 - protein, 870 aa, Homo sapiens
MSRNPSSNSPEEDTVPVPKGSVPAARPSRGGMSVVGIDLGFLNCYIAVARSGGIETIANEYSDRCTPACISLGSRTRAIGNAAKSQIVTNVRNTIHGFKKLHGRSFDDPIVQTERIRLPYELQKMPNGSAGVKVRYLEEERPFAIEQVTGMLLAKLKETSENALKKPVADCVISIPSFFTDAERRSVMAAAQVAGLNCLRLMNETTAVALAYGIYKQDLPPLDEKPRNVVFIDMGHSAYQVLVCAFNKGKLKVLATTFDPYLGGRNFDEALVDYFCDEFKTKYKINVKENSRALLRLYQECEKLKKLMSANASDLPLNIECFMNDLDVSSKMNRAQFEQLCASLLARVEPPLKAVMEQANLQREDISSIEIVGGATRIPAVKEQITKFFLKDISTTLNADEAVARGCALQCAILSPAFKVREFSITDLVPYSITLRWKTSFEDGSGECEVFCKNHPAPFSKVITFHKKEPFELEAFYTNLHEVPYPDARIGSFTIQNVFPQSDGDSSKVKVKVRVNIHGIFSVASASVIEKQNLEGDHSDAPMETETSFKNENKDNMDKMQVDQEEGHQKCHAEHTPEEEIDHTGAKTKSAVSDKQDRLNQTLKKGKVKSIDLPIQSSLCRQLGQDLLNSYIENEGKMIMQDKLEKERNDAKNAVEEYVYDFRDRLGTVYEKFITPEDLSKLSAVLEDTENWLYEDGEDQPKQVYVDKLQELKKYGQPIQMKYMEHEERPKALNDLGKKIQLVMKVIEAYRNKDERYDHLDPTEMEKVEKCISDAMSWLNSKMNAQNKLSLTQDPVVKVSEIVAKSKELDNFCNPIIYKPKPKAEVPEDKPKANSEHNGPMDGQSGTETKSDSTKDSSQHTKSSGEMEVD

SEQ ID NO: 7792 - protein, 1823 aa, Homo sapiens
MEPPQETNRPFSTLDNRSGQVQVLSATPLLQRNPYSSPDIMHIKGSEASSVPYALNQGTTALPKNKNQEGTGHRLLNMLRKTLKESDSEELEITQETPNLVPFGDVVGCLGIHIKNCRHFMPKISLQHYANLFIRISINKAVKCTKMCSLLSKNDEKNTVIKFDEVKYFSVQVPRRYDDKRNNILLELIQYDNREKRAFLLGSVQIHLYEVIQKGCFIEEVQVLHGNIFVCRLEVEFMFSYGNFGYGFSHQLKPLQKITEPSMFMNLAPPPERTDPVTKVITPQTVEYPAFLSPDLNVTVGTPAVQSSNQPSVVRLEKLQQQPRERLEKMKKEYRNLNTWIDKANYLESILMPKLEHKDSEETNIDEASENTKSNHPEEELENIVGVDIPLVNEEAETTANELLDNDSEKGLTIPTLNQSDQDNSTADASKNDESTPSPTEVHSLCTISNQETIKAGRIPPLGERQSESMPDRKMKNVFFPLEVKLKDNYPSILKADSSLSEVAFSPKEYNSPSFRPEYIEFKPKFQFQKFNKNGFDPFLRNINKMSVRKRKDQDIYKYRNILGAEVIEHEDQDPPYPAQSKTAGPANTTWAHDPNIFTTKMLETENKLAPDPTINTIKGLDTKNSLKENLPNVSLPSIKGESSRAGNVQANTCHLSKSLNFTPHIEYLKQSMILKSILSENLQDLSDKLFSKPEVSMNSEAREKSSSPLLSIHDKSSSSMEDNVLEKKQDLNNWLSEKDILNSKTTLSQIIKNIPADSFSEGSQIIENIPADSLLEGGQVIKNIPEYSLSEGGQIIKNIPADSFLESGPGQSPEVEEHVSKKHFEADERDFPIKKNSSTKKKHLISEVPNSKSGSSGTVHDYIMRQIFTAPIFSELEIEVKEPSETPMNLENQLPTPWKRSLSSHILFHEENADEIELPQPRSATSQIIQAFPIDTLLESGIIKVIELDKEHHKSSLLGTGITSPKGNLKDSQEYYSEIRSETEPLSEQSIPIIPKDTTSVSRAEFIQEDQNMFPQDSSYYSIANKELYLPRNGQRLCKDKNDLSSTLESLTNSLMDKLSESDEIMLKSFLKNIFNVFFKYNHSERRGQPEKELERLIQPSFTSDTEHLEELQEDFDKADKLDARGSPILSPKLRVFLEELSESEVKHLKSELSKQIQHYLVERLSESGHITKEDLPKIYQNLYLMNEKAEQKGPNSFQGKYSETVKEIMSFVNNFNHHFIDKHLEIKLRSFLKEILQNYFLKNISESSLFNETASETIYPNISSLRTKSVSISFHELEQDISKGSFGRRFEINMKYPLSKSLQNYLIALSENELLHLKADLSKHLQSLFIEKLSKSGLMTKKQLEGINQHINLLNSSSIPLKYIKTHLPFRDDCHFVEKHSEKQNKYSRIVQQTTLQTVSEDKLREAELIREKEKKYFPLQNLKGNSSLIKEQKSYYTKEEAKTPSLIKVQPSSNENIQASPLSKSSEILTDILLKKLRKEHVFTQLPQAENSVHKTEIQDPYSWGGKSKITQSKAWCEKTLKMKSLDRKEHVNIYKWTVQEKPEAVLTSYPRIPNARMPREDEYLNRITFPSWQSSTLTHFNTETGEKSKLEDQYCQTLKGNNNNNKKHLVTFAQYKKEIQTLYIKPDEICSEKCAKFPEIQSFQYKVVEDEKNLKPHLFPELFKIEDLKPKVARGSERDRVAQPKKSFNKIVRILPTTLPTTRIHLKKSVAALLHWTARRTIHDCSDKFEDLHDMTSFTHLKKVKSRSRLLGKSSDDIHNHARHSARPYTAPEVNKQRESYSGKFTSRRMVSSGLVHINDKTSDYEMHKMRPKKIKRGY

SEQ ID NO: 7793 - protein, 165 aa, Homo sapiens
MEPTRDCPLFGGAFSAILPMGAIDVSDLRPVPDNQEVFCHPVTDQSLIVELLELQAHVRGEAAARYHFEDVGGVQGARAVHVESVQPLSLENLALRGRCQEAWVLSGKQQIAKENQQVRARECVMSWKGGSGDAEIQVSILTLIPLGSKGRDTSSGLAEAAPVPD

SEQ ID NO: 7794 - protein, 1493 aa, Homo sapiens
MASITQLFDDLCEALLPAAKTHLGQRSVNRKRAKRSLKKVAYNALFTNLFQDETQQLQPDMSKLPARNKILMLSFDLRVGGLGPKADRLEELVEELEAAPCCPLLEVGSVLDLLVQLAGSGPPQVLPRKRDYFLNNKHVGRNVPYSGYDCDDLSVFEMDVQSLISREECLCHSMIQETLQVMEAAPGTGLPTVGLFSFGDPCGDRFERDTRVSLFGALVHSRTYDMDVRLGLPPVPDNADLSGLAIKVPPSVDQWEDEGFQSASNLTPDSQSEPSVTPDVDLWEAALTYEASKRRCWERVGCPPGHREEPYLTEAGRDAFDKFCRLHQGELQLLAGGVLQAPQPVLVKECELVKDVLNVLIGVVSATFSLCQPAQAFVVKRGVHVSGASPESISSLLSEVAEYGTCYTRLSHFSLQPVLDSLYSKGLVFQAFTSGLRRYLQYYRACVLSTPPTLSLLTIGFLFKKLGRQLRYLAELCGVGAVLPGTCGGGPRAAFPTGVKLLSYLYQEALHNCSNEHYPVLLSLLKTSCEPYTRFIHDWVYSGVFRDAYGEFMIQVNHEYLSFRDKLYWTHGYVLISKEVEDCVPVFLKHIAHDIYVCGKTINLLKLCCPRHYLCWSDVPVPRISVIFSLEELKEIEKDCAVYVGRMERVARHSSVSKEEKELRMEIAKQELIAHAREAASRVLSALSDRQMSERMALDARKREQFQRLKEQFVKDQERRQAARQEELDDDFSYARELRDRERRLKSLEEELERKARQALVDHYSKLSAEAARREQKALWRIQRHRLESARLRFLLEDEKHIQEMLKAVSEAHQPQEPPDVLLSVHPQVTSPGPEHPEGGQGCDSGSAEQHSPAWDGWNRPGLLTPQPLKPLAVGAGGRGLQQAEGARPFSDSLSIGDFLPVGPGAEPSVQTGMVPLLEVALQTINLDLPPSAPGEAPAAASTQPSRPQEYDFSTVLRPAVATSPAPGPLQAAECSLGSSGLQLWEDSCGKMDACGSASRETLLPSHPPRRAALEEGSSQPTERLFGQVSGGGLPTGDYASEIAPTRPRWNTHGHVSDASIRVGENVSDVAPTQPRWNTHGHVSNASISLGESVSDVAPTRPRWNIHGHVSNASIRVGENVSDVAPTRPRWNTHGHVSNASIRVGENVSDVAPTRPRWNTHGHVSDASISLGESVSDMAPARPRWNTHGHVSDASISLGESVSDMAPTRPRWNTHGHVSDTSIRVGENVSDVAPIRSRCNTHGHVSDASISLGEPVSDVVSTRPRWNTHVPIPPPHMVLGALSPEAEPNTPRPQQSPPGHTSQSALSLGAQSTVLDCGPRLPVEVGPSLSSPSSGCGEGSISVGENVSDVAPTQPWWPNTPGDSVSEELGQSRVAGGQEWDCGTHRAWEALGGAGTLRTSLQIGLSTHRKTQLPRAAQAVVRRRRHRRRRLRVGSRPTWQAWQGSTTWSGTRTVTSPCPSRPLLIFCAPCFPGPSPSPWTPRSSLPLMRLLCS

SEQ ID NO: 7795 - protein, 358 aa, Homo sapiens; identical to SEQ ID NO: 4964

SEQ ID NO: 7796 - protein, 918 aa, Homo sapiens; identical to SEQ ID NO: 6296

SEQ ID NO: 7797 - protein, 73 aa, Homo sapiens
MSYQQQQCKQPCQPPPPVCRLPKRPEPCPPLKCPEPCPPPKCPQPCPPQQCQQKYPLVTPSPPCQPKCPPKSK

SEQ ID NO: 7798 - protein, 191 aa, Homo sapiens; identical to SEQ ID NO: 4694

SEQ ID NO: 7799 - protein, 19 aa, Homo sapiens
MLKNKGHSSKKDNLAVNAV

SEQ ID NO: 7800 - protein, 340 aa, Homo sapiens
MESNFNQEGVPRPSYVFSADPIARPSEINFDGIKLDLSHEFSLVAPNTEANSFESKDYLQVCLRIRPFTQSEKELESEGCVHILDSQTVVLKEPQCILGRLSEKSSGQMAQKFSFSKVFGPATTQKEFFQGCIMQPVKDLLKGQSRLIFTYGLTNSGKTYTFQGTEENIGILAALNVLFDSLQERLYTKMNLKPHRSREYLRLSSEQEKEEIASKSALLRQIKEVTVHNDSDDTLYGSLTNSLNISEFEESIKDYEQANLNMANSIKFSVWVSFFEIYNEYIYDLFVPELAKTKGELIKTKEELKKRENESDSLIQELETSNKKIITQNQRIKELINIID

SEQ ID NO: 7801 - protein, 8 aa, Homo sapiens
MADTDLFM

SEQ ID NO: 7802 - protein, 875 aa, Homo sapiens
MMYTVLPDGSPVPQGMALYAPPPPLPNNSRPLTPGTVVYGPPPAGAPMVYGPPPPNFSIPFIPMGVLHCNVPEHHNLENEVSRLEDIMQHLKSKKREERWMRASKRQSEKEMEELHHNIDDLLQEKKSLECEVEELHRTVQKRQQQKDFIDGNVESLMTELEIEKSLKHHEDIVDEIECIEKTLLKRRSELREADRLLAEAESELSCTKEKTKNAVEKFTDAKRSLLQTESDAEELERRAQETAVNLVKADQQLRSLQADAKDLEQHKIKQEEILKEINKIVAAKDSDFQCLSKKKEKLTEELQKLQKDIEMAERNEDHHLQVLKESEVLLQAKRAELEKLKSQVTSQQQEMAVLDRQLGHKKEELHLLQGSMVQAKADLQEALRLGETEVTEKCNHIREVKSLLEELSFQKGELNVQISERKTQLTLIKQEIEKEEENLQVVLRQMSKHKTELKNILDMLQLENHELQGLKLQHDQRVSELEKTQVAVLEEKLELENLQQISQQQKGEIEWQKQLLERDKREIERMTAESRALQSCVECLSKEKEDLQEKCDIWEKKLAQTKRVLAAAEENSKMEQSNLEKLELNVRKLQQELDQLNRDKLSLHNDISAMQQQLQEKREAVNSLQEELANVQDHLNLAKQDLLHTTKHQDVLLSEQTRLQKDISEWANRFEDCQKEEETKQQQLQVLQNEIEENKLKLVQQEMMFQRLQKERESEESKLETSKVTLKEQQHQLEKELTDQKSKLDQVLSKVLAAEERVRTLQEEERWCESLEKTLSQTKRQLSEREQQLVEKSGELLALQKEADSMRADFSLLRNQFLTERKKAEKQVASLKEALKIQRSQLEKNLLTAREAEAQKLKKQVCAQKAQLASLGRE

SEQ ID NO: 7803 - protein, 395 aa, Homo sapiens
MEPPQETNRPFSTLDNRSGQVQVLSATPLLQRNPYSSPDIMHIKGSEASSVPYALNQGTTALPKNKNQEGTGHRLLNMLRKTLKESDSEELEITQETPNLVPFGDVVGCLGIHIKNCRHFMPKISLQHYANLFIRISINKAVKCTKMCSLLSKNDEKNTVIKFDEVKYFSVQVPRRYDDKRNNILLELIQYDNREKRAFLLGSVQIHLYEVIQKGCFIEEVQVLHGNIFVCRLEVEFMFSYGNFGYGFSHQLKPLQKITEPSMFMNLAPPPERTDPVTKVITPQTVEYPAFLSPDLNVTVGTPAVQSSNQPSVVRLEKLQQQPRERLEKMKKEYRNLNTWIDKANYLESILMPKLEHKDSEETNIDEASENTKSNHPEEELENIVGVGGFFTKRI

SEQ ID NO: 7804 - protein, 93 aa, Homo sapiens
MSYYQRPFSPSAYSLPASLNSSIVMQHGTSLDSTDTYPQHAQSLDGTTSSSIPLYRSSEEEKRVTVIKAPHYPGIGPVDESGIPTAIRTTVDR

SEQ ID NO: 7805 - protein, 185 aa, Homo sapiens
MAASVEQREGTIQVQGQALFFREALPGSGQARFSVLLLHGIRFSSETWQNLGTLHRLAQAGYRAVAIDLPGLGHSKEAAAPAPIGELAPGSFLAAVVDALELGPPVVPVAPICTDKINAANYASVKTPALIVYGDQDPMGQTSFEHLKQLPNHRVLIMKGAGHPCYLDKPEEWHTGLLDFLQGLQ

SEQ ID NO: 7806 - protein, 479 aa, Homo sapiens
MLERPPALAMPMPTEGTPPPLSGTPIPVPAYFRHAEPGFSLKRPRGLSRSLPPPPPAKGSIPISRLFPAAPGWHQLQPRRVSFRGEASETLQSPGYDPSRPESFFQQSFQRLSRLGHGSYGEVFKVRSKEDGRLYAVKRSMSPFRGPKDRARKLAEVGSHEKVGQHPCCVRLEQAWEEGGILYLQTELCGPSLQQHCEAWGASLPEAQVWGYLRDTLLALAHLHSQGLVHLDVKPANIFLGPRGRCKLGDFGLLVELGTAGAGEVQEGDPRYMAPELLQGSYGTAADVFSLGLTILEVACNMELPHGGEGWQQLRQGYLPPEFTAGLSSELRSVLVMMLEPDPKLRATAEALLALPVLRQPRAWGVLWCMAAEALSRGWALWQALLALLCWLWHGLAHPASWLQPLGPPATPPGSPPCSLLLDSSLSSNWDDDSLGPGHPPCLACPPAGLHSPLRLSWPGLWGAPPPPGAGAHPGMPWT

SEQ ID NO: 7807 - protein, 579 aa, Homo sapiens; identical to SEQ ID NO: 7524

SEQ ID NO: 7808 - protein, 323 aa, Homo sapiens
MEALGPGGDRASPASSTSSLDLWHLSMRADSAYSSFSAASGGPEAAQSPGTDLLPYLDWDYVRVVWGGPGPAPPDAALCTSPRPRPAVAARSGPQPTEVPGTPGPLNRQATPLLYALAAEAEAAAQAAEPPSPPASRAAYRQRLQGAQRRVLRETSFQRKELRMSLPARLRPTVPARPPATHPRSASLSHPGGEGEPARSRAPAPGTAGRGPLANQQRKWCFSEPGKLDRVGRGGGPARECLGEACSSSGLPGPEPLEFQHPALAKFEDHEVGWLPETQPQGSMNLDSGSLKLGDAFRPASRSRSASGEVLGSWGGSGGTIPI

SEQ ID NO: 7809 - protein, 259 aa, Homo sapiens
MPRARSGRRSRGAGGREETFLRVRANRQTRLNARIGKMKRRKQDEGQREGSCMAEDDAVDIEHENNNRFEEYEWCGQKRIRATTLLEGGFRGSGFIMCSGKENPDSDADLDVDGDDTLEYGKPQYTEADVIPCTGEEPGEAKEREALRGAVLNGGPPSTRITPEFSKWASDEMPSTSNGESSKQEAMQKTCKNSDIEKITEDSAVTTFEALKARVRELERQLSRGDRYKCLICMDSYSMPLTSIQCWHVHCEECWLRTL

SEQ ID NO: 7810 - protein, 122 aa, Homo sapiens; identical to SEQ ID NO: 7564

SEQ ID NO: 7811 - protein, 327 aa, Homo sapiens
MASFLKGAHVTINARAEEDVEPECIMEKVAKASGANYSFHKESGRFQDVGPQAPVGSVYQKTNAVSEIKRVGKDSFWAKAEKEEENRRLEEKRRAEEAQRQLEQERRERELREAARREQRYQEQGGEASPQRTWEQQQEVVSRNRNEQESAVHPREIFKQKERAMSTTSISSPQPGKLRSPFLQKQLTQPETHFGREPAAAISRPRADLPAEEPAPSTPPCLVQAEEEAVYEEPPEQETFYEQPPLVQQQGAGSEHIDHHIQGQGLSGQGLCARALYDYQAADDTEISFDPENLITGIEVIDEGWWRGYGPDGHFGMFPANYVELIE

SEQ ID NO: 7812 - protein, 145 aa, Homo sapiens
MQGRITKVLNMKPPEILSMIEEAAGTRMYEYKKIAAQKTIEKKEAKLKEIKTILEEEITPTIQKLKEERSSYLEYQKVMREIEHLSRLYIAYQFLLAEDTKVRSAEELKEMQDKVIKLQEELSENDKKIKALNHEIEELEKRKDK

SEQ ID NO: 7813 - protein, 271 aa, Homo sapiens
MEKETGISQQRNYYFTQSKGEPLQIDHLVFVVHGIGPACDLRFRSIVQCVNDFRSVSLNLLQTHFKKAQENQQIGRVEFLPVNWHSPLHSTGVDVDLQRITLPSINRLRHFTNDTILDVFFYNSPTYCQTIVDTVASEMNRIYTLFLQRNPDFKGGVSIAGHSLGSLILFDILTNQKDSLGDIDSEKDSLNIVMDQGDTPTLEEDLKKLQLSEFFDIFEKEKVDKEALALCTDRDLQEIGIPLGPRKNLSSAVAVILEMVTIWMLALGRCL

SEQ ID NO: 7814 - protein, 605 aa, Homo sapiens; identical to SEQ ID NO: 7039

SEQ ID NO: 7815 - protein, 97 aa, Homo sapiens
MQTSSSRSVHLSEWQKNYFAITSGICTGPKADAYRAQILRIQYAWANSEISQVCATKLFKKYAEKYSAIIDSDNVESGLNNYAENILTLAGSQQTDS

SEQ ID NO: 7816 - protein, 110 aa, Homo sapiens; identical to SEQ ID NO: 5945

SEQ ID NO: 7817 - protein, 208 aa, Homo sapiens
MEPPMEPSGGEQEPGAVRFLDLPWEDVLLPHVLNRVPLRQLLRLQRVSRAFRSLVQLHLAGLRRFDAAQVGPQIPRAALARLLRDAEGLQELALAPCHEWLSDEDLVPVLARNPQLRSVALGGCGQLSRRALGALAEGCPRLQRLSLAHCDWVDGLALRGLADRCPALEELDLTACRQLKDEAIVYLAQRRGAGLRSLSLAVNANVGD

SEQ ID NO: 7818 - protein, 472 aa, Homo sapiens
VTHYKQYPPNTSKVYSYFECREKKTENSKLRKVKYEETVFYGLQYILNKYLKGKVVTKEKIQEAKDVYKEHFQDDVVNEKGWNYILEKYDGHLPIEIKAVPEGFVIPRGNVLFTVENTDPECYWLTNWIETILVQSWYPITVATNSREQKKILAKYLLETSGNLDGLEYKLHDFGYRGVSSQETAGIGASAHLVNFKGTDTVAGLALNKKYYGTKDPVPGYSVPAAEHSTITAWGKDHEKDAFEHIVTQFSSVPVSVVSNSYDIYNACEKIWGEDLRHLIVSRSTQAPLIIRPDSGNPLDTVLKVLEILGKKFPVTENSKGYKLLPPYLRVIQGDGVDINTLQEIVEGMKQKMWSIENIAFGSGGGLLQKLTRDLLNCSFKCSYVVTNGLGINVFKDPVADPNKRSKKGRLSLHRTPAGNFVTLEEGKGDLEEYGQDLLHTVFKNGKVTKSYSFDEIRKNAQLNIELEAAHH

SEQ ID NO: 7819 - protein, 171 aa, Homo sapiens
CKQSTKTEEKLRPTRTSSESIYSRPGSSIPGSPGHTIYAKVDNEILDYKDLAAIPKVKAIYDIERPDLITYEPFYTSGYDDKQERQSLGESAALSPTPSAEGYQDVRDRMIHRSTSQGSINSPVYSRHSYTPTTSRSPQHFHRPDQGINIYRKPPIYKQHVLFEVILLLLI

SEQ ID NO: 7820 - protein, 813 aa, Homo sapiens
MRLLDGKQTSRYSENACEKKIFSIYGHYPVVRAALRRKGWVEKKFHFLPKVIPDVEDEGARVNDDTCAKVKENQEMALEKTDNIHDVMSRLVKNEMPYLLWTIKRDIIDYHSLTYDQMLNHYAKTASFTTKIGLCVNMRSLPWYVPANPDSFFPRCYSLCTESEQQEFLEDFRRTMASSILKWVVSHQSCSRSSRSKPRDQREEAGSSDLSSRQDAENAEAKLRGLPGQLVDIACKVCQAYLGQLEHEDIDTSADAVEDLTEAEWEDLTQQYYSLVHGDAFISNSRNYFSQCQALLNRITSVNPQTDIDGLRNIWIIKPAAKSRGRDIVCMDRVEEILELAAADHPLSRDNKWVVQKYIETPLLICDTKFDIRQWFLVTDWNPLTIWFYKESYLRFSTQRFSLDKLDSAIHLCNNAVQKYLKNDVGRSPLLPAHNMWTSTRFQEYLQRQGRGAVWGSVIYPSMKKAIAHAMKVAQDHVEPRKNSFELYGADFVLGRDFRPWLIEINSSPTMHPSTPVTAQLCAQVQEDTIKVAVDRSCDIGNFELLWRQPVVEPPPFSGSDLCVAGVSVRRARRQVLPVCNLKASASLLDAQPLKARGPSAMPDPAQGPPSPALQRDLGLKEEKGLPLALLAPLRGAAESGGAAQPTRTKAAGKVELPACPCRHVDSQAPNTGVPVAQPAKSWDPNQLNAHPLEPVLRGLKTAEGALRPPPGGKGEGTVCSRLPHHGHHVAACQTTGTTWDGGPGVCFLRQLLASELPMGPGLPRDPRAPPCLVCRGLLPPAGPCKRCRSFCAAVLQGASFVRLGGRSCSAAP

SEQ ID NO: 7821 - protein, 105 aa, Homo sapiens
MDKNIGEQLNKAYEAFRQACMDRDSAVKELQQKTENYEQRIREQQEQLSLQQTIIDKLKSQLLLVNSTQDNNYGCVPLLEDSETRKNNLTLDQPQDKVISGIARE

SEQ ID NO: 7822 - protein, 271 aa, Homo sapiens
MAPVGVEKKLLLGPNGPAVAAAGDLTSEEEEGQSLWSSILSEVSTRARSKLPSGKNILVFDHTRCNVWILDGDLYHKGLLKFAVSAESLPETLVIFVADMSRPWTVMESLQKWASVLREHIDKMKIPPEKMRELERKFVKDFQDYMEPEEGCQGSPQRRGPLTSGSDEENVALPLGDNVLTHNLGIPVLVVCTKCDAVSVLEKEHDYRDEHLDFIQSHLRRFCLQYGAALIYTSVKEEKNLDLLYKYIVHKTYGFHFTTPALVVEKDAVFM

SEQ ID NO: 7823 - protein, 173 aa, Homo sapiens
MADRMQIVVILSEFFNTTWQEANCANCLTNNSEELSNSTVYFLNLFNHTLTCFEHNLQGNAHSLLQTKNYSEVCKNCREAYKTLSSLYSEMQKMNELENKAEPGTHLCIDVEDAMNITRKLWSRTFNCSVPCSDTVPVIAVSVFILFLPVVFYLSSFLHSEQKKRKLILPKRL

SEQ ID NO: 7824 - protein, 144 aa, Homo sapiens
  VARIANT 1: note = X can be any amino acid
XFIHCTDDSPDPCIEYELVLRKWCELIPGAEFRCFVKENKLIGISQRDYTQYYDHISKQKEEIRRCIQDFFKKHIQYKFLDEDFVFDIYRDSRGKVWLIDFNPFGEVTDSLLFTWEELISENNLNGDFSEVDAQEQKRNQQEDD

SEQ ID NO: 7825 - protein, 325 aa, Homo sapiens
  VARIANT 1: note = X can be any amino acid
XIQGEASRRAAGEPEAGSDYVKFSKEKYILDSSPEKLHKELEEELKLSSTDLRSHAWYHGRIPREVSETLVQRNGDFLIRDSLTSLGDYVLTCRWRNQALHFKINKVVVKAGESYTHIQYLFEQESFDHVPALVRYHVGSRKAVSEQSGAIIYCPVNRTFPLRYLEASYGLGQGSSKPASPVSPSGPKGSHMKRRSVTMTDGLTADKVTRSDGCPTSTSLPRPRDSIRSCALSMDQIPDLHSPMSPISESPSSPAYSTVTRVHAAPAAPSATALPASPVARRSSEPQLCPGSAPKTHGESDKGPHTSPSHTLGKASPSPSLSSYS

SEQ ID NO: 7826 - protein, 109 aa, Homo sapiens
MSSKGSSTDGRTDLANGSLSSSPEEMSGAEEGRETSSGIEVEASDLSLSLTGDDGGPNRTSTESRGTDTESSGEDKDSDSMEDTGHYSINDENRVHDRSEEEEEEEEEE

SEQ ID NO: 7827 - protein, 545 aa, Homo sapiens
AAGAPRLLGPGAVRGPAGVGRVAAGAMEGVLYKWTNYLSGWQPRWFLLCGGILSYYDSPEDAWKGCKGSIQMAVCEIQVHSVDNTRMDLIIPGEQYFYLKARSVAERQRWLVALGSAKACLTDSRTQKEKEFAENTENLKTKMSELRLYCDLLVQQVDKTKEVTTTGVSNSEEGIDVGTLLKSTCNTFLKTLEECMQIANAAFTSELLYRTPPGSPQLAMLKSSKMKHPIIPIHNSLERQMELSTCENGSLNMEINGEEEILMKNKNSLYLKSAEIDCSISSEENTDDNITVQGEIRKEDGMENLKNHDNNLTQSGSDSSCSPECLWEEGKEVIPTFFSTMNTSFSDIELLEDSGIPTEAFLASCYAVVPVLDKLGPTVFAPVKMDLVGNIKKVNQKYITNKEEFTTLQKIVLHEVEADVAQVRNSATEALLWLKRGLKFLKGFLTEVKNGEKDIQTALNNAYGKTLRQHHGWVVRGVFALALRAAPSYEDFVAALTVKEGDHQKEAFSIGMQRDLSLYLPAMEKQLAILDTLYEVHGLESDEVV

SEQ ID NO: 7828 - protein, 173 aa, Homo sapiens
MYTLLSGLYKYMFQKDEYCILILGLDNAGKTTFLEQSKTRFNKNYKGMSLSKITTTVGLNIGTVDVGKARLMFWDLGGQEELQSLWDKYYAECHGVIYVIDSTDEERLAESKQAFEKVVTSEALCGVPVLVLANKQDVETCLSIPDIKTAFSDCTSKIGRRDCLTQACSALTG

SEQ ID NO: 7829 - protein, 242 aa, Homo sapiens
MGLVCVLGDGKTEQKGGDKKRGVKRPREDHGRGYFEYIEENKYSRAKSPQPPVEEEDEHFDDTVVCLDTYNCDLHFKISRDRLSASSLTMESFAFLWAGGRASYGVSKGKVCFEMKVTEKIPVRHLYTKDIDIHEVRIGWSLTTSGMLLGEEEFSYGYSLKGIKTCNCETEDYGEKFDENDVITCFANFESDEVELSYAKNGQDLGVAFKISKEVLAGRPLFPHVLCHNCAVEFNFGQKEKP

SEQ ID NO: 7830 - protein, 973 aa, Homo sapiens
SSSDKESILTILKVLGDLLSVGTDRRIHYMISKGGSEALLQTLVDTARTAPPDYDILLPLFRLLAKVGLRDKKIGRKALELEALDVTLILARKNLSHGQNLLHCLWALRVFASSVSMGAMLGINGAMELLFKVITPYTRKRTQAIRAATEVLAALLKSKSNGRRAVNRGYVTSLLGLHQDWHSHDTANAYVQIRRGLLLCLRHIAALRSGREAFLAAQGMEILFSTTQNCLDDKSMEPVISVVLQILRQCYPTSPLPLVTASSAYAFPVPGCITTEPPHDLPEEDFEDDGDDEVDKDSDTEDGKVEDDDLETDVNKLSSKPGLDRPEEELMQYEVMCLELSYSFEELQSKLGDDLNSEKTQYANHHHIPAAASSKQHCYSKDQSSCGQEREYAVQTSLLCRVKTGRSTVHLGSKKNPGVNLYQNVQSNSLRRDSSESEIPDIQASPKADAWDVDAIFCPRMSASFSNSTRTREVVKVIDKLLQTHLKRVPFHDPYLYMAKARRTSSVVDFKMMAFPDVWGHCPPPTTQPMLERKCGVQRIRIFEDIRRLIQPSDVINKVVFSLDEPWPLQDNASNCLRFFSKFESGNLRKAIQVREFEYDLLVNADVNSTQHQQWFYFKVSGMQAAIPYHFNIINCEKPNSQFNYGMQPTLYSVKEALLGKPTWIRTGHEICYYKNHYRQSTAVAGGASGKCYYTLTFAVTFPHSEDVCYLAYHYPYTYTALMTHLDILEKSVNLKEVYFRQDVLCQTLGGNPCPLVTITAMPESNSDEHLEQFRHRPYQVITARVHPGESNASWVMKGTLEFLVSSDPVARLLRENFIFKIIPMLNPDGVINGNHRCSLSGEDLNRQWLSPSAHLQPTIYHAKGLLYHLSSIGRSPVVSHFLLVFCDFHGHSQKKNVFLYGCSIKETLWQAACTVGTSTILEEVNYRTLPKILDKLAPAFTMSSCSFLVEKSRASTARVVVWREMGVSRSYT

SEQ ID NO: 7831 - protein, 2587 aa, Homo sapiens
  VARIANT 1: note = X can be any amino acid
XSSITFSVKVEGRPVPTVHWLREEAERGVLWIGPDTPGYTVASSAQQHSLVLLDVGRQHQGTYTCIASNAAGQALCSASLHVSGLPKVEEQEKVKEALISTFLQGTTQAISAQGLETASFADLGGQRKEEPLAAKEALGHLSLAEVGTEEFLQKLTSQITEMVSAKITQAKLQVPGGDSDEDSKTPSASPRHGRSRPSSSIQESSSESEDGDARGEIFDIYVVTADYLPLGAEQDAITLREGQYVEVLDAAHPLRWLVRTKPTKSSPSRQGWVSPAYLDRRLKLSPEWGAAEAPEFPGEAVSEDEYKARLSSVIQELLSSEQAFVEELQFLQSHHLQHLERCPHVPIAVAGQKAVIFRNVRDIGRFHSSSFLQELQQCDTDDDVAMCFIKNQAAFEQYLEFLVGRVQAESVVVSTAIQEFYKKYAEEALLAGDPSQPPPPPLQHYLEQPVERVQRYQALLKELIRNKARNRQNCALLEQAYAVVSALPQRAENKLHVSLMENYPGTLQALGEPIRQGHFIVWEGAPGARMPWKGHNRHVFLFRNHLVICKPRRDSRTDTVSYVFRNMMKLSSIDLNDQVEGDDRAFEVWQEREDSVRKYLLQARTAIIKSSWVKEICGIQQRLALPVWRPPDFEEELADCTAELGETVKLACRVTGTPKPVISWYKDGKAVQVDPHHILIEDPDGSCALILDSLTGVDSGQYMCFAASAAGNCSTLGKILVQVPPRFVNKVRASPFVEGEDAQFTCTIEGAPYPQIRWYKDGALLTTGNKFQTLSEPRSGLLVLVIRAASKEDLGLYECELVNRLGSARASAELRIQSPMLQAQEQCHREQLVAAVEDTTLERADQEVTSVLKRLLGPKAPGPSTGDLTGPGPCPRGAPALQETGSQPPVTGTSEAPAVPPRVPQPLLHEGPEQEPEAIARAQEWTVPIRMEGAAWPGAGTGELLWDVHSHVVRETTQRTYTYQAIDTHTARPPSMQVTIEDVQAQTGGTAQFEAIIEGDPQPSVTWYKDSVQLVDSTRLSQQQEGTTYSLVLRHVASKDAGVYTCLAQNTGGQVLCKAELLVLGGDNEPDSEKQSHRRKLHSFYEVKEEIGRGVFGFVKRVQHKGNKILCAAKFIPLRSRTRAQAYRERDILAALSHPLVTGLLDQFETRKTLILILELCSSEELLDRLYRKGVVTEAEVKVYIQQLVEGLHYLHSHGVLHLDIKPSNILMVHPAREDIKICDFGFAQNITPAELQFSQYGSPEFVSPEIIQQNPVSEASDIWAMGVISYLSLTCSSPFAGESDRATLLNVLEGRVSWSSPMAAHLSEDAKDFIKATLQRAPQARPSAAQCLSHPWFLKSMPAEEAHFINTKQLKFLLARSRWQRSLMSYKSILVMRSIPELLRGPPDSPSLGVARHLCRDTGGSSSSSSSSDNELAPFARAKSLPPSPVTHSPLLHPRGFLRPSASLPEEAEASERSTEAPAPPASPEGAGPPAAQGCVPRHSVIRSLFYHQAGESPEHGALAPGSRRHPARRRHLLKGGYIAGALPGLREPLMEHRVLEEEAAREEQATLLAKAPSFETALRLPASGTHLAPGHSHSLEHDSPSTPRPSSEACGEAQRLPSAPSGGAPIRDMGHPQGSKQLPSTGGHPGTAQPERPSPDSPWGQPAPFCHPKQGSAPQEGCSPHPAVAPCPPGSFPPGSCKEAPLVPSSPFLGQPQAPPAPAKASPPLDSKMGPGDISLPGRPKPGPCSSPGSASQASSSQVSSLRVGSSQVGTEPGPSLDAEGWTQEAEDLSDSTPTLQRPQEQATMRKFSLGGRGGYAGVAGYGTFAFGGDAGGMLGQGPMWARIAWAVSQSEEEEQEEARAESQSEEQQEARAESPLPQVSARPVPEVGRAPTRSSPEPTPWEDIGQVSLVQIRDLSGDAEAADTISLDISEVDPAYLNLSDLYDIKYLPFEFMIFRKVPKSAQPEPPSPMAEEELAEFPEPTWPWPGELGPHAGLEITEESEDVDALLAEAAVGRKRKWSSPSRSLFHFPGRHLPLDEPAELGLRERVKASVEHISRILKGRPEGLEKEGPPARGSKPGLASFRLSGLKSWDRAPTFLRELSDETVVLGQSVTLACQVSAQPAAQATWSKDGAPLESSSRVLISATLKNFQLLTILVVVAEDLGVYTCSVSNALGTVTTTGVLRKAERPSSSPCPDIGEVYADGVLLVWKPVESYGPVTYIVQCSLEGGSWTTLASDIFDCCYLTSKLSRGGTYTFRTACVSKAGMGPYSSPSEQVLLGGPSHLASEEESQGRSAQPLPSTKTFAFQTQIQRGRFSVVRQCWEKASGRALAAKIIPYHPKDKTAVLREYEALKGLRHPHLAQLHAAYLSPRHLVLILELCSGPELLPCLAERASYSESEVKDYLWQMLSATQYLHNQHILHLDLRSENMIITEYNLLKVVDLGNAQSLSQEKVLPSDKFKDYLETMELLEGQGAVPQTDIWAIGVTAFIMLSAEYPVSSEGARDLQRGLARGSGLVRLSRCYAGLSGGAVAFLRSTLCAQPWGRPCASSCLQCPWLTEEGPACSRPAPVTFPTARLRVFVRNREKRRALLYKRHNLAQVR

SEQ ID NO: 7832 - protein, 582 aa, Homo sapiens [sequence omitted]

SEQ ID NO: 7833 - protein, 127 aa, Homo sapiens
MVSSGRRWLREQQHRRWRLHCLKLQPLSPVPSDIEISRGQTPKAVDVLAKEIGLLADEIEIYGKSKAKVRLSVLERLKDQADGKYVLVAGITPTPLGEGKSTVTIGLVQALTAHLNVNSFACLRQPS

SEQ ID NO: 7834 - protein, 641 aa, Homo sapiens
MKIFCSRANPTTGSVEWLEEDEHYDYHQEIARSSYADMLHDKDRVFKPMADAAVKIVEKNGFSDKIKVINKHSTEVTVGPEGDMPCRANILVTELFDTELIGEGALPSYEHAHRHLVEENCEAVPHRATVYAQLVESGRMWSWNKLFPIHVQTSLGEQVIVPPVDVESCPGAPSVCDIQLNQVSPADFTVLSDVLPMFSIDFSKQVSSSAACHSRRFEPLTSGRAQVVLSWWDIEMDPEGKIKCTMAPFWAHSDPEEMQWRDHWMQCVYFLPQEEPVVQGSALYLVAHHDDYCVWYSLQRTSPEKNERVRQMRPVCDCQAHLLWNRPRFGEINDQDRTDRYVQALRTVLKPDSVCLCVSDGSLLSVLAHHLGVEQVFTVESSAASHKLLRKIFKANHLEDKINIIEKRPELLTNEDLQGRKVSLLLGEPFFTTSLLPWHNLYFWYVRTAVDQHLGPGAMVMPQAASLHAVVVEFRDLWRIRSPCGDCEGFDVHIMDDMIKRALDFRESREAEPHPLWEYPCRSLSEPWQILTFDFQQPVPLQPLCAEGTVELRRPGQSHAAVLWMEYHLTPECTLSTGLLEPADPEGGCCWNPHCKQAVYFFSPAPDPRALLGGAAVSYAVEFHPDTGDIIMEFRHADTPD

SEQ ID NO: 7835 - protein, 99 aa, Homo sapiens
MVVKLLSNKRSQAVGILMSSLHLDMKDIQHAVVNLDNSVVDLETLQALYENRAQSDELEKIEKHGRSSKDKENAKSLDKPEQFLYELSLIPNFSERVFC

SEQ ID NO: 7836 - protein, 129 aa, Homo sapiens
MGGCFSKPKPVELKIEVVLPEKERGKEELSASGKGSPRAYQGNGTARHFHTEERLSTPHPYPSPQDCVEAAVCHVKDLENGQMREVELGWGKVLLVKDNGEFHALGHKCPHYGAPLVKGVLSRGRVRCP

SEQ ID NO: 7837 - protein, 150 aa, Homo sapiens
MNLAEICDNAKKGREYALLGNYDSSMVYYQGVMQQIQRHCQSVRDPAIKGKWQQVRQELLEEYEQVKSIVSTLESFKIDKPPDFPVSCQDEPFRDPAVWPPPVPAEHRAPPQIRRPNREVRPLRKEMAGVGARGPVGRAHPISKSEKPST

SEQ ID NO: 7838 - protein, 165 aa, Homo sapiens
MGVNQSVGFPPVTGPHLVGCGDVMEGQNLQGSFFRLFYPCQKAEETMEQPLWIPRYEYCTGLAEYLQFNKRCGGLLFNLAVGSCRLPVSWNGPFKTKDSGYPLIIFSHGLGAFRTLYSAFCMELASRGFVVAVPEHRDRSAATTYFCKQAPEENQPTNESLQEEW

SEQ ID NO: 7839 - protein, 89 aa, Homo sapiens; identical to SEQ ID NO: 6950

SEQ ID NO: 7840 - protein, 2003 aa, Homo sapiens
MEERKHETMNPAHVLFDRFVQATTCKGTLKAFQELCDHLELKPKDYRSFYHKLKSKLNYWKAKALWAKLDKRGSHKDYKKGKACTNTKCLIIGAGPCGLRTAIDLSLLGAKVVVIEKRDAFSRNNVLHLWPFTIHDLRGLGAKKFYGKFCAGAIDHISIRQLQLILLKVALILGIEIHVNVEFQGLIQPPEDQENERIGWRALVHPKTHPVSEYEFEVIIGGDGRRNTLEGFRRKEFRGKLAIAITANFINRNTTAEAKVEEISGVAFIFNQKFFQELREATGIDLENIVYYKDDTHYFVMTAKKQSLLDKGVILHDYADTELLLSRENVDQEALLSYAREAADFSTQQQLPSLDFAINHYGQPDVAMFDFTCMYASENAALVREQNGHQLLVALVGDSLLEPFWPMGTGIARGFLAAMDSAWMVRSWSLGTSPLEVLAERESIYRLLPQTTPENVSKNFSQYSIDPVTRYPNINVNFLRPSQVRHLYDTGETKDIHLEMESLVNSRTTPKLTRNESVARSSKLLGWCQRQTDGYAGVNVTDLTMSWKSGLALCAIIHRYRPDLIDFDSLDEQNVEKNNQLAFDIAEKELGISPIMTGKEMASVGEPDKLSMVMYLTQFYEMFKDSLPSSDTLDLNAEEKAVLIASTRSPISFLSKLGQTISRKRSPKDKKEKDLDGAGKRRKTSQSEEEEAPRGHRGERPTLVSTLTDRRMDVAVGNQNKVKYMATQLLAKFEENAPAQSIGIRRQGSMKKEFPQNLGGSDTCYFCQKRVYVMERLSAEGKFFHRSCFKCEYCATTLRLSAYAYDIEDGKFYCKPHYCYRLSGYAQRKRPAVAPLSGKEAKGPLQDGATTDANGRANAVASSTERTPGSGVNGLEEPSIAKRLRGTPERIELENYRLSLRQAEALQEVPEETQAEHNLSSVLDTGAEEDVASSSSESEMEEEGEEEEEEPRLPPSDLGGVPWKEAVRIHALLKGKSEEELEASKSFGPGNEEEEEEEEEYEEEEEEDYDEEEEESSEAGNQRLQQVMHAADPLEIQADVHWTHIREREEEERMAPASESSASGAPLDENDLEEDVDSEPAEIEGEAAEDGDPGDTGAELDDDQHWSDSPSDADRELRLPCPAEGEAELELRVSEDEEKLPASPKHQERGPSQATSPIRSPQESALLFIPVHSPSTEGPQLPPVPAATQEKSPEERLFPEPLLPKEKPKADAPSDLKAVHSPIRSQPVTLPEARTPVSPGSPQPQPPVAASTPPPSPLPICSQPQPSTEATVPSPTQSPIRFQPAPAKTSTPLAPLPVQSQSDTKDRLGSPLAVDEALRRSDLVEEFWMKSAEIRRSLGLTPVDRSKGPEPSFPTPAFRPVSLKSYSVEKSPQDEGLHLLKPLSIPKRLGLPKPEGEPLSLPTPRSPSDRELRSAQEERRELSSSSGLGLHGSSSNMKTLGSQSFNTSDSAMLTPPSSPPPPPPPGEEPATLRRKLREAEPNASVVPPPLPATWMRPPREPAQPPREEVARGSSFVESVEEIPFADDVEDTYDDKTEDSSLQEKFFTPPSCWPRPEKPRHPPLAKENGRLPALEGTLQPQKRGLPLVSAEAKELAEERMRAREKSVKSQALRDAMARQLSRMQQMELASGAPRPRKASSAPSQGKERRPDSPTRPTLRGSEEPTLKHEATSEEVLSPPSDSGGPDGSFTSSEGSSGKSKKRSSLFSPRRNKKEKKSKGEGRPPEKPSSNLLEEAAAKPKSLWKSVFSGYKKDKKKKADDKSCPSTPSSGATVDSGKHRVLPVVRAELQLRRQLSFSEDSDLSSDDVLEKSSQKSRREAAYTEEELNAKLTRRVQKAARRQAKQEELKRLHRAQIIQRQLQQVEERQRRLEERGVAVEKALRGEAGMGKKDDPKLMQEWFKLVQEKNAMVRYESELMIFARELELEDRQSRLQQELRERMAVEDHLKTEEELSEEKQILNEMLEVVEQRDSLVALLEEQRLREREEDKDLEAAMLSKGFSLNWS

SEQ ID NO: 7841 - protein, 179 aa, Homo sapiens
MSSNECFKCGRSGHWARECPTGGGRGRGMRSRGRGGFTSDRGFQFVSSSLPDICYRCGESGHLAKDCDLQEDVEACYNCGRGGHIAKDCKEPKREREQCCYNCGKPGHLARDCDHADEQKCYSCGEFGHIQKDCTKVKCYRCGETGHVAINCSKTSEVNCYRCGESGHLARECTIEATA

SEQ ID NO: 7842 - protein, 379 aa, Homo sapiens
ARAVPVGSGLRGLQRTLPLVVILGATGTGKSTLALQLGQRLGGEIVSADSMQPQEMGTEKVIDRKVELEKEDGLVLHKRLSQVDPEMAAKLHPHDKRKVARSLQVFEETGISHSEFLHRQHTEEGGGPLGGPLKFSNPCILWLHADQADERLDKRVDDMLAAGLLEELRDFHRRYNQKNVSENSQDYQHGIFQSIGFKEFHEYLITEGKCTLETSNQLLKKGIEALKQVTKRYARKQNRWVKNRFLSRPGPIVPPVYGLEVSDVSKWEESVLEPALEIVQSFIQGHKPTATPIKMPYNEAENKRSYHLCDLCDRIIIGDREWAAHIKSKSHLNQLKKRRRLDSDAVNTIESQSVSPDHNKEPKEKGSPGQNDQELKCSV

SEQ ID NO: 7843 - protein, 160 aa, Homo sapiens; identical to SEQ ID NO: 6461

SEQ ID NO: 7844 - protein, 271 aa, Homo sapiens
MNLEKLSKPELLTLFSILEGELEARDLVIEALKAQHRDTFIEERYGKYNISDPLMALQRDFETLKEKNDGEKQPVCTNPLSILKVVMKQCKNMQERMLSQLAAAESRHRKVILDLEEERQRHAQDTAEGDDVTYMLEKERERLTQQLEFEKSQVKKFEKEQKKLSSQLEEERSRHKQLSSMLVLECKKATNKAAEEGQKAGELSLKLEKEKSRVSKLEEELAAERKRGLQTEAQVEKQLSEFDIEREQLRAKLNREENRTKTLKEEMESLK

SEQ ID NO: 7845 - protein, 493 aa, Homo sapiens
MDQDYERRLLRQIVIQNENTMPRVTEMRRTLTPASSPVSSPSKHGDRFIPSRAGANWSVNFHRINENEKSPSQNRKAKDATSDNGKDGLAYSALLKNELLGAGIEKVQDPQTEDRRLQPSTPEKKGLFTYSLSTKRSSPDDGNDVSPYSLSPVSNKSQKLLRSPRKPTRKISKIPFKVLDAPELQDDFYLNLVDWSSLNVLSVGLGTCVYLWSACTSQVTRLCDLSVEGDSVTSVGWSERGNLVAVGTHKGFVQIWDAAAGKKLSMLEGHTARVGALAWNAEQLSSGSRDRMILQRDIRTPPLQSERRLQGHRQEVCGLKWSTDHQLLASGGNDNKLLVWNHSSLSPVQQYTEHLAAVKAIAWSPHQHGLLASGGGTADRCIRFWNTLTGQPLQCIDTGSQVCNLAWSKHANELVSTHGYSQNQILVWKYPSLTQVAKLTGHSYRVLYLAMSPDGEAIVTGAGDETLRFWNVFSKTRSTKESVSVLNLFTRIR

SEQ ID NO: 7846 - protein, 183 aa, Homo sapiens
MKKEHVLHCQFSAWYPFFRGVTIKSVILPLPQNVKDYLLDDGTLVVSGRDDPPTHSQPDSDDEAEEIQWSDDENTATLTDAYWIAMNSSLKCKTLSDIFLLFKSSDFITRDFTQPFIHCTDDSPDPCIEYELVLRKWCELIPGAEFRCFVKENKLIGISQRDYTQYYDHISKQKEEIRRCIQD

SEQ ID NO: 7847 - protein, 223 aa, Homo sapiens; identical to SEQ ID NO: 5857

SEQ ID NO: 7848 - protein, 115 aa, Homo sapiens
MPILLFLIDTSASMNQRSHLGTTYLDTAKGAVETFMKLRARDPASRGDRYMLVTFEEPPYAIKAGWKENHATFMNELKNLQAEGLTTLGQSLRTAFDLLNLNRLVTGIDNYGQVG

SEQ ID NO: 7849 - protein, 129 aa, Homo sapiens; identical to SEQ ID NO: 6440

SEQ ID NO: 7850 - protein, 891 aa, Homo sapiens
MVAPVLETSHVFCCPNRVRGVLNWSSGPRGLLAFGTSCSVVLYDPLKRVVVTNLNGHTARVNCIQWICKQDGSPSTELVSGGSDNQVIHWEIEDNQLLKAVHLQGHEGPVYAVHAVYQRRTSDPALCTLIVSAAADSAVRLWSKKGPEVMCLQTLNFGNGFALALCLSFLPNTDVTWKTGQVERGRAWKPPASLALCSRSCDSMVSCYASILCKALWKEKLHTFWHHNRISFLPSAFRPIPILACGNDDCRIHIFAQQNDQFQKVLSLCGHEDWIRGVEWAAFGRDLFLASCSQDCLIRIWKLYIKSTSLETQDDDNIRLKENTFTIENESVKIAFAVTLETVLAGHENWVNAVHWQPVFYKDGVLQQPVRLLSASMDKTMILWAPDEESGVWLEQVRVGEVGGNTLGFYDCQFNEDGSMIIAHAFHGALHLWKQNTVNPREWTPEIVISGHFDGVQDLVWDPEGEFIITVGTDQTTRLFAPWKRKDQSQVTWHEIARPQIHGYDLKCLAMINRFQFVSGADEKVLRVFSAPRNFVENFCAITGQSLNHVLCNQDSDLPEGATVPALGLSNKAVFQGDIASQPSDEEELLTSTGFEYQQVAFQPSILTEPPTEDHLLQNTLWPEVQKLYGHGYEIFCVTCNSSKTLLASACKAAKKEHAAIILWNTTSWKQVQNLVFHSLTVTQMAFSPNEKFLLAVSRDRTWSLWKKQDTISPEFEPVFSLFAFTNKITSVHSRIIWSCDWSPDSKYFFTGSRDKKVVVWGECDSTDDCIEHNIGPCSSVLDVGGAVTAVSVCPVLHPSQRYVVAVGLECGKICLYTWKKTDQVPEINDWTHCVETSQSQSHTLAIRKLCWKNCSGKTEQKEAEGAEWLHFASCGEDHTVKIHRVNKCAL

SEQ ID NO: 7851 - protein, 189 aa, Homo sapiens
MGPLAAVELFYDVLSPYSWLGFEILCRYQNIWNINLQLRPSLITGIMKDSGNKPPGLLPRKGLYMANDLKLLRHHLQIPIHFPKDFLSVMLEKGSLSAMRFLTAVNLEHPEMLEKASRELWMRVWSRNEDITEPQSILAAAEKAGMSAEQAQGLLEKIATPKVKNQLKETTEAACRYGERSGWALYLQP

SEQ ID NO: 7852 - protein, 493 aa, Homo sapiens
MMKRQLHRMRQLAQTGSLGRTPETAEFLGEDLLQVEQRLEPAKRAAHNIHKRLQACLQGQSGADMDKRVKKLPLMALSTTMAESFKELDPDSSMGKALEMSCAIQNQLARILAEFEMTLERDVLQPLSRLSEEELPAILKHKKSLQKLVSDWNTLKSRLSQATKNSGSSQGLGGSPGSHSHTTMANKVETLKEEEEELKRKVEQCRDEYLADLYHFVTKEDSYANYFIRLLEIQADYHRRSLSSLDTALAELRENHGQADHSPSMTATHFPRVYGVSLATHLQELGREIALPIEACVMMLLSEGMKEEGLFRLAAGASVLKRLKQTMASDPHSLEEFCSDPHAVAGALKSYLRELPEPLMTFDLYDDWMRAASLKEPGARLQALQEVCSRLPPENLSNLRYLMKFLARLAEEQEVNKMTPSNIAIVLGPNLLWPPEKEGLEYSGAISAHCNLRLPGSSDSSASACQVAGTTGTRPSWMQPPCLPSRWWASSRR

SEQ ID NO: 7853 - protein, 14 aa, Homo sapiens
MAMAPSPSLVQVYT

SEQ ID NO: 7854 - protein, 275 aa, Homo sapiens; identical to SEQ ID NO: 4746

SEQ ID NO: 7855 - protein, 501 aa, Homo sapiens
MAAPEPAPRRAREREREREDESEDESDILEESPCGRWQKRREQVNQGNMPGLQSTFLAMDTEEGVEVVWNELHFGDRKAFAAHEEKIQTVFEQLVLVDHPNIVKLHKYWLDTSEACARVIFITEYVSSGSLKQFLKKTKKNHKAMNARAWKRWCTQILSALSFLHACSPPIIHGNLTSDTIFIQHNGLIKIGSVWHRIFSNALPDDLRSPIRAEREELRNLHFFPPEYGEVADGTAVDIFSFGMCALEMAVLEIQTNGDTRVTEEAIARARHSLSDPNMREFILCCLARDPARRPSAHSLLFHRVLFEVHSLKLLAAHCFIQHQYLMPENVVEEKTKAMDLHAVLAELPRPRRPPLQWRYSEVSFMELDKFLEDVRNGIYPLMNFAATRPLGLPRVLAPPPEEVQKAKTPTPEPFDSETRKVIQMQCNLERSEDKARWHLTLLLVLEDRLHRQLTYDLLPTDSAQDLASELVHYGFLHEDDRMKLAAFLESTFLKYRGTQA

SEQ ID NO: 7856 - protein, 11 aa, Homo sapiens
MTAPSCAFPVQ

SEQ ID NO: 7857 - protein, 177 aa, Homo sapiens
MLLDKNVPNPRIKLIDFGIAHKIEAGNEFKNIFGTPEFVAPEIVNYEPLGLEADMWSIGVITYILLSGASPFLGETKQETLTNISAVNYDFDEEYFSNTSELAKDFIRRLLVKDPKRRMTIAQSLEHSWIKAIRRRNVRGEDSGRKPERRRLKTTRLKEYTIKSHSSASPIVAPVDA

SEQ ID NO: 7858 - protein, 204 aa, Homo sapiens
MGDKKSPTRPKRQPKPSSDEGYWDCSVCTFRNSAEAFKCMMCDVRKGTSTRSTLFEVIVSASRTKEPLKFPISGRKPRPVSQLVAQQVTQQFVPPTQSKKEKKDKVEKEKSEKETTSKKNSHKKTRPRLKNVDRSSAQHLEVTVGDLTVIITDFKEKTKSPPASSAASADQHSQSGSSSDNTERGMSRSSSPRGEASSLNGESH

SEQ ID NO: 7859 - protein, 449 aa, Homo sapiens; identical to SEQ ID NO: 5907

SEQ ID NO: 7860 - protein, 50 aa, Homo sapiens
KTGLTGSPSSLWDLLREMFVVCSKEQLQSGGKYSHQVWAPFSPLASGAAF

SEQ ID NO: 7861 - protein, 1461 aa, Homo sapiens
MQRELVYARGDGPGAPRPGSTAHPPHAIPNSPPSTPVPHSMPPSPSRIPYGGTRSMVVPGNATIPRDRISSLPVSRPISPSPSAILERRDVKPDEDMSGKNIAMYRNEGFYADPYLYHEGRMSIASSHGGHPLDVPDHIIAYHRTAIRSASAYCNPSMQAEMHMEQSLYRQKSRKYPDSHLPTLGSKTPPASPHRVSDLRMIDMHAHYNAHGPPHTMQPDRASPSRQAFKKEPGTLVYIEKPRSAAGLSSLVDLGPPLMEKQVFAYSTATIPKDRETSEKMMKTTANRNHTDSAGTPHVSGGKMLSALESTVPPSQPPPVGTSAIHMSLLEMRRSVAELRLQLQQMRQLQLQNQELLRAMMKKAELEISGKVMETMKRLEDPVQRQRVLVEQERQKYLHEEEKIVKKLCELEDFVEDLKKDSTAASRLVTLKDVEDGAFLLRQVGEAVATLKGEFPTLQNKMRAILRIEVEAVRFLKEEPHKLDSLLKRVRSMTDVLTMLRRHVTDGLLKGTDAAQAAQYMAMEKATAAEVLKSQEEAAHTSGQPFHSTGAPGDAKSEVVPLSGMMVRHAQSSPVVIQPSQHSVALLNPAQNLPHVASSPAVPQEATSTLQMSQAPQSPQIPMNGSAMQSLFIEEIHSVSAKNRAVSIEKAEKKWEEKRQNLDHYNGKEFEKLLEEAQANIMKSIPNLEMPPATGPLPRGDAPVDKVELSEDSPNSEQDLEKLGGKSPPPPPPPPRRSYLPGSGLTTTRSGDVVYTGRKENITAKASSEDAGPSPQTRATKYPAEEPASAWTPSPPPVTTSSSKDEEEEEEEGDKIMAELQAFQKCSFMDVNSNSHAEPSRADSHVKDTRSGATVPPKEKKNLEFFHEDVRKSDVEYENGPQMEFQKVTTGAVRPSDPPKWERGMENSISDASRTSEYKTEIIMKENSISNMSLLRDSRNYSQETVPKASFGFSGISPLEDEINKGSKISGLQYSIPDTENQTLNYGKTKEMEKQNTDKCHVSSHTRLTESSVHDFKTEDQEVITTDFGQVVLRPKEARHANVNPNEDGESSSSSPTEENAATDNIAFMITETTVQVLSSGEVHDIVSQKGEDIQTVNIDARKEMTPRQEGTDNEDPVVCLDKKPVIIIFDEPMDIRSAYKRLSTIFEECDEELERMMMEEKIEEEEEEENGDSVVQNNNTSQMSHKKVAPGNLRTGQQVETKSQPHSLATETRNPGGQEMNRTELNKFSHVDSPNSECKGEDATDDQFESPKKKFKFKFPKKQLAALTQAIRTGTKTGKKTLQVVVYEEEEEDGTLKQHKEAKRFEIARSQPEDTPENTVRRQEQPSIESTSPISRTDEIRKNTYRTLDSLEQTIKQLENTISEMSPKALVDTSCSSNRDSVASSSHIAQEASPRPLLVPDEGPTALEPPTSIPSASRKGSSGAPQTSRMPVPMSAKNRPGTLDKPGKQSKLQDPRQYRQ

SEQ ID NO: 7862 - protein, 705 aa, Homo sapiens
MLTLLAEDRAVPSAPTGPGPLLEFALHEDLLTRVLTWQLQWDELGDGVEERRAEQLKLFEMLVSEARQPLLRHGPVREALLTLLDACGRPVPSSPALDEGLVLLLSQLCVCVAQEPSLLEFFLQPPPEPGAAPRLLLFSRLVPFVHREGTLGQQARDALLLLMALSAGSPTVGRYIADHSYFCPVLATGLSALYSSLPRKIEVPGDDWHCLRREDWLGVPALALFMSSLEFCNAVIQVAHPLVQKQLVDYIHNGFLVPVMGPALHKTSVEEMIASTAYLELFLRSISEPALLRTFLRFLLLHRHDTHTILDTLVARIGSNSRLCMVSLSLFRTLLNLSCEDVLLQLVLRYLVPCNHVMLSQKPAVRDVDLYGRAADKFLSLIPRCCRHHAPSPPRPEHASWARGPGSPSVDSSSVTTVPRPSTPSRLALFLRQQSLGGSESPGPAPCSPGLSASPASSPGRRPTPAEEPGELEDNYLEYLREARRGVDRCVRACRTWSAPYDGERPSPEPSPFGSRTKKRSLLPEEDRNNVGEGEEEELGRRGRAGGAGEGPGHLPPPQLNGVPGSWPEGAKKVRLVPKEGAGELLEGISEGMAGLEGFGQELRELEVALSNGGTGSESPLEPPLPLEEEEAYESFTCPPEPPGPFLSSPLRTLNQLPSQPFTGPFMAVLFAKLENMLQNSALSCSTPTWSSSPVSSPCCRCWAL

SEQ ID NO: 7863 - protein, 267 aa, Homo sapiens
MMRGYIKKVLKNTSYHVNQYLFIQHGWSGSGDQSVLYSCNLMRMVTRTKKIFVGGLSANTVVEDVKQYFEQFGKVEDAMLMFDKTTNRHRGFGFVTFENEDVVEKVCEIHFHEINNKMVECKKAQPKEVMFPPGTRGRARGLPYTMDAFMLGMGMLGYPNFVATYGRGYPGFAPSYGYQFPGFPAAAYGPVAAAAVAAARGSGSNPARPGGFPGANSPGPVADLYGPASQDSGVGNYISAASPQPGSGFGHGIAGPLIATAFTNGYH

SEQ ID NO: 7864 - protein, 160 aa, Homo sapiens
MSSPLASLSKTRKVPLPSEPMNPGRRGIRIYGDVPASHDSELMAFMTRKLWDLEQQVKAQTDEILSKDQKIAALEDLVQTLRPHPAEATLQRQEELETMCVQLQRQVREMERFLSDYGLQWVGEPMDQEDSESKTVSEHGERDWMTAKKFWKPGGLIGAP

SEQ ID NO: 7865 - protein, 153 aa, Homo sapiens
  VARIANT 1: note = X can be any amino acid
XSVQSPAQQQVPARPGAPSVQVPSPFLLQNQYEPVQPHWFYCKEVEYKQLWMPFSVFDSLNLEEIYNSVQPDPESVVLGTDGGRYDVYLYDRIRKAAYWEEEPAEVRRCTWFYKGDTDSRFIPYTEEFSEKLEVRVLYFFMSFFKKCRSYIHW

SEQ ID NO: 7866 - protein, 353 aa, Homo sapiens
MEQELEQLAQLPSSKNSLLKDAMAPGTPKSLLLSASIKREGESPTASPHSSATDDLHHSDRYQTFLRVRANRQTRLNARIGKMKRRKQDEGQVCPLCNRPLAGSEQEMSRHVEHCLSKREGSCMAEDDAVDIEHENNNRFEEYEWCGQKRIRATTLLEGGFRGSGFIMCSGKENPDSDADLDVDGDDTLEYGKPQYTEADVIPCTGEEPGEAKEREALRGAVLNGGPPSTRITPEFSKWASDEMPSTSNGESSKQEAMQKTCKNSDIEKITEDSAVTTFEALKARVRELERQLSRGDRYKCLICMDSYSMPLTSIQCWHVHCEECWLRTLGAKKLCPQCNTITAPGDLRRIYL

SEQ ID NO: 7867 - protein, 592 aa, Homo sapiens; identical to SEQ ID NO: 5872

SEQ ID NO: 7868 - protein, 120 aa, Homo sapiens
LALQISENLFSNKVLNALKPEKDVDGVTDINLGKLVRGDAHECFVSPVAKAVIELLEKSGVNLDGKKILVVGAHGSLEAALQCLFQRKGSMTMSIQWKTRQLQSKTESRSVTRLECRRVI

SEQ ID NO: 7869 - protein, 388 aa, Homo sapiens
MSGTFLIRKPQLLQGVYAMGFNRPSKIQENALPMMLAEPPQNLIAQSQSGTGKTAAFVLAMLSRVEPSDRYPQCLCLSPTYELALQTGKVIEQMGKFYPELKLAYAVRGNKLERGQKISEQIVIGTPGTVLDWCSKLKFIDPKKIKVFVLDEADVMIATQGHQDQSIRIQRMLPRNCQMLLFSATFEDSVWKFAQKVVPDPNVIKLKREEETLDTIKQYYVLCSSRDEKFQALCNLYGAITIAQAMIFCHTRKTASWLAAELSKEGHQVALLSGEMMVEQRAAVIERFREGKEKVLVTTNVCARGIDVEQVSVVINFDLPVDKDGNPDNETYLHRIGRTGRFGKRGLAVNMVDSKHSMNILNRIQEHFNKKIERLDTDDLDEIEKIAN

SEQ ID NO: 7870 - protein, 606 aa, Homo sapiens
LRQCYNYNCPSFLAAALARATSDEVLQSDLSAHYIPKETDGTEGTVEIETVKLARSVFSKLHEICCSWVKDFPLRRRPQLYYETSIHAIKNMRKLFYKHISKKKKKRKKRDWDQEEQAYFAVFDGHGGVDAAIYASIHLHVNLVRQEMFPHDPAEALCRAFRVTDERFVQKAARESLRCGTTGVVTFIRGNMLHVAWVGDSQVMLVRKGQAVELMKPHKPDREDEKQRIEALGGCVVWFGAWRVNGSLSVSRAIGDAEHKPYICGDADSASTVLDGTEDYLILACDGFYDTVNPDEAVKVVSDHLKENNGDSSMVAHKLVASARDAGSSDNITVIVVFLRDMNKAVNVSEESDWTENSFQGGQEDGGDDKENHGECKRPWPQHQCSAPADLGYDGRVDSFTDRTSLSPGSQINVLEDPGYLDLTQIEASKPHSAQFLLPVEMFGPGAPKKANLINELMMEKKSVQSSLPEWSGAGEFPTAFNLGSTGEQIYRMQSLSPVCSGLENEQFKSPGNRVSRLSHLRHHYSKKWHRFRFNPKFYSFLSAQEPSHKIGTSLSSLTGSGKRNRIRSSLPWRQNSWKGYSENMRKLRKTHDIPCPDLPWSYKIE

SEQ ID NO: 7871 - protein, 225 aa, Homo sapiens
MENLLQATKSHVDKVIMKLGKTNAKAVSEMRQKIWNNMPKDHPDHELIDPFPVPLVIIGSKYDVFQDFESEKRKVICKTLRFVAHYYGASLMFTSKSEALLLKIRGVINQLAFGIDKSKSICVDQNKPLFITAGLDSFGQIGSPPVPENDIGKLHAHSPMELWKKVYEKLFPPKSINTLKDIKDPARDPQYAENEVDEMRIQKDLELEQYKRSSSKSWKQIELDS

SEQ ID NO: 7872 - protein, 206 aa, Homo sapiens
MGFSNMEDDGPEEEERVAEPQANFNTPQALRFEELLANLLNEQHQIAKELFEQLKMKKPSAKQQKEVEKVKPQCKEVHQTLILDPAQRKRLQQQMQQHVQLLTQIHLLATCNPNLNPEASSTRICLKELGTFAQSSIALHHQYNPKFQTLFQPCNLMGAMQLIEDFSTHVSIDCSPHKTVKKTANEFPCLPKQVAWILATSKVFMY

SEQ ID NO: 7873 - protein, 155 aa, Homo sapiens
MGKDYYKILGIPSGANEDEIKKAYRKMALKYHPDKNKEPNAEEKFKEIAEAYDVLSDPKKRGLYDQYGEEGLKTGGGTSGGSSGSFHYTFHGDPHATFASFFGGSNPFDIFFASSRSTRPFSGFDPDDMDVDEDEDPFGAFGRFGFNGLSRGPRR

SEQ ID NO: 7874 - protein, 81 aa, Homo sapiens
MSISSDEVNFLVYRYLQESGFSHSAFTFGIESHISQSNINGALVPPAALISIIQKGLQYVEAEVSINEDGTLFDGRPIESL

SEQ ID NO: 7875 - protein, 414 aa, Homo sapiens
MAPVGVEKKLLLGPNGPAVAAAGDLTSEEEEGQSLWSSILSEVSTRARSKLPSGKNILVFGEDGSGKTTLMTKLQGAEHGKKGRGLEYLYLSVHDEDRDVVKDFQDYMEPEEGCQGSPQRRGPLTSGSDEENVALPLGDNVLTHNLGIPVLVVCTKCDAVSVLEKEHDYRDEHLDFIQSHLRRFCLQYGAALIYTSVKEEKNLDLLYKYIVHKTYGFHFTTPALVVEKDAVFIPAGWDNEKKIAILHENFTTVKPEDAYEDFIVKPPVRKLVHDKELAAEDEQVFLMKQQSLLAKQPATPTRASESPARGPSGSAAQGRGGPASVPSSSPGTSVKKPDPNIKNNAASEGVLASFFNSLLSKKTGSPGSPGAGGVQSTAKKSGQKTVLSNVQEELDRMTRKPDSMVTNSSTENEA

SEQ ID NO: 7876 - protein, 642 aa, Homo sapiens
MRSITQGACRFIWEDKGYISGDHINLVSSSLSSFPILQRSSEEKILYSDRLSLERQKLTVCPIINGEDHLRLLNFQHNFITRIQNISNLQKLISLDLYDNQIEEISGLSTLRCLRVLLLGKNRIKKISNLENLKSLDVLDLHGNQITKIENINHLCELRVLNLARNFLSHVDNLNGLDSLTELNLRHNQITFVRDVDNLPCLQHLFLSFNNISSFDSVSCLADSSSLSDITFDGNPIAQESWYKHTVLQNMMQLRQLDMKRITEEERRMASVLAKKEEEKKRESHKQSLLKEKKRLTINNVARQWDLQQQRVANIATNEDRKDSDSPQDPCQIDGSTLSAFPEETGPLDSGLNNALQGLSVIDTYLVEVDGDTLSLYGSGALESLDRNWSVQTAGMITTVSFTFIEFDEIVQVLPKLKIKFPNSLHLKFKETNLVMLQQFNALAQLRRIDQLTIDPQGNPVVNFTLWKYYVLFRLSHFSMQKINGTEVTQNDMIMAERLFGILAHVASSELPQYRLISILGDARKKQFRYLLESKGKKPGIINEENNDSKRLVGENTNRATLNYTTRDFYNEKLEEIKEKKKFCKTYIEDLVKEATEINMKNEALQKLWPQMFIELVRDAVIEIRNKNSYMKLCLQQITDQK

SEQ ID NO: 7877 - protein, 143 aa, Homo sapiens
RLGRYEVEKRCAVEKEDYDLAKEKKQQMEQYRAEVYEQLELHSLLDAELHSAVDPLLPATDPHPKINAESLPYDERPLPAIRKHYGEAVVEPEMSNADISDARRGGMLGEPEPLTEKALREASSAIDVLGETLVAEAYCKTWS

SEQ ID NO: 7878 - protein, 613 aa, Homo sapiens; identical to SEQ ID NO: 5032

SEQ ID NO: 7879 - protein, 182 aa, Homo sapiens
MGPLAAVELFYDVLSPYSWLGFEILCRYQNIWNINLQLRPSLITGIMKDSGSLSAMRFLTAVNLEHPEMLEKASRELWMRVWSRNEDITEPQSILAAAEKAGMSAEQAQGLLEKIATPKVKNQLKETTEAACRYGAFGLPITVAHVDGQTHMLFGSDRMELLAHLLGEKWMGPIPPAVNARL

SEQ ID NO: 7880 - protein, 101 aa, Homo sapiens
EGTSGKTALHLAVETQERGLVQFLLQAGAQVDARMLNGCTPLHLAAGRGLMGISSTLCKAGADSLLRNVEDETPQDLTEESLVLLPFDDLKISGKLLLCTD

SEQ ID NO: 7881 - protein, 4869 aa, Homo sapiens
MATMIPPVKLKWLEHLNSSWITEDSESIATREGVAVLYSKLVSNKEVVPLPQQVLCLKGPQLPDFERESLSSDEQDHYLDALLSSQLALAKMVCSDSPFAGALRKRLLVLQRVFYALSNKYHDKGKVKQQQHSPESSSGSADVHSVSERPRSSTDALIEMGVRTGLSLLFALLRQSWMMPVSGPGLSLCNDVIHTAIEVVSSLPPLSLANESKIPPMGLDCLSQVTTFLKGVTIPNSGADTLGRRLASELLLGLAAQRGSLRYLLEWIEMALGASAVVHTMEKGKLLSSQEGMISFDCFMTILMQMRRSLGSSADRSQWREPTRTSDGLCSLYEAALCLFEEVCRMASDYSRTCASPDSIQTGDAPIVSETCEVYVWGSNSSHQLVEGTQEKILQPKLAPSFSDAQTIEAGQYCTFVISTDGSVRACGKGSYGRLGLGDSNNQSTLKKLTFEPHRSIKKVSSSKGSDGHTLAFTTEGEVFSWGDGDYGKLGHGNSSTQKYPKLIQGPLQGKVVVCVSAGYRHSAAVTEDGELYTWGEGDFGRLGHGDSNSRNIPTLVKDISNVGEVSCGSSHTIALSKDGRTVWSFGGGDNGKLGHGDTNRVYKPKVIEALQGMFIRKVCAGSQSSLALTSTGQVYAWGCGACLGCGSSEATALRPKLIEELAATRIVDVSIGDSHCLALSHDNEVYAWGNNSMGQCGQGNSTGPITKPKKVSGLDGIAIQQISAGTSHSLAWTALPRDRQVVAWHRPYCVDLEESTFSHLRSFLERYCDKINSEIPPLPFPSSREHHSFLKLCLKLLSNHLALALAGGVATSILGRQAGPLRNLLFRLMDSTVPDEIQEVVIETLSVGATMLLPPLRERMELLHSLLPQGPDRWESLSKGQRMQLDIILTSLQDHTHVASLLGYSSPSDAADLSSVCTGYGNLSDQPYGTQSCHPDTHLAEILMKTLLRNLGFYTDQAFGELEKNSDKFLLGTSSSENSQPAHLHELLCSLQKQLLAFCHINNISENSSSVALLHKHLQLLLPHATDIYSRSANLLKESPWNGSVGEKLRDVIYVSAAGSMLCQIVNSLLLLPVSVARPLLSYLLDLLPPLDCLNRLLPAADLLEDQELQWPLHGGPELIDPAGLPLPQPAQSWVWLVDLERTIALLIGRCLGGMLQGSPVSPEEQDTAYWMKTPLFSDGVEMDTPQLDKCMSCLLEVALSGNEEQKPFDYKLRPEIAVYVDLALGCSKEPARSLWISMQDYAVSKDWDSATLSNESLLDTVSRFVLAALLKHTNLLSQACGESRYQPGKHLSEVYRCVYKVRSRLLACKNLELIQTRSSSRDRWISENQDSADVDPQEHSFTRTIDEEAEMEEQAERDREEGHPEPEDEEEEREHEVMTAGKIFQCFLSAREVARSRDRDRMNSGAGSGARADDPPPQSQQERRVSTDLPEGQDVYTAACNSVIHRCALLILGVSPVIDELQKRREEGQLQQPSTSASEGGGLMTRSESLTAESRLVHTSPNYRLIKSRSESDLSQPESDEEGYALSGRRNVDLDLAASHRKRGPMHSQLESLSDSWARLKHSRDWLCNSSYSFESDFDLTKSLGVHTLIENVVSFVSGDVGNAPGFKEPEESMSTSPQASIIAMEQQQLRAELRLEALHQILVLLSGMEEKGSISLAGSRLSSGFQSSTLLTSVRLQFLAGCFGLGTVGHTGGKGESGRLHHYQDGIRAAKRNIQIEIQVAVHKIYQQLSATLERALQANKHHIEAQQRLLLVTVFALSVHYQPVDVSLAISTGLLNVLSQLCGTDTMLGQPLQLLPKTGVSQLSTALKVASTRLLQILAITTGTYADKLSPKVVQSLLDLLCSQLKNLLSQTGVLHMASFGEGEQEDGEEEEKKVDSSGETEKKDFRAALARGSQHAAELHLGDFLVFLRRVVSSKAIQSKMASPKWTEVLLNIASQKCSSGIPLVGNLRTRLLALHVLEAVLPACESGVEDDQMAQIVERLFSLLSDCMWETPIAQAKHAIQIKEKEQEIKLQKQGELEEEDENLPIQEVSFDPEKAQCCLVENGQILTHGSGGKGYGLASTGVTSGCYQWKFYIVKENRGNEGTCVGVSRWPVHDFNHRTTSDMWLYRAYSGNLYHNGEQTLTLSSFTQGDFITCVLDMEARTISFGKNGEEPKLAFEDVDAAELYPCVMFYSSNPGEKVKICDMQMRGTPRDLLPGDPICSPVAAVLAEATIQLIRILHRTDRWTYCINKKMMERLHKIKICIKESGQKLKKSRSVQSREENEMREEKESKEEEKGKHTRHGLADLSELQLRTLCIEVWPVLAVIGGVDAGLRVGGRCVHKQTGRHATLLGVVKEGSTSAKVQWDEAEITISFPTFWSPSDTPLYNLEPCEPLPFDVARFRGLTASVLLDLTYLTGVHEDMGKQSTKRHEKKHRHESEEKGDVEQKPESESALDMRTGLTSDDVKSQSTTSSKSENEIASFSLDPTLPSVESQHQITEGKRKNHEHMSKNHDVAQSEIRAVQLSYLYLGAMKSLSALLGCSKYAELLLIPKVLAENGHNSDCASSPVVHEDVEMRAALQFLMRHMVKRAVMRSPIKRALGLADLERAQAMIYKLVVHGLLEDQFGGKIKQEIDQQAEESDPAQQAQTPVTTSPSASSTTSFMSSSLEDTTTATTPVTDTETVPASESPGVMPLSLLRQMFSSYPTTTVLPTRRAQTPPISSLPTSPSDEVGRRQSLTSPDSQSARPANRTALSDPSSRLSTSPPPPAIAVPLLEMGFSLRQIAKAMEATGARGEADAQNITVLAMWMIEHPGHEDEEEPQSGSTADSRPGAAVLGSGGKSNDPCYLQSPGDIPSADAAEMEEGFSESPDNLDHTENAASGSGPSARGRSAVTRRHKFDLAARTLLARAAGLYRSVQAHRNQSRREGISLQQDPGALYDFNLDEELEIDLDDEAMEAMFGQDLTSDNDILGMWIPEVLDWPTWHVCESEDREEVVVCELCECSVVSFNQHMKRNHPGCGRSANRQGYRSNGSYVDGWFGGECGSGNPYYLLCGTCREKYLAMKTKSKSTSSERYKGQAPDLIGKQDSVYEEDWDMLDVDEDEKLTGEEEFELLAGPLGLNDRRIVPEPVQFPDSDPLGASVAMVTATNSMEETLMQIGCHGSVEKSSSGRITLGEQAAALANPHDRVVALRRVTAAAQVLLARTMVMRALSLLSVSGSSCSLAAGLESLGLTDIRTLVRLMCLAAAGRAGLSTSPSAMASTSERSRGGHSKANKPISCLAYLSTAVGCLASNAPSAAKLLVQLCTQNLISAATGVNLTTVDDSIQARGSFLPSFLRGIAEENKLVTSPNFVVTQALVALLADKGAKLRPNYDKSEVEKKGPLELANALAACCLSSRLSSQHRQWAAQQLVRTLAAHDRDNQTTLQTLADMGGDLRKCSFIKLEAHQNRVMTCVWCNKKGLLATSGNDGTIRVWNVTKKQYSLQQTCVFNRLEGDAEESLGSPSDPSFSPVSWSISGKYLAGALEKMVNIWQVNGGKGLVDIQPHWVSALAWPEEGPATAWSGESPELLLVGRMDGSLGLIEVVDVSTMHRRELEHCYARGSDVSVTCIAWFSEDRPFAVGYFDGKLLLGTKEPLEKGGIVLIDAHKDTLISMKWDPTGHILMTCAKEDSVKLWGSISGCWCCLHSLCHPSIVNGIAWCRLPGKGSKLQLLMATGCQSGLVCVWRIPQDTTQTNVTSAEGWWEQESNCQDGYRKSSGAKCVYQLRGHITPVRTVAFSSDGLALVSGGLGGLMNIWSLRDGSVLQTVVIGSGAIQTTVWIPEVGVAACSNRSKDVLVVNCTAEWAAANHVLATCRTALKQQGVLGLNMAPCMRAFLERLPMMLQEQYAYEKPHVVCGDQLVHSPYMQCLASLAVGLHLDQLLCNPPVPPHHQNCLPDPASWNPNEWAWLECFSTTIKAAEALTNGAQFPESFTVPDLEPVPEDELVFLMDNSKWINGMDEQIMSWATSRPEDWHLGGKCDVYLWGAGRHGQLAEAGRNVMVPAAAPSFSQAQQVICGQNCTFVIQANGTVLACGEGSYGRLGQGNSDDLHVLTVISALQGFVVTQLVTSCGSDGHSMALTESGEVFSWGDGDYGKLGHGNSDRQRRPRQIEALQGEEVVQMSCGFKHSAVVTSDGKLFTFGNGDYGRLGLGNTSNKKLPERVTALEGYQIGQVACGLNHTLAVSADGSMVWAFGDGDYGKLGLGNSTAKSSPQKIDVLCGIGIKKVACGTQFSVALTKDGHVYTFGQDRLIGLPEGRARNHNRPQQIPVLAGVIIEDVAVGAEHTLALASNGDVYAWGSNSEGQLGLGHTNHVREPTLVTGLQGKNVRQISAGRCHSAAWTAPPVPPRAPGVSVPLQLGLPDTVPPQYGALREVSIHTVRARLRLLYHFSDLMYSSWRLLNLSPNNQNSTSHYNAGTWGIVQGQLRPLLAPRVYTLPMVRSIGKTMVQGKNYGPQITVKRISTRGRKCKPIFVQIARQVVKLNASDLRLPSRAWKVKLVGEGADDAGGVFDDTITEMCQELETGIVDLLIPSPNATAEVGYNRDRFLFNPSACLDEHLMQFKFLGILMGVAIRTKKPLDLHLAPLVWKQLCCVPLTLEDLEEVDLLYVQTLNSILHIEDSGITEESFHEMIPLDSFVGQSADGKMVPIIPGGNSIPLTFSNARGSEYVERAIEYRLHEMDRQVAAVREGMSWIVPVPLLSLLTAKQLEQMVCGMPEISVEVLKKVVRYREVDEQHQLVQWFWHTLEEFSNEERVLFMRFVSGRSRLPANTADISQRFQIMKVDRPYDSLPTSQTCFFQLRLPPYSSQLVMAERLRYAINNCRSIDMDNYMLSRNVDNAEGSDTDY

SEQ ID NO: 7882 - protein, 1210 aa, Homo sapiens; identical to SEQ ID NO: 6223

SEQ ID NO: 7883 - protein, 192 aa, Homo sapiens; identical to SEQ ID NO: 6709

SEQ ID NO: 7884 - protein, 600 aa, Homo sapiens; identical to SEQ ID NO: 6614

SEQ ID NO: 7885 - protein, 398 aa, Homo sapiens
MLRRKPSNASEKEFNLDDNIPEDDSGVPTPEDAGKSGKKLGKKWRAVISRTMNRKMGKMMVKALSEEMADTLEEGSASPTSPDYSLDSPGPEKMALAFSEQEEHELPVLSRQASTGSELCSPSPGSGSFGEEPPAPQYTGPFCGRARVHTDFTPSPYDHDSLKLQVRSASGLLWSLAGCAQKGSWTEPGYDSVSGGQGPPYPLSLAPFSSPLPQQKGDVIQIIEKPPVGTWLGLLNGKVGSFKFIYVDVLPEEAVGHARPSRRQSKGKRPKPKTLHELLERIGLEEHTSTLLLNGYQTLEDFKELRETHLNELNIMDPQHRAKLLTAAELLLDYDTGSEEAEEGAESSQEPVAHTVSEPKVDIPRDSGCFEGSESGRDDAELAGTEEQLQGLSLAGAP

SEQ ID NO: 7886 - protein, 333 aa, Homo sapiens
MGTRKKVHAFVRVKPTDDFAHEMIRYGDDKRSIDIHLKKDIRRGVVNNQQTDWSFKLDGVLHDASQDLVYETVAKDVVSQALDGYNGTIMCYGQTGAGKTYTMMGATENYKHRGILPRALQQVFRMIEERPTHAITVRVSYLEIYNESLFDLLSTLPYVGPSVTPMTIVENPQGVFIKGLSVHLTSQEEDAFSLLFEGETNRIIASHTMNKNSSRSHCIFTIYLEAHSRTLSEEKYITSKINLVDLAGSERLGKSGSEGQVLKEATYINKSLSFLEQAIIALGDQKRDHIPFRQCKLTHALKDSLGGNCNMVLVTNIYGEAAQLEETGSRLWL

SEQ ID NO: 7887 - protein, 415 aa, Homo sapiens; identical to SEQ ID NO: 5668

SEQ ID NO: 7888 - protein, 1035 aa, Homo sapiens
MSEQERIQECLRKEIRSLLISTKDGLSPQELEKEYLLMVGNHLPLRILGYRSTMELVLDMPDVVRVCPGAGGTVILKAIPDESTKGIASLVAKQRSSHKLRNSMHKGRPSIYSGPRSHRRVPYRGRVAPILPAVVKSELKDLLALSPVLLSDFEKAFAKRFGRSFQYMQYGFLSMFEVLNAASDVISVEQTRAGSLLMLKKSVTEEKPRGCPAGKIFTQPFRMKQGSYSTGFPVAKPCFSQPTSNMEPPKQIMSMEKTSKLNVVETSRLNHTEKLNQLENTFKSVIAQIGPGGTISSELKHKIKFVVSKFPEGLFISKLLGEYEVIFKEQLSPKKLGFLNVTELVGALSDILHVEFRKGHQDLLVFDADKKPLPPVQSDKKIEAKACVSSPPRNSLSTAAVKETVWNCPSKKQKEPQQKICKKPNLVVKPLQLQVETNKSELNLAMANHDIPPDAVPNKKLCRLPPLDTSSLIGVFVEYIISPSQFYIRIYSRDSSELLEDMMIEMRRCYSNQLVSDRYVMPECFIQPGHLCCVRISEDKWWYRVIIHRVLEKQEVEVFYPDFGNIGIVQKSSLRFLKCCYTKLPAQAIPCSLAWVRPVEEHWTSKAILQFQKLCGLKPLVGVVDEYVDGILNIFLCDTSSNEDVYFHHVLRTEGHAIVCRENISSKGFSELNPLALYTTSSGGPEDIVLTELGYPSQQHYFNEDRKISPQSKESELRILQDINDEKSLSHLKSESKEPLKDSEFESLKTCNKSFEEDPKWSNPEPNDLKEENEDEIPTGMPCLESVTIGDDIWDENWLPLQAKMGKGGDAASHLFTASLGGKNQYSSCKEMPQKDWCFSTPKDTWDDSWQPSGLVNGTKVEVHKPEVLGAQEKNTGTNRTQKQLDINGSSDSSTLPKLEEFCTSLTQSEQSADGSQSEPNNSQTQPKQIQLSTAAPCSTTAVDDSAEKPSGSVESSPEILKNEDFSSSRAITLYKDKRQESVDQLSLILSYECQISQKLYIPRSTATAALGAAARLATSRSLLHWYPSVKRMEA

SEQ ID NO: 7889 - protein, 219 aa, Homo sapiens
MGGAQLELPSGARPGVCVRRSFRAHAGDQPRRPPGPIPVPGTMKQESAAPNTPPTSQSPTPSAQFPRNDGDPQALWIFGYGSLVWRPDFAYSDSRVGFVRGYSRRFWQGDTFHRGSDKMPGRVVTLLEDHEGCTWGVAYQVQGEQNPGYLGPAPEEAIATQILACRGFSGHNLEYLLRLADFMQLCGPQAQDEHLAAIVDAVGTMLPCFCPTEQALALV

SEQ ID NO: 7890 - protein, 793 aa, Homo sapiens; identical to SEQ ID NO: 5659

SEQ ID NO: 7891 - protein, 613 aa, Homo sapiens; identical to SEQ ID NO: 5032

SEQ ID NO: 7892 - protein, 193 aa, Homo sapiens
MARAGPRLVLSEEAVRAKSGLGPHRDLAELQSLSIPGTYQEKITHLGHSLMSLTGLKSLDLSRNSLVSLEGIQYLTALESLNLYYNCISSLAEVFRLHALTELVDVDFRLNPVVKVEPDYRLFVVHLLPKLQQLDDRPVRASERKASRLHFASEDSLDSKESVPASLKEGRIQTSVEPAVGTVPVWGLWEAGP

SEQ ID NO: 7893 - protein, 58 aa, Homo sapiens
MYFNYKSVCGSCGFGSCYGCGYGCIHSTHCGCNGYYGCYENKYSVIDDLIFFASKKCH

SEQ ID NO: 7894 - protein, 194 aa, Homo sapiens
MNGRADFREPNAEVPRPIPHIGPDYIPTEEERRVFAECNDESFWFRSVPLAATSMLITQGLISKGILSSHPKYGSIPKLILACIMGYFAGKLSYVKTCQEKFKKLENSPLGEALRSGQARRSSPPGHYYQKSKYDSSVSGQSSFVTSPAADNIEMLPHYEPIPFSSSMNESAPTGITDHIVQVKVNKYGDTWDE

SEQ ID NO: 7895 - protein, 806 aa, Homo sapiens
MSSSPVNVKKLKVSELKEELKKRRLSDKGLKAELMERLQAALDDEEAGGRPAMEPGNGSLDLGGDSAGRSGAGLEQEAAAGGDEEEEEEEEEEEGISALDGDQMELGEENGAAGAADSGPMEEEEAASEDENGDDQGFQEGEDELGDEEEGAGDENGHGEQQPQPPATQQQQPQQQRGAAKEAAGKSSGPTSLFAVTVAPPGARQGQQQAGGDGKTEQKGGDKKRGVKRPREDHGRGYFEYIEENKYSRAKSPQPPVEEEDEHFDDTVVCLDTYNCDLHFKISRDRLSASSLTMESFAFLWAGGRASYGVSKGKVCFEMKVTEKIPVRHLYTKDIDIHEVRIGWSLTTSGMLLGEEEFSYGYSLKGIKTCNCETEDYGEKFDENDVITCFANFESDEVELSYAKNGQDLGVAFKISKEVLAGRPLFPHVLCHNCAVEFNFGQKEKPYFPIPEEYTFIQNVPLEDRVRGPKGPEEKKDCEVVMMIGLPGAGKTTWVTKHAAENPGKYNILGTNTIMDKMMVAGFKKQMADTGKLNTLLQRAPQCLGKFIEIAARKKRNFILDQTNVSAAAQRRKMCLFAGFQRKAVVVCPKDEDYKQRTQKKAEVEGKDLPEHAVLKMKGNFTLPEVAECFDEITYVELQKEEAQKLLEQYKEESKKALPPEKKQNTGSKKSNKNKSGKNQFNRGGGHRGRGGFNMRGGNFRGGAPGNRGGYNRRGNMPQRGGGGGGSGGIGYPYPRAPVFPGRGSYSNRGNYNRGGMPNRGNYNQNFRGRGNNRGYKNQSQGYNQWQQGQFWGQKPWSQHYHQGYY

SEQ ID NO: 7896 - protein, 216 aa, Homo sapiens
MSTVDLARVGACILKHAVTGEAVELRSLWREHACVVAGLRRFGCVVCRWIAQDLSSLAGLLDQHGVRLVGVGPEALGLQEFLDGDYFAGELYLDESKQLYKELGFKRLWTQASPEFGQATWCLRRYNSLSILPAALGKPVRDVAAKAKAVGIQGNLSGDLLQSGGLLVVSKGGDKVLLHFVQKSPGDYVPKEHILQVLGISAEVCASDPPQCDREV

SEQ ID NO: 7897 - protein, 396 aa, Homo sapiens
MFWKFDLHTSSHLDTLLEREDLSLPELLDEEDVLQECKVVNRKLLDFLLQPPHLQAMVAWVTQEPPDSGEERLRYKYPSVACEILTSDVPQINDALGADESLLNRLYGFLQSTGSLNPLLASFFSKVMGILINRKTDQLVSFLRKKDDFVDLLLQHIGTSAIMDLLLRLLTCVERPQLRQDVVNWLNEEKIVQRLIEQIHPSKDENQHSNASQSLCDIIRLSREQMIQVQDSPVPTDAPTSPRVSGEEELHTGPPAPQGPLSVPQGLPTQSLASPPARDALQLRSQDPTPPSAPQEATEGSKVTEPSAPCQALVSIGDLQATFHGIRSAPSSSDSATRDPSTSVPASGAHQPPQTTEGEKSPEPLGLPQSQSAQALTPPPIPNGSAPEGPASPGSQ

SEQ ID NO: 7898 - protein, 725 aa, Homo sapiens
MGTRKKVHAFVRVKPTDDFAHEMIRYGDDKRSIDIHLKKDIRRGVVNNQQTDWSFKLDGVLHDASQDLVYETVAKDVVSQALDGYNGTIMCYGQTGAGKTYTMMGATENYKHRGILPRALQQVFRMIEERPTHAITVRVSYLEIYNESLFDLLSTLPYVGPSVTPMTIVENPQGVFIKGLSVHLTSQEEDAFSLLFEGETNRIIASHTMNKNSSRSHCIFTIYLEAHSRTLSEEKYITSKINLVDLAGSERLGKSGSEGQVLKEATYINKSLSFLEQAIIALGDQKRDHIPFRQCKLTHALKDSLGGNCNMVLVTNIYGEAAQLEETLSSLRFASRMKLVTTEPAINEKYDAERMVKNLEKELALLKQELAIHDSLTNRTFVTYDPMDEIQIAEINSQVRRYLEGTLDEIDIISLRQIKEVFNQFRVVLSQQEQEVESTLRRKYTLIDRNDFAAISAIQKAGLVDVDGHLVGEPEGQNFGLGVAPFSTKPGKKAKSKKTFKEPLRPDTPPSKPVAFEEFKNEQGSEINRIFKENKSILNERRKRASETTQHINAIKREIDVTKEALNFQKSLREKQGKYENKGLMIIDEEEFLLILKLKDLKKQYRSEYQDLRDLRAEIQYCQHLVDQCRHRLLMEFDIWYNESFVIPEDMQMALKPGGSIRPGMVPVNRIVSLGEDDQDKFSQLQQRVLPEGPDSISFYNAKVKIEQKHNYLKTMMGLQQAHRK

SEQ ID NO: 7899 - protein, 93 aa, Homo sapiens
MAAATGDPGLSKLQFAPFSSALDVGFWHELTQKKLNEYRLDEAPKDIKGYYYNGDSAGLPARLTLEFSAFDMSAPTPARCCPAIGTLYNTNTL

SEQ ID NO: 7900 - protein, 110 aa, Homo sapiens
MGKKQNKKKVEEVLEEEEEEYVVEKVLDRRVVKGKVEYLLKWKGFSDEDNTWEPEENLDCPDLIAEFLQSQKTAHETDKSEGGKRKADSDSEDKGEESKPKKKKEESEKP

SEQ ID NO: 7901 - protein, 89 aa, Homo sapiens
MSYYQRPFSPSAYSLPASLNSSIVMQHGTSLDSTDTYPQHAQSLDGTTSSSIPLYRSSEEEKRVTVIKAPHYPGIGPVDESGIPTAIRT

SEQ ID NO: 7902 - protein, 422 aa, Homo sapiens
MERKDFETWLDNISVTFLSLTDLQKNETLDHLISLSGAVQLRHLSNNLETLLKRDFLKLLPLELSFYLLKWLDPQTLLTCCLVSKQWNKVISACTEVWQTACKNLGWQIDDSVQDALHWKKVYLKAILRMKQLEDHEAFETSSLIGHSARVYALYYKDGLLCTGSDDLSAKLWDVSTGQCVYGIQTHTCAAVKFDEQKLVTGSFDNTVACWEWSSGARTQHFRGHTGAVFSVDYNDELDILVSGSADFTVKVWALSAGTCLNTLTGHTEWVTKVVLQKCKVKSLLHSPGDYILLSADKYEIKIWPIGREINCKCLKTLSVSEDRSICLQPRLHFDGKYIVCSSALGLYQWDFASYDILRVIKTPEIANLALLGFGDIFALLFDNRYLYIMDLRTESLISRWPLPEYRKSKRGSSFLAGEHPG

SEQ ID NO: 7903 - protein, 391 aa, Homo sapiens
MSALAGEDVWRCPGCGDHIAPSQIWYRTVNETWHGSCFRRSNSISKSPGPSSPKEPLLFSRDISRSESLRCSSSYSQQIFRPCDLIHGEVLGKGFFGQAIKVTHKATGKVMVMKELIRCDEETQKTFLTEVKVMRSLDHPNVLKFIGVLYKDKKLNLLTEYIEGGTLKDFLRSMDPFPWQQKVRFAKGIASGMAYLHSMCIIHRDLNSHNCLIKLDKTVVVADFGLSRLIVEERKRAPMEKATTKKRTLRKNDRKKRYTVVGNPYWMAPEMLNGKSYDETVDIFSFGIVLCEIIGQVYADPDCLAALDFGLNVKLFWEKFVPTDCPPAFFPLAAICCRLEPESRPAFSKLEDSFEALSLYLGELGIPLPAELEELDHTVSMQYGLTRDSPP

SEQ ID NO: 7904 - protein, 159 aa, Homo sapiens; identical to SEQ ID NO: 7300

SEQ ID NO: 7905 - protein, 1194 aa, Homo sapiens
MFSLDSFRKDRAQHRQRQCKLPPPRLPPMCVNPTPGGTISRASRDLLKEFPQPKNLLNSVIGRALGISHAKDKLVYVHTNGPKKKKVTLHIKWPKSVEVEGYGSKKIDAERQAAAAACQLFKGWGLLGPRNELFDAAKYRVLADRFGSPADSWWRPEPTMPPTSWRQLNPESIRPGGPGGLSRSLGREEEEDEEEELEEGTIDVTDFLSMTQQDSHAPLRDSRGSSFEMTDDDSAIRALTQFPLPKNLLAKVIQIATSSSTAKNLMQFHTVGTKTKLSTLTLLWPCPMTFVAKGRRKAEAENKAAALACKKLKSLGLVDRNNEPLTHAMYNLASLRELGETQRRPCTIQVPEPILRKIETFLNHYPVESSWIAPELRLQSDDILPLGKDSGPLSDPITGKPYVPLLEAEEVRLSQSLLELWRRRGPVWQEAPQLPVDPHRDTILNAIEQHPVVVISGDTGCGKTTRIPQLLLERYVTEGRGARCNVIITQPRRISAVSVAQRVSHELGPSLRRNVGFQVRLESKPPSRGGALLFCTVGILLRKLQSNPSLEGVSHVIVDEVHERDVNTDFLLILLKGLQRLNPALRLVLMSATGDNERFSRYFGGCPVIKVPGFMYPVKEHYLEDILAKLGKHQYLHRHRHHESEDECALDLDLVTDLVLHIDARGEPGGILCFLPGWQEIKGVQQRLQEALGMHESKYLILPVHSNIPMMDQKAIFQQPPVGVRKIVLATNIAETSITINDIVHVVDSGLHKEERYDLKTKVSCLETVWVSRANVIQRRGRAGRCQSGFAYHLFPRSRLEKMVPFQVPEILRTPLENLVLQAKIHMPEKTAVEFLSKAVDSPNIKAVDEAVILLQEIGVLDQREYLTTLGQRLAHISTDPRLAKAIVLAAIFRCLHPLLVVVSCLTRDPFSSSLQNRAEVDKVKALLSHDSGSDHLAFVRAVAGWEEVLRWQDRSSRENYLEENLLYAPSLRFIHGLIKQFSENIYEAFLVGKPSDCTLASAQCNEYSEEEELVKGVLMAGLYPNLIQVRQGKVTRQGKFKPNSVTYRTKSGNILLHKSTINREATRLRSRWLTYFMAVKSNGSVFVRDSSQVHPLAVLLLTDGDVHIRDDGRRATISLSDSDLLRLEGDSRTVRLLKELRRALGRMVERSLRSELAALPPSVQEEHGQLLALLAELLRGPCGSFDVRKTADD

SEQ ID NO: 7906 - protein, 68 aa, Homo sapiens
MSYYQRPFSPSAYSLPASLNSSIVMQHGTSLDSTDTYPQHAQSLDGTTSSSIPLYRSSEEEKRVTVIK

SEQ ID NO: 7907 - protein, 472 aa, Homo sapiens
MSRRVVRQSKFRHVFGQAAKADQAYEDIRVSKVTWDSSFCAVNPKFLAIIVEAGGGGAFIVLPLAKTGRVDKNYPLVTGHTAPVLDIDWCPHNDNVIASASDDTTIMVWQIPDYTPMRNITEPIITLEGHSKRVGILSWHPTARNVLLSAGGDNVIIIWNVGTGEVLLSLDDMHPDVIHSVCWNSNGSLLATTCKDKTLRIIDPRKGQVVAEQARPHEGARPLRAVFTADGKLLSTGFSRMSERQLALWDPNNFEEPVALQEMDTSNGVLLPFYDPDSSIVYLCGKGDSSIRYFEITDEPPFVHYLNTFSSKEPQRGMGFMPKRGLDVSKCEIARFYKLHERKCEPIIMTVPRKSDLFQDDLYPDTPGPEPALEADEWLSGQDAEPVLISLRDGYVPPKHRELRVTKRNILDVRPPSGPRRSQSASDAPLSQQHTLETLLEEIKALRERVQAQEQRITALENMLCELVDGTD

SEQ ID NO: 7908 - protein, 129 aa, Homo sapiens
ILHSLVQTGICVITLAESHPVLQSGKTIKSISYQISTNCSRLQNKVSGKFKRGAQFLTELAPLCKIYCSDGEEYTVSSCVRGRLMEVNENILHKPSILQEKPSTEGYIAVVLPKFEESKSITEGLLTQK

SEQ ID NO: 7909 - protein, 244 aa, Homo sapiens
MVHQDNCSYQAQKNERESIRQKLALGSFFDDGPGIYTSCSKSGKPSLSSRLQSGMNLQICFVNDSGSDKDSDADDSKTETSLDTPLSPMSKQSSSYSDRDTTEEESESLDDMDFLTRQKKLQAEAKMALAMAKPMAKMQVEVEKQNRKKSPVADLLPHMPHISECLMKRSLKPTDLRDMTIGQLQVIVNDLHSQIESLNEELVQLLLIRDELHTEQDAMLVDIEDLTRHAESQQKHMAEKMPAK

SEQ ID NO: 7910 - protein, 539 aa, Homo sapiens; identical to SEQ ID NO: 5502

SEQ ID NO: 7911 - protein, 146 aa, Homo sapiens
MFEILTSEFSYQHSLSILVEEFLQSKELRATVTQMEHHHLFSNILDVLGASQRFFEDLEQRHKAQVLVEDISDILEEHAEKHFHPYIAYCSNEVYQQRTLQKLISSNAAFREALREIERRPACGGLPMLSFLILPMQRVTRLPLLM

SEQ ID NO: 7912 - protein, 160 aa, Homo sapiens; identical to SEQ ID NO: 6461

SEQ ID NO: 7913 - protein, 100 aa, Homo sapiens
MSYYQRPFSPSAYSLPASLNSSIVMQHGTSLDSTDTYPQHAQSLDGTTSSSIPLYRSSEEEKRVTVIKAPHYPGIGPVDESGIPTAIRTTVDRPKDWYKT

SEQ ID NO: 7914 - protein, 122 aa, Homo sapiens; identical to SEQ ID NO: 7564

SEQ ID NO: 7915 - protein, 210 aa, Homo sapiens
MVSMSVPDCLSIMTYVSQYYNHFCSPGQAGVSPPRKGLAPCSPPSVAPTPVEPEDVAQGEELSSGSLSEQGTGQTPSSTCAACQQHVHLVQRYLADGRLYHRHCFRCRRCSSTLLPGAYENGPEEGTFVCAEHCARLGPGTRSGTRPGPFSQPKQQHQQQLAEDAKDVPGGGPSSSAPAGAEADGPKASPEARPQIPTKPRVPGKLQELA

SEQ ID NO: 7916 - protein, 129 aa, Homo sapiens; identical to SEQ ID NO: 6440

SEQ ID NO: 7917 - protein, 206 aa, Homo sapiens
MALNVAPVRDTKWLTLEVCRQFQRGTCSRSDEECKFAHPPKSCQVENGRVIACFDSLKGRCSRENCKYLHPPTHLKTQLEINGRNNLIQQKTAAAMLAQQMQFMFPGTPLHPVAFPPGALHPLPKRQALEKSNGTSAVFNPSVLHYQQALTSAQLQQHAAFIPTDNSEIISRNGMECQESALRITKHCYCTYYPVSSSIELPQTAC

SEQ ID NO: 7918 - protein, 324 aa, Homo sapiens
MQQPVRAGDIGVSRVQTHHNASPFSVPKKQDESPMIGDGEDYFLSLFGDSKKLTAHSNYTQKTLKYFSMILEEVGQFTSSSLGDVEIAEVNVKGLFVKLINSSLDKEMAIGDHILQQNVNGQTISLYRFLPNIVMQANSTVTVWAAASEAKHQPPSDFLWKEQDKFRASPDCITILCKPNGQAIAWYTPIHWKQAWEKLDADVEFNRCSVVSPTFRKRVFQWTASTATITKEKQDQPKKDISNYQVEQAQVLLKREKEIPPTVFPNRSPWCQNPYVSAHPYCPLIEPHNTSTAGGRLDRQAARSTRPNRASGSKKKKTSESQKQ

SEQ ID NO: 7919 - protein, 418 aa, Homo sapiens
MREIVHIQAGQCGNQIGTKFWEVISDEHGIDPAGGYVGDSALQLERINVYYNESSSQKYVPRAALVDLEPGTMDSVRSGPFGQLFRPDNFIFGQTGAGNNCLQGFQLTHSLGGGTGSGMGTLLISKIREEFPDRIMNTFSVMPSPKVSDTVVEPYNATLSVHQLVENTDETYCIDNEALYDICFRTLKLTTPTYGDLNHLVSATMSGVTTSLRFPGQLNADLRKLAVNMVPFPRLHFFMPGFAPLTSRGSQQYRALTVPELTQQMFDARNMMAACDPRHGRYLTVATVFRGPMSMKEVDEQMLAIQSKNSSYFVEWIPNNVKVAVCDIPPRGLKMASTFIGNSTAIQELFKRISEQFSAMFRRKAFLHWFTGEGMDEMEFTEAESNMNDLVSEYQQYQDATANDGEEAFEDEEEEIDG

SEQ ID NO: 7920 - protein, 89 aa, Homo sapiens
MDVLSPLSFIKVSHVRMQGILLLVFAKYQHLPYIQILSTKSTPTGLFGYWGNKGGVNICLKLYGYYVSIINCHLPPHISNNYQRLEHFD

SEQ ID NO: 7921 - protein, 59 aa, Homo sapiens; identical to SEQ ID NO: 4813

SEQ ID NO: 7922 - protein, 287 aa, Homo sapiens
MDETEIGSCFGRYGSVKEVKIITNRTGVSKGYGFVSFVNDVDVQKIVGSQIHFHGKKLKLGPAIRKQKLCARHVQPRPLVVNPPPPPQFQNVWRNPNTETYLQPQITPNPVTQHVQAYSAYPHSPGQVITGCQLLVYNYQEYPTYPDSAFQVTTGYQLPVYNYQPFPAYPRSPFQVTAGYQLPVYNYQAFPAYPNSPFQVATGYQFPVYNYQPFPAYPSSPFQVTAGYQLPVYNYQAFPAYPNSPFQVATGYQFPVYNYQAFPAYPNSPVQVTTGYQLPVYNYQKFP

SEQ ID NO: 7923 - protein, 447 aa, Homo sapiens; identical to SEQ ID NO: 5189

SEQ ID NO: 7924 - protein, 157 aa, Homo sapiens
MANIAVQRIKREFKEVLKSEETSKNQIKVDLVDENFTELRGEIAGPPDTPYEGGRYQLEIKIPETYPFNPPKVRFITKIWHPNISSVTGAICLDILKDQWAAAMTLRTVLLSLQALLAAAEPDDPQDAVVANQNAVIVALSSKSWDVETATELLLSN

SEQ ID NO: 7925 - protein, 193 aa, Homo sapiens; identical to SEQ ID NO: 4797

SEQ ID NO: 7926 - protein, 395 aa, Homo sapiens; identical to SEQ ID NO: 6506

SEQ ID NO: 7927 - protein, 207 aa, Homo sapiens
MTEDSQRNFRSVYYEKVGFRGVEEKKSLEILLKDDRLGILPPHHESHAKVMMYRKEQYLDVLHALKVVRFVSDATPQAEVYLRMYQLESGKLPRSPSFPLEPDDEVFLAIAKAMEEMVEDSVDCYWITRRFVNQLNTKYRDSLPQLPKAFEQYLNLEDGRLLTHLRMCSAAPKLPYDLWFKRCFAGCLPESSLQRVWDKVVSGSCKI

SEQ ID NO: 7928 - protein, 467 aa, Homo sapiens
MASLLQSDRVLYLVQGEKKVRAPLSQLYFCRYCSELRSLECVSHEVDSHYCPSCLENMPSAEAKLKKNRCANCFDCPGCMHTLSTRATSISTQLPDDPAKTTMKKAYYLACGFCRWTSRDVGMADKSVASGGWQEPENPHTQRMNKLIEYYQQLAQKEKVERDRKKLARRRNYMPLAFSQHTIHVVDKYGLGTRLQRPRAGASISTLAGLSLKEGEDQKEIKIEPAQAVDEVEPLPEDYYTRPVNLTEVTTLQQRLLQPDFQPVCASQLYPRHKHLLIKRSLRCRKCEHNLSKPEFNPTSIKFKIQLVAVNYIPEVRIMSIPNLRYMKESQVLLTLTNPVENLTHVTLFECEEGDPDDINSTAKVVVPPKELVLAGKDAAAEYDELAEPQDFQDDPDIIAFRKANKVGIFIKVTPQREEGEVTVCFKMKHDFKNLAAPIRPIEESDQGTEVIWLTQHVELSLGPLLP

SEQ ID NO: 7929 - protein, 144 aa, Homo sapiens
VRELEAELDAEQKKHAEALKGVRKHERRVKELAYQAEEDRKNLARMQDLVDKLQSKVKSYKRQFEEAVSALGPGHLDRAPQLCPRVCGQEQQANTNLAKYRKAQHELDDAEERADMAETQANKLRARTRDALGPKLSLSPQHKE

SEQ ID NO: 7930 - protein, 248 aa, Homo sapiens; identical to SEQ ID NO: 7249

SEQ ID NO: 7931 - protein, 1157 aa, Homo sapiens
MAASRDLLKEFPQPKNLLNSVIGRALGISHAKDKLVYVHTNGPKKKKVTLHIKWPKSVEVEGYGSKKIDAERQAAAAACQLFKGWGLLGPRNELFDAAKYRVLADRFGSPADSWWRPEPTMPPTSWRQLNPESIRPGGPGGLSRSLGREEEEDEEEELEEGTIDVTDFLSMTQQDSHAPLRDSRGSSFEMTDDDSAIRALTQFPLPKNLLAKVIQIATSSSTAKNLMQFHTVGTKTKLSTLTLLWPCPMTFVAKGRRKAEAENKAAALACKKLKSLGLVDRNNEPLTHAMYNLASLRELGETQRRPCTIQVPEPILRKIETFLNHYPVESSWIAPELRLQSDDILPLGKDSGPLSDPITGKPYVPLLEAEEVRLSQSLLELWRRRGPVWQEAPQLPVDPHRDTILNAIEQHPVVVISGDTGCGKTTRIPQLLLERYVTEGRGARCNVIITQPRRISAVSVAQRVSHELGPSLRRNVGFQVRLESKPPSRGGALLFCTVGILLRKLQSNPSLEGVSHVIVDEVHERDVNTDFLLILLKGLQRLNPALRLVLMSATGDNERFSRYFGGCPVIKVPGFMYPVKEHYLEDILAKLGKHQYLHRHRHHESEDECALDLDLVTDLVLHIDARGEPGGILCFLPGWQEIKGVQQRLQEALGMHESKYLILPVHSNIPMMDQKAIFQQPPVGVRKIVLATNIAETSITINDIVHVVDSGLHKEERYDLKTKVSCLETVWVSRANVIQRRGRAGRCQSGFAYHLFPRSRLEKMVPFQVPEILRTPLENLVLQAKIHMPEKTAVEFLSKAVDSPNIKAVDEAVILLQEIGVLDQREYLTTLGQRLAHISTDPRLAKAIVLAAIFRCLHPLLVVVSCLTRDPFSSSLQNRAEVDKVKALLSHDSGSDHLAFVRAVAGWEEVLRWQDRSSRENYLEENLLYAPSLRFIHGLIKQFSENIYEAFLVGKPSDCTLASAQCNEYSEEEELVKGVLMAGLYPNLIQVRQGKVTRQGKFKPNSVTYRTKSGNILLHKSTINREATRLRSRWLTYFMAVKSNGSVFVRDSSQVHPLAVLLLTDGDVHIRDDGRRATISLSDSDLLRLEGDSRTVRLLKELRRALGRMVERSLRSELAALPPSVQEEHGQLLALLAELLRGPCGSFDVARGSTADD

SEQ ID NO: 7932 - protein, 253 aa, Homo sapiens
  VARIANT 1: note = X can be any amino acid
XVGVEAARVIAKALEKKSELKRCHWSDMFTGRLRTEIPPALISLGEGLITAGAQLVELDLSDNAFGPDGVQGFEALLKSSACFTLQELKLNNCGMGIGGGKVIGTLEEVHMPQNGINHPGITALAQAFAVNPLLRVINLNDNTFTEKGAVAMAETLKTLRQVEVINFGDCLVRSKGAVAIADAIRGGLPKLKELNLSFCEIKRDAALAVAEAMADKAELEKLDLNGNTLGEEGCEQLQEVLEGFNMAKVLASL

SEQ ID NO: 7933 - protein, 1244 aa, Homo sapiens
DVGGDRPWDSGNTQLPPRNPVKANAMFGAGDEDDTDFLSPSGGARLASLFGLDQAAAGHGNEFFQYTAPKQPKKGQGTAATGNQATPKTAPATMSTPTILVATAVHAYRYTNGQYVKQGKFGAAVLGNHTAREYRILLYISQQQPVTVARIHVNFELMVRPNNYSTFYDDQRQNWSIMFESEKAAVEFNKQVCIAKCNSTSSLDAVLSQDLIVADGPAVEVGDSLEVAYTGWLFQNHVLGQVFDSTANKDKLLRLKLGSGKVIKGWEDGMLGMKKGGKRLLIVPPACAVGSEGVIGWTQATDSILVFEVEVRRVKFARDSGSDGHSVSSRDSAAPSPIPGADNLSADPVVSPPTSIPFKSGEPALRTKSNSLSEQLAINTSPDAVKAKLISRMAKMGQPMLPILPPQLDSNDSEIEDVNTLQGGGQPVVTPSVQPSLHPAHPALPQMTSQAPQPSVTGLQAPSAALMQVSSLDSHSAVSGNAQSFQPYAGMQAYAYPQASAVTSQLQPVRPLYPAPLSQPPHFQGSGDMASFLMTEARQHNTEIRMAVSKVADKMDHLMTKVEELQKHSAGNSMLIPSMSVTMETSMIMSNIQRIIQENERLKQEILEKSNRIEEQNDKISELIERNQRYVEQSNLMMEKRNNSLQTATENTQARVLHAEQEKAKVTEELAAATAQVSHLQLKMTAHQKKETELQMQLTESLKETDLLRGQLTKVQAKLSELQETSEQAQSKFKSEKQNRKQLELKVTSLEEELTDLRVEKESLEKNLSERKKKSAQERSQAEEEIDEIRKSYQEELDKLRQLLKKTRVSTDQAAAEQLSLVQAELQTQWEAKCEHLLASAKDEHLQQYQEVCAQRDAYQQKLVQLQEKCLALQAQITALTKQNEQHIKELEKNKSQMSGVEAAASDPSEKVKKIMNQVFQSLRREFELEESYNGRTILGTIMNTIKMVTLQLLNQQEQEKEESSSEEEEEKAEERPRRPSQEQSASASSGQPQAPLNRERPESPMVPSEQVVEEAVPLPPQALTTSQDGHRRKGDSEAEALSEIKDGSLPPELSCIPSHRVLGPPTSIPPEPLGPVSMDSECEESLAASPMAAKPDNPSGKVCVREVAPDGPLQESSTRLSLTSDPEEGDPLALGPESPGEPQPPQLKKDDVTSSTGPHKELSSTEAGSTVAGAALRPSHHSQRSSLSGDEEDELFKGATLKALRPKAQPEEEDEDEVSMKGRPPPTPLFGDDDDDDDIDWLG

SEQ ID NO: 7934 - protein, 549 aa, Homo sapiens
MKWEEYEELLHYAIVTPNIEPCASQSSHPKGELVPDVRISTIHDILHSQGNNSEVRETAIEVGKGCDFHISSHSKTDESSPVLSPRKPSHPVMDFFSSHLLADSSSPATNSSHTDAHEILVSDFLVSDENLQKMENVLDLWSSGLKTNIISELSKWRLNFIDWHRMEMRKEKEKHAAHLKQLCNQINELKELQKTFEISIGRKDEVISSLSHAIGKQKEKIELMRTFFHWRIGHVRARQDVYEGKLADQYYQRTLLKKVWKVWRSVVQKQWKDVVERACQARAEEVCIQISNDYEAKVAMLSGALENAKAEIQRMQHEKEHFEDSMKKAFMRGVCALNLEAMTIFQNRNDAGIDSTNNKKEEYGPGVQGKEHSAHLDPSAPPMPLPVTSPLLPSPPAAVGGASATAVPSAASMTSTRAASASSVHVPVSALGAGSAATAASEEMYVPRVVTSAQQKAGRTITARITGRCDFASKNRISSSLAIMGVSPPMSSVVVEKHHPVTVQTIPQATAAKYAAIHPESSTSASRSLGTRSAHTQSLTSVHSIKVVD

SEQ ID NO: 7935 - protein, 133 aa, Homo sapiens
MSPSQMIMPNVMEMIAALGPGPSPYPLPPPPGGTNSNDYSSQGNNYQGHGNFDFPHGNPGGTSMNDFMHGPPQLSHPPDMPNNMAALEKPLSHPMQETLLPELTNPDELLSYLDPPDLPSNSNDDLLSLFENN

SEQ ID NO: 7936 - protein, 490 aa, Homo sapiens
MSSCVSSQPSSNRAAPQDELGGRGSSSSESQKPCEALRGLSSLSIHLGMESFIVVTECEPGCAVDLGLARDRPLEADGQEVPLDTSGSQARPHLSGRKLSLQERSQGGLAAGGSLDMNGRCICPSLPYSPVSSPQSSPRLPRRPTVESHHVSITGMQDCVQLNQYTLKDEIGKGSYGVVKLAYNENDNTYYAMKVLSKKKLIRQAGFPRRPPPRGTRPAPGGCIQPRGPIEQVYQEIAILKKLDHPNVVKLVEVLDDPNEDHLYMVFELVNQGPVMEVPTLKPLSEDQARFYFQDLIKGIEYLHYQKIIHRDIKPSNLLVGEDGHIKIADFGVSNEFKGSDALLSNTVGTPAFMAPESLSETRKIFSGKALDVWAMGVTLYCFVFGQCPFMDERIMCLHSKIKSQALEFPDQPDIAEDLKDLITRMLDKNPESRIVVPEIKILVKTMIRKRSFGNPFEGSRREERSLSAPGNLLTKKPTRECESLSELKT

SEQ ID NO: 7937 - protein, 623 aa, Homo sapiens
MAAATGDPGLSKLQFAPFSSALDVGFWHELTQKKLNEYRLDEAPKDIKGYYYNGDSAGLPARLTLEFSAFDMSAPTPARCCPAIGTLYNTNTLESFKTADKKLLLEQAANEIWESIKSGTALENPVLLNKFLLLTFAIEALECAYDNLCQTEGVTALPYFLIKYDENMVLVSLLKHYSDFFQGQRTKITIGVYDPCNLAQYPGWPLRNFLVLAAHRWSSSFQSVEVVCFRDRTMQGARDVAHSIIFEVKLPEMAFSPDCPKAVGWEKNQKGGMGPRMVNLSECMDPKRLAESSVDLNLKLMCWRLVPTLDLDKVVSVKCLLLGAGTLGCNVARTLMGWGVRHITFVDNAKISYSNPVRQPLYEFEDCLGGGKPKALAAADRLQKIFPGVNARGFNMSIPMPGHPVNFSSVTLEQARRDVEQLEQLIESHDVVFLLMDTRESRWLPAVIAASKRKLVINAALGFDTFVVMRHGLKKPKQQGAGDLCPNHPVASADLLGSSLFANIPGYKLGCYFCNDVVAPGDSTRDRTLDQQCTVSRPGLAVIAGALAVELMVSVLQHPEGGYAIASSSDDRMNEPPTSLGLVPHQIRGFLSRFDNVLPVSLAFDKCTACSSKIWDMSDDETI

SEQ ID NO: 7938 - protein, 321 aa, Homo sapiens
RRNVELINEEAAMFDSLLMDSYVSSTTGESVITREMVEMLFSDDSDLQLATTQKFRKLLSKEPSPPIDEVINTPRVVDRFVEFLKRNENCTLQAVWALGNIAGDSSVCRDYVLNCSILNPLLTLLTKSTRLTMTRNAVWALSNLCRGKNPPPEFAKVSPCLPVLSRLLFSSDSDLLADACWALSYLSDGPNEKIQAVIDSGVCRRLVELLMHNDYKVASPALRAVGNIVTGDDIQTQVILNCSALPCLLHLLSSPKESIRKEACWTISNITAGNRAQIQAVIDANIFPVLIEILQKAEFRTRKEAAWAITNATSGGTPEQI

SEQ ID NO: 7939 - protein, 264 aa, Homo sapiens
MGGAQLELPSGARPGVCVRRSFRAHAGDQPRRPPGPIPVPGTMKQESAAPNTPPTSQSPTPSAQFPRNDGDPQALWIFGYGSLVWRPDFAYSDSRVGFVRGYSRRFWQGDTFHRGSDKMPGRVVTLLEDHEGCTWGVAYQVQGEQVSKALKYLNVREAVLGGYDTKEVTFYPQDAPDQPLKALAYVATPQNPGYLGPAPEEAIATQILACRGFSGHNLEYLLRLADFMQLCGPQAQDEHLAAIVDAVGTMLPCFCPTEQALALV

SEQ ID NO: 7940 - protein, 248 aa, Homo sapiens; identical to SEQ ID NO: 7249

SEQ ID NO: 7941 - protein, 255 aa, Homo sapiens
MSSSMWYIMQSIQSKYSLSERLIRTIAAIRSFPHDNVEDLIRGGADVNCTHGTLKPLHCACMVSDADCVELLLEKGAEVNALDGYNRTALHYAAEKDEACVEVLLEYGANPNALDYNNDTPLSWAAMKGNLESVSILLDYGAEVRVINLIGQTPISRLVALLVRGLGTEKEDSCFELLHRAVGHFELRKNGTMPREVARDPQLCEKLTVLCSAPGTLKTLARYAVRRSLGLQYLPDAVKGLPLPASLKEYLLLLE

SEQ ID NO: 7942 - protein, 194 aa, Homo sapiens
EPVQPHWFYCKEVEYKQLWMPFSVFDSLNLEEIYNSVQPDPESVVLGTDGGRYDVYLYDRIRKAAYWEEEPAEVRRCTWFYKGDTDSRFIPYTEEFSEKLEVIVQFQPSSVPDEWGTTQDGQTRPRVVKRGIDDNLDEIPDGEMPQVDHLVFVVHGIGPVCDLRFRSIIECVDDFRVVSLKLLRTHFKKSLDDG

SEQ ID NO: 7943 - protein, 326 aa, Homo sapiens; identical to SEQ ID NO: 7218

SEQ ID NO: 7944 - protein, 329 aa, Homo sapiens
MAGALEGDIFIGPKAEEHRGLLSIRYPMEHGIVKDWNDMERIWQYVYSKDQLQTFSEEHPVLLTEAPLNPRKNRERAAEVFFETFNVPALFISMQAVLSLYATGRTTGVVLDSGDGVTHAVPIYEGFAMPHSIMRIDIAGRDVSRFLRLYLRKEGYDFHSSSEFEIVKAIKERACYLSINPQKDETLETEKAQYYLPDGSTIEIGPSRFRAPELLFRPDLIGEESEGIHEVLVFAIQKSDMDLRRTLFSNIVLSGGSTLFKGFGDRLLSEVKKLAPKDVKIRISAPQERLYSTWIGGSILASLDTFKKMWVSKKEYEEDGARSIHRKTF

SEQ ID NO: 7945 - protein, 149 aa, Homo sapiens
MEKTELIQKAKLAEQAERYDDMATCMKAVTEQGAELSNEERNLLSVAYKNVVGGRRSAWRVISSIEQKTDTSDKKLQLIKDYREKVESELRSICTTVLELLDKYLIANATNPESKVFYLKMKGDYFRYLAEVACGDDRKQTIDNSQGAY

SEQ ID NO: 7946 - protein, 244 aa, Homo sapiens
MLSDRKRELEHRLSATLEENDLLQGTVEELQDRVLILERQGHDKDLQLHQSQLELQEVRLSCRQLQVKVEELTEERSLQSSAATSTSLLSEIEQSMEAEELEQEREQVTLLSVEMTALKEERDRLRVTSEDKEPKEQLQKAIRDRDEAIAKKNAVELELAKCRMDMMSLNSQLLDAIQQKLNLSQQLEAWQDDMHRVIDRQLMDTHLKERSQPAAALCRGHSAGRGDEPSIAEGKRLFSFFRKI

SEQ ID NO: 7947 - protein, 200 aa, Homo sapiens
  VARIANT 1: note = X can be any amino acid
XHMLSKVGMWDFDIFLFDRLTNGNSLVTLLCHLFNTHGLIHHFKLDMVTLHRFLVMVQEDYHSQNPYHNAVHAADVTQAMHCYLKEPKLASFLTPLDIMLGLLAAAAHDVDHPGVNQPFLIKTNHHLANLYQVREPNLEPATVWSIALGPVLKPESCPWRKPCFRVLEVQRRMKHNLCPQKFVQTQMLKMSKIQANLIPV

SEQ ID NO: 7948 - protein, 575 aa, Homo sapiens; identical to SEQ ID NO: 5279

SEQ ID NO: 7949 - protein, 1013 aa, Homo sapiens; identical to SEQ ID NO: 6513

SEQ ID NO: 7950 - protein, 1260 aa, Homo sapiens
MAAAAASGAGGAAGAGTGGAGPAGRLLPPPAPGSPAAPAAVSPAAGQPRPPAPASRGPMPARIGYYEIDRTIGKGNFAVVKRATHLVTKAKVAIKIIDKTQLDEENLKKIFREVQIMKMLCHPHIIRLYQVMETERMIYLVTEYASGGEIFDHLVAHGRMAEKEARRKFKQIVTAVYFCHCRNIVHRDLKAENLLLDANLNIKIADFGFSNLFTPGQLLKTWCGSPPYAAPELFEGKEYDGPKVDIWSLGVVLYVLVCGALPFDGSTLQNLRARVLSGKFRIPFFMSTECEHLIRHMLVLDPNKRLSMEQICKHKWMKLGDADPNFDRLIAECQQLKEERQVDPLNEDVLLAMEDMGLDKEQTLQAEQAGTAMNISVPQVQLINPENQIVEPDGTLNLDSDEGEEPSPEALVRYLSMRRHTVGVADAAEVMEDLQKLLPGFPGVNPQAPFLQVAPNVNFMHNLLPMQNLQPTGQLEYKEQSLLQPPTLQLLNGMGPLGRRASDGGANIQLHAQQLLKRPRGPSPLVTMTPAVPAVTPVDEESSDGEPDQEAVQRYLANRSKRHTLAMTNPTAEIPPDLQRQLGQQPFRSRVWPPHLVPDQHRSTYKDSNTLHLPTERFSPVRRFSDGAASIQAFKAHLEKMGNNSSIKQLQQECEQLQKMYGGQIDERTLEKTQQQHMLYQQEQHHQILQQQIQDSICPPQPSPPLQAACENQPALLTHQLQRLRIQPSSPPPNHPNNHLFRQPSNSPPPMSSAMIQPHGAASSSQFQGLPSRSAIFQQQPENCSSPPNVALTCLGMQQPAQSQQVTIQVQEPVDMLSNMPGTAAGSSGRGISISPSAGQMQMQHRTNLMATLSYGHRPLSKQLSADSAEAHSAHQQPPHYTTSALQQALLSPTPPDYTRHQQVPHILQGLLSPRHSLTGHSDIRLPPTEFAQLIKRQQQQRQQQQQQQQQQEYQELFRHMNQGDAGSLAPSLGGQSMTERQALSYQNADSYHHHTSPQHLLQIRAQECVSQASSPTPPHGYAHQPALMHSESMEEDCSCEGAKDGFQDSKSSSTLTKGCHDSPLLLSTGGPGDPESLLGTVSHAQELGIHPYGHQPTAAFSKNKVPSREPVIGNCMDRSSPGQAVELPDHNGLGYPARPSVHEHHRPRALQRHHTIQNSDDAYVQLDNLPGMSLVAGKALSSARMSDAVLSQSSLMGSQQFQDGENEECGASLGGHEHPDLSDGSQHLNSSCYPSTCITDILLSYKHPEVSFSMEQAGV

SEQ ID NO: 7951 - protein, 172 aa, Homo sapiens
MSSNECFKCGRSGHWARECPTGGGRGRGMRSRGRGFQFVSSSLPDICYRCGESGHLAKDCDLQEDVEACYNCGRGGHIAKDCKEPKREREQCCYNCGKPGHLARDCDHADEQKCYSCGEFGHIQKDCTKVKCYRCGETGHVAINCSKTSEVNCYRCGESGHLARECTIEATA

SEQ ID NO: 7952 - protein, 156 aa, Homo sapiens
MLAEKLPNLTHLNLSGNKLKDISTLEPLKKLECLKSLDLFNCEVTNLNDYRESVFKLLPQLTYLDGYDREDQEAPDSDAEVDGVDEEEEDEEGEDEEDEDDEDGEEEEFDEEDDEDEDVEGDEDDDEVSEEEEEFGLDEEDEDEDEDEEEEEGGKG

SEQ ID NO: 7953 - protein, 171 aa, Homo sapiens; identical to SEQ ID NO: 7493

SEQ ID NO: 7954 - protein, 36 aa, Homo sapiens
MIEKMQGSRMDEQRCSFPPPLKTEEDYIPYPSVHEV

SEQ ID NO: 7955 - protein, 212 aa, Homo sapiens
MSSKGSSTDGRTDLANGSLSSSPEEMSGAEEGRETSSGIEVEASDLSLSLTGDDGGPNRTSTESRGTDTESSGEDKDSDSMEDTGHYSINDENRVHDRSEEEEEEEEEEEEEQPRRRVQRKRANRDQDSSDDERALEDWVSSETSALPRPRWQALPALRERELGSSARFVYEACGARVFVQRFRLQHGLEGHTGCVNTLHFNQRGTWLASGS

SEQ ID NO: 7956 - protein, 241 aa, Homo sapiens
MTSVTRSEIIDEKGPVMSKTHDHQLESSLSPVEVFAKTSASLEMNQGVSEERIHLGSSPKKGGNCDLSHQERLQSKSLHLSPQEQSASYQDRRQSWRRASMKETNRRKSLHPIHQGITELSRSISVDLAESKRLGCLLLSSFQFSIQKLEPFLRDTKGFSLESFRAKASSLSEELKHFADGLETDGTLQKCFEDSNGKASDFSLEASVAEMKEYITKFSLERQTWDQLLLHYQQEAKEILS

SEQ ID NO: 7957 - protein, 395 aa, Homo sapiens; identical to SEQ ID NO: 6506

SEQ ID NO: 7958 - protein, 628 aa, Homo sapiens
MSDKSDLKAELERKKQRLAQIREEKKRKEEERKKKEADMQQKKEPVQDDSDLDRKRRETEALLQSIGISPEPPLVPTPMSPSSKSVSTPSEAGSQDSGDLGPLTRTLQWDTDPSVLQLQSDSELGRRLHKLGVSKVTQVDFLPREVVSYSKETQTPLATHQSEEDEEDEEMVESKVGQDSELENQDKKQEVKEAPPRELTEEEKQQILHSEEFLIFFDRTIRVIERALAEDSDIFFDYSGRELEEKDGDVQAGANLSFNRQFYDEHWSKHRVVTCMDWSLQYPELMVASYNNNEDAPHEPDGVALVWNMKFKKTTPEYVFHCQSSVMSVCFARFHPNLVVGGTYSGQIVLWDNRSHRRTPVQRTPLSAAAHTHPVYCVNVVGTQNAHNLITVSTDGKMCSWSLDMLSTPQESMELVYNKSKPVAVTGMAFPTGDVNNFVVGSEEGTVYTACRHGSKAGIGEVFEGHQGPVTGINCHMAVGPIDFSHLFVTSSFDWTVKLWTTKHNKPLYSFEDNADYVYDVMWSPVHPALFACVDGMGRLDLWNLNNDTEVPTASVAIEGASALNRVRWAQAGKEVAVGDSEGRIWVYDVGELAVPHNDEWTRFARTLVEIRANRADSEEEGTVELSA

SEQ ID NO: 7959 - protein, 547 aa, Homo sapiens; identical to SEQ ID NO: 6039

SEQ ID NO: 7960 - protein, 248 aa, Homo sapiens
MAFSGRARPCIIPENEEIPRAALNTVHEANGTEDERAVSKLQRRHSDVKVYKEFCDFYAKFNMANALASATCERCKGGFAPAETIVNSNGELYHEQCFVCAQCFQQFPEGLFYEFEGRKYCEHDFQMLFAPCCHQCGEFIIGRVIKAMNNSWHPECFRCDLCQEVLADIGFVKNAGRHLCRPCHNREKARGLGKYICQKCHAIIDEQPLIFKNDPYHPDHFNCANCGQEGSDCRCTGAERGAILPAMP

SEQ ID NO: 7961 - protein, 205 aa, Homo sapiens
MESNFNQEGVPRPSYVFSADPIARPSEINFDGIKLDLSHEFSLVAPNTEANSFESKDYLQVCLRIRPFTQSEKELESEGCVHILDSQTVVLKEPQCILGRLSEKSSGQMAQKFSFSKVFGPATTQKEFFQGCIMQPVKDLLKGQSRLIFTYGLTNSGKTYTFQGTEENIGILAALNVLFDSLQERLYTKMNLKPHRSREYLRLSS

SEQ ID NO: 7962 - protein, 328 aa, Homo sapiens
MEVAEPSSPTEEEEEEEEHSAEPRAARSNPEGAEDRAVGAQASVGSRSEGEGEAASADDGSLNTSGAGPKSWQVPPPAPEVQIRTPRVNCPEKVIICLDLSEEMSLPKLESFNGSKTNALNVSQKMIEMFVRTKHKIDKSHEFALVVVNDDTAWLSGLTSDPRELCSCLYDLETASCSTFNISGASPARQQKTELPVTENVQTIPPPYVVRTILVYSRPPCQPQFSLTEPMKKMFQCPYFFFDVVYIHNGTEEKEEEMSWKDMFAFMGSLDTKGTSYKYEVALAGPALELHNCMAKLLAHPLQRPCQSHASYSLLEEEDEAIEVEATV

SEQ ID NO: 7963 - protein, 539 aa, Homo sapiens; identical to SEQ ID NO: 5502

SEQ ID NO: 7964 - protein, 1186 aa, Homo sapiens
MCEVMPTINEGDRLGPPHGADADANFEQLMVNMLDEREKLLESLRESQETLAATQSRLQDAIHERDQLQRHLNSALPQEFATLTRELSMCREQLLEREEEISELKAERNNTRLLLEHLECLVSRHERSLRMTVVKRQAQSPSGVSSEVEVLKALKSLFEHHKALDEKVRERLRAALERVTTLEEQLAGAHQQVSALQQGAGVRDGAAEEEGTVELGPKRLWKEDTGRVEELQELLEKQNFELSQARERLVTLTTTVTELEEDLGTARRDLIKSEELSSKHQRDLREALAQKEDMEERITTLEKRYLAAQREATSIHDLNDKLENELANKESLHRQCEEKARHLQELLEVAEQKLQQTMRKAETLPEVEAELAQRIAALTKAEERHGNIEEHLRQLEGQLEEKNQELARTAVQVRQREKMNEDHNKRLSDTVDRLLSESNERLQLHLKERMAALEEKNTLIQELESSQRQIEEQHHHKGRLSEEIEKLRQEVDQLKGRGGPFVDGVHSRSHMGSAADVRFSLGTTTHAPPGVHRRYSALREESAKLALPLTVTLRSPTWMRMSQGVCCNLEYHSSGTLCGSSGPLPVPEMIQEEKESTELRAEEIETRVTSGSMEALNLKQLRKRGSIPTSLTALSLASASPPLSGRSTPKLTSRSAAQDLDRMGVMTLPSDLRKHRRKLLSPVSREENREDKATIKCETSPPSSAALRLEKLGHPALSQEEGKSALEDQGSNPSSSNSSQDSLHKGAKRKGIKSSIGRLFGKKEKGRLIQLSRDGATGHVLLTDSEFSMQEPMVPAKLGTQAEKDRRLKKKHQLLEDARRKGMPFAQWDGPTVVSWLELWVGMPAWYVAACRANVKSGAIMSALSDTEIQREIGISNALHRLKLRLAIQEMVSLTSPSAPPTSRTSSGNVWVTHEEMETLETSTKTDSEEGSWAQTLAYGDMNHEWIGNEWLPSLGLPQYRSYFMECLVDARMLDHLTKKDLRVHLKMVDSFHRTSLQYGIMCLKRLNYDRKELEKRREESQHEIKDVLVWTNDQVVHWVQSIGLRDYAGNLHESGVHGALLALDENFDHNTLALILQIPTQNTQARQVMEREFNNLLALGTDARGSLDDGDDKVFRRAPSWRKRFRPREHHGRGGMLSASAETLPAGFRVSTLGTLQPPPAPPKKIMPEAHSHYLYGHMLSAFRD

SEQ ID NO: 7965 - protein, 460 aa, Homo sapiens
MEICDIINETEEGPKDALRAVKKRIVGNKNFHEVMLALTVLETCVKNCGHRFHVLVASQDFVESVLVRTILPKNNPPTIVHDKVLNLIQSWADAFRSSPDLTGVVTIYEDLRRKGLEFPMTDLDMLSPIHTPQRTVFNSETQSGQDSVGTDSSQQEDSGQHAAPLPAPPILSGDTPIAPTPEQIGKLRSELEMVSGNVRVMSEMLTELVPTQAEPADLELLQELNRTCRAMQQRVLELIPQIANEQLTEELLIVNDNLNNVFLRHERFERFRTGQTTKAPSEAEPAADLIDMGPDPAATGNLSSQLAGMNLGSSSVRAGLQSLEASGRLEDEFDMFALTRGSSLADQRKEVKYEAPQATDGLAGALDARQQSTGAIPVTQACLMEDIEQWLSTDVGNDAEEPKGVTSEGKFDKFLEERAKAADRLPNLSSPSAEGPPGPPSGPAPRKKTQEKDDDMLFAL

SEQ ID NO: 7966 - protein, 59 aa, Homo sapiens
MMMKMMMRMKIRKIRYHCQRKQNLIHNNGNGLGSVPVEKLVLHPSPIQNPQQSAVVSCE

SEQ ID NO: 7967 - protein, 178 aa, Homo sapiens
MLGLDACELGAQLLELLRLALCARVLLADKEGGPPAVDEVLDEAVPEYRAPGRKSLLEIRQLDPDDRSLAKYKRVLLGPLPPAVDPSLPNVQVTRLTLLSEQAPGPVVMDLTGDLAVLKDQVFVLKEGVDYRVHREIVSGLKCLHHTYRRGLRVDKTVYMVGSYGPSAQEYEFVTPVE

SEQ ID NO: 7968 - protein, 372 aa, Homo sapiens
MDSVRSGPFGQVFRPDNFIFGQCGAGNNWAKGHYTEGAELMESVMDVVRKEAESCDCLQGFQLTHSLGGGTGSGMGTLLLSKIREEYPDRIINTFSILPSPKVSDTVVEPYNATLSVHQLIENADETFCIDNEALYDICSKTLKLPTPTYGDLNHLVSATMSGVTTCLRFPGQLNADLRKLAVNMVPFPRLHFFMPGFAPLTSRGSQQYRALTVAELTQQMFDAKNMMAACDPRHGRYLTAAAIFRGRMPMREVDEQMFNIQDKNSSYFADWLPNNVKTAVCDIPPRGLKMSATFIGNNTAIQELFKRVSEQFTAMFRRKAFLHWYTGEGMDEMEFTEAESNMNDLVSEYQQYQDATAEEEEDEEYAEEEVA

SEQ ID NO: 7969 - protein, 191 aa, Homo sapiens
MAAAKDTHEDHDTSTENTDESNHDPQFEPIVSLPEQEIKTLEEDEEELFKMRAKLFRFASENDLPEWKERGTGDVKLLKHKTLKICANHYITPMMELKPNAGSDRAWVWNTHADFADECPKPELLAIRFLNAESEPRALGTCLTWGSPAWQRGGLCATNAVAFWGEGAVTGKCVVWAALPCCLGAMPRLKP

SEQ ID NO: 7970 - protein, 122 aa, Homo sapiens; identical to SEQ ID NO: 7564

SEQ ID NO: 7971 - protein, 460 aa, Homo sapiens
MASLLQSDRVLYLVQGEKKVRAPLSQLYFCRYCSELRSLECVSHEVDSHYCPSCLENMPSAEAKLKKNRCANCFDCPGCMHTLSTRATSISTQLPDDPAKTTMKKAYYLACGFCRWTSRDVGMADKSVASGGWQEPENPHTQRMNKLIEYYQQLAQKEKVERDRKKLARRRNYMPLAFSDKYGLGTRLQRPRAGASISTLAGLSLKEGEDQKEIKIEPAQAVDEVEPLPEDYYTRPVNLTEVTTLQQRLLQPDFQPVCASQLYPRHKHLLIKRSLRCRKCEHNLSKPEFNPTSIKFKIQLVAVNYIPEVRIMSIPNLRYMKESQVLLTLTNPVENLTHVTLFECEEGDPDDINSTAKVVVPPKELVLAGKDAAAEYDELAEPQDFQDDPDIIAFRKANKVGIFIKVTPQREEGEVTVCFKMKHDFKNLAAPIRPIEESDQGTEVIWLTQHVELSLGPLLP

SEQ ID NO: 7972 - protein, 1110 aa, Homo sapiens
MEMDAPRPPSLAVPGAASRPGRLLDGGHGRQQVQALSSQLLEVIPDSMRKQEVRTGREAGQGHGTGSPAEQVKALMDLLAGKGSQGSQAPQALDRTPDAPLGPCSNDSRIQRHRKALLSKVGGGPELGGPWHRLASLLLVEGLTDLQLREHDFTQVEATRGGGHPARTVALDRLFLPLSRVSVPPRVSITIGVAGMGKTTLVRHFVRLWAHGQVGKDFSLVLPLTFRDLNTHEKLCADRLICSVFPHVGEPSLAVAVPARALLILDGLDECRTPLDFSNTVACTDPKKEIPVDHLITNIIRGNLFPEVSIWITSRPSASGQIPGGLVDRMTEIRGFNEEEIKVCLEQMFPEDQALLGWMLSQVQADRALYLMCTVPAFCRLTGMALGHLWRSRTGPQDAELWPAALCELYSWYFRMALSGEGQEKGKASPRIEQVAHGGRKMVGTLGRLAFHGLLKKKYVFYEQDMKAFGVDLALLQGAPCSCFLQREETLASSVAYCFTHLSLQEFVAAAYYYGASRRAIFDLFTESGVSWPRLGFLTHFRSAAQRAMQAEDGRLDVFLRFLSGLLSPRVNALLAGSLLAQGEHQAYRTQVAELLQGCLRPDAAVCARAINVLHCLHELQHTELARSVEEAMESGALARLTGPAHRAALAYLLQVSDACAQEANLSLSLSQGVLQSLLPQLLYCRKLRLDTNQFQDPVMELLGSVLSGKDCRIQKISLAENQISNKGAKALARSLLVNRSLTSLDLRGNSIGPQGAKALADALKINRTLTSLSLQGNTVRDDGARSMAEALASNRTLSMLHLQKNSIGPMGAQRMADLKQNRSLKELMFSSNSIGDGGAKALAEALKVNQGLESLDLQSNSISDAGVAALMGALCTNQTLLSLSLRENSISPEGAQAIAHALCANSTLKNLDLTANLLHDQGARAIAVAVRENRTLTSLHLQWNFIQAGAAQALGQALQLNRSLTSLDLQENAIGDDGACAVARALKVNTALTALYLQVASIGASGAQVLGEALAVNRTLEILDLRGNAIGVAGAKALANALKVNSSLRRLNLQENSLGMDGAICIATALSGNHRLQHINLQGNHIGDSGARMISEAIKTNAPTCTVEM

SEQ ID NO: 7973 - protein, 807 aa, Homo sapiens
MLERRALLWQREAGPGWGDRARAGTGGAGGGCGGAMAERGPAFCGLYDTSSLLRYCNDDNLSGTSGMEVDDRVSALEQRLQLQEDELAVLKAALADALRRLRACEEQGAALRARGTPKGRAPPRLGTTASVCQLLKGLPTRTPLNGSGPPRRVGGYATSPSSPKKEATSGRSSVRRYLSPERLASVRREDPRSRTTSSSSNCSAKKEGKTKEVIFSVEDGSVKMFLRGRPVPMMIPDELAPTYSLDTRSELPSCRLKLEWVYGYRGRDCRANLYLLPTGEIVYFVASVAVLYSVEEQRQRHYLGHNDDIKCLAIHPDMVTIATGQVAGTTKEGKPLPPHVRIWDSVSLSTLHVLGLGVFDRAVCCVGFSKSNGGNLLCAVDESNDHMLSVWDWAKETKVVDVKCSNEAVLVATFHPTDPTVLITCGKSHIYFWTLEGGSLSKRQGLFEKHEKPKYVLCVTFLEGGDVVTGDSGGNLYVWGKGGNRITQAVLGAHDGGVFGLCALRDGTLVSGGGRNSILQGSVHTGFSLLVQGHVEELWGLATHPSRAQFVTCGQDKLVHLWSSDSHQPLWSRIIEDPARSAGFHPSGSVLAVGTVTGRWLLLDTETHDLVAIHTDGNEQISVVSFSPDGAYLAVGSHDNLVYVYTVDQGGRKVSRLGKCSGHSSFITHLDWAQDSSCFVTNSGDYEILYWDPATCKQITSADAVRNMEWATATCVLGFGVFGIWSEGADGTDINAVARSHDGKLLASADDFGKVHLFSYPCCQPRALSHKYGGHSSHVTNVAFLWDDSMALTTGGKDTSVLQWRVV

SEQ ID NO: 7974 - protein, 470 aa, Homo sapiens
MEETIKDPPTSAVLLDHCHFSQVIFNSVEKFYIPGGDVTCHYTFTQHFIPRRKDWIGIFRAFKCFQDKLEQELLKWRSQGQKLQVGWKTTREYYTFMWVTLPIDLNNKSAKQQEVQFKAYYLPKDDEYYQFCYVDEDGVVRGASIPFQFRPENEEDILVVTTQGEVEEIEQHNKELCKENQELKDSCISLQKQNSDMQAELQKKQEELETLQSINKKLELKVKEQKDYWETELLQLKEQNQKMSSENEKMGIRVDQLQAQLSTQEKEMEKLVQGDQDKTEQLEQLKKENDHLFLSLTEQRKDQKKLEQTVEQMKQNETTAMKKQQELMDENFDLSKRLSENEIICNALQRQKERLEGENDLLKRENSRLLSYMGLDFNSLPYQVPTSDEGGARQNPGLAYGNPYSGIQESSSPSPLSIKKCPICKADDICDHTLEQQQMQPLCFNCPICDKIFPATEKQIFEDHVFCHSL

SEQ ID NO: 7975 - protein, 340 aa, Homo sapiens
MSKTHDHQLESSLSPVEVFAKTSASLEMNQGVSEERIHLGSSPKKGGNCDLSHQERLQSKSLHLSPQEQSASYQDRRQSWRRASMKETNRRKSLHPIHQGITELSRSISVDLAESKRLGCLLLSSFQFSIQKLEPFLRDTKGFSLESFRAKASSLSEELKHFADGLETDGTLQKCFEDSNGKASDFSLEASVAEMKEYITKFSLERQTWDQLLLHYQQEAKEILSRGSTEAKITEVKVEPMTYLGSSQNEVLNTKPDYQKILQNQSKVFDCMELVMDELQGSVKQLQAFMDESTQCFQKVSVQLGKRSMQQLDPSPARKLLKLQLQNPPAIHGSGSGSCQ

SEQ ID NO: 7976 - protein, 173 aa, Homo sapiens
MTHVASQFASSYVFYWRDYFEDQPLLYPPGFDGRVVVYPSNQTLKDYLSWRQADCHINNLYNTVFWALIQQSGLTPVQAQGRLQGTLAADKNEILFSEFNINYNNELPMYRKGTVLIWQKVDEVMTKEIKLPTEMEGKKMAVTRTRTKPVPLHCDIIGDAFWKEHPEILDEDS

SEQ ID NO: 7977 - protein, 94 aa, Homo sapiens
MEMESAAASTRFHQPHMERKMSAMACEIFNELRLEGKLCDVVIKVNGFEFSAHKNILCSCSSYFRALFTSGWNNTEKKVYNIPGISPDMMKLII

SEQ ID NO: 7978 - protein, 523 aa, Homo sapiens; identical to SEQ ID NO: 5355

SEQ ID NO: 7979 - protein, 123 aa, Homo sapiens
MGTGDFICISMTGGAPWGFRLQGGKEQKQPLQVAKIRNQSKASGSGLCEGDEVVSINGNPCADLTYPEVIKLMESITDSLQMLIKRRVGAPFLFLEDQSHPPFLHLLGYTSLLIVTLVNQPMD

SEQ ID NO: 7980 - protein, 381 aa, Homo sapiens; identical to SEQ ID NO: 6638

SEQ ID NO: 7981 - protein, 204 aa, Homo sapiens
MVMAEGTAVLRRNRPGTKAQYIQQNIRADCSNIDKILEPPEGQDEGVWKYEHLRQFCLELNGLAVKLQSECHPDTCTQMTATEQWIFLCAAHKTPKECPAIDYTRHTLDGAACLLNSNKYFPSRVSIKESSVAKLGSVCRRIYRIFSHAYFHHRQIFDEYENETFLCHRFTKFVMKYNLMSKDNLIVPILEEEVQNSVSGESEA

SEQ ID NO: 7982 - protein, 430 aa, Homo sapiens
MAANLSRNGPALQEAYVRVVTEKSPTDWALFTYEGNSNDIRVAGTGEGGLEEMVEELNSGKVMYAFCRVKDPNSGLPKFVLINWTGEGVNDVRKGACASHVSTMASFLKGAHVTINARAEEDVEPECIMEKVAKASGANYSFHKESGRFQDVGPQAPVGSVYQKTNAVSEIKRVGKDSFWAKAEKEEENRRLEEKRRAEEAQRQLEQERRERELREAARREQRYQEQGGEASPQRTWEQQQEVVSRNRNEQESAVHPREIFKQKERAMSTTSISSPQPGKLRSPFLQKQLTQPETHFGREPAAAISRPRADLPAEEPAPSTPPCLVQAEEEAVYEEPPEQETFYEQPPLVQQQGAGSEHIDHHIQGQGLSGQGLCARALYDYQAADDTEISFDPENLITGIEVIDEGWWRGYGPDGHFGMFPANYVELIE

SEQ ID NO: 7983 - protein, 1062 aa, Homo sapiens
MVSSAQMGFNLQALLEQLSQDELSKFKYLITTFSLAHELQKIPHKEVDKADGKQLVEILTTHCDSYWVEMASLQVFEKMHRMDLSERAKDEVREAALKSFNKRKPLSLGITRKERPPLDVDEMLERFKTEAQAFTETKGNVICLGKEVFKGKKPDKDNRCRYILKTKFREMWKSWPGDSKEVQVMAERYKMLIPFSNPRVLPGPFSYTVVLYGPAGLGKTTLAQKLMLDWAEDNLIHKFKYAFYLSCRELSRLGPCSFAELVFRDWPELQDDIPHILAQARKILFVIDGFDELGAAPGALIEDICGDWEKKKPVPVLLGSLLNRVMLPKAALLVTTRPRALRDLRILAEEPIYIRVEGFLEEDRRAYFLRHFGDEDQAMRAFELMRSNAALFQLGSAPAVCWIVCTTLKLQMEKGEDPVPTCLTRTGLFLRFLCSRFPQGAQLRGALRTLSLLAAQGLWAQTSVLHREDLERLGVQESDLRLFLDGDILRQDRVSKGCYSFIHLSFQQFLTALFYTLEKEEEEDRDGHTWDIGDVQKLLSGVERLRNPDLIQAGYYSFGLANEKRAKELEATFGCRMSPDIKQELLRCDISCKGGHSTVTDLQELLGCLYESQEEELVKEVMAQFKEISLHLNAVDVVPSSFCVKHCRNLQKMSLQVIKENLPENVTASESDAEVERSQDDQHMLPFWTDLCSIFGSNKDLMGLAINDSFLSASLVRILCEQIASDTCHLQRVVFKNISPADAHRNLCLALRGHKTVTYLTLQGNDQDDMFPALCEVLRHPECNLRYLGLVSCSATTQQWADLSLALEVNQSLTCVNLSDNELLDEGAKLLYTTLRHPKCFLQRLSLENCHLTEANCKDLAAVLVVSRELTHLCLAKNPIGNTGVKFLCEGLRYPECKLQTLVLWNCDITSDGCCDLTKLLQEKSSLLCLDLGLNHIGVKGMKFLCEALRKPLCNLRCLWLWGCSIPPFSCEDLCSALSCNQSLVTLDLGQNPLGSSGVKMLFETLTCSSGTLRTLRLKIDDFNDELNKLLEEIEEKNPQLIIDTEKHHPWAERPSSHDFMI

SEQ ID NO: 7984 - protein, 129 aa, Homo sapiens; identical to SEQ ID NO: 6440

SEQ ID NO: 7985 - protein, 170 aa, Homo sapiens
MEVAEPSSPTEEEEEEEEHSAEPRAARSNPEGAEDRAVGAQASVGSRSEGEGEAASADDGSLNTSGAGPKSWQVPPPAPEVQIRTPRVNCPEKVIICLDLSEEMSLPKLESFNGQQKTELPVTENVQTIPPPYVVRTILVYSRPPCQPQFSLTEPMKVGEAWEREGCLQP

SEQ ID NO: 7986 - protein, 481 aa, Homo sapiens; identical to SEQ ID NO: 7546

SEQ ID NO: 7987 - protein, 661 aa, Homo sapiens
MNTGRDSQSPDSAWRSYNDGNQETLNGDATYSSLAAKGFRSVRPNLQDKRSPTQSQITVNGNSGGAVSPMSYYQRPFSPSAYSLPASLNSSIVMQHGTSLDSTDTYPQHAQSLDGTTSSSIPLYRSSEEEKRVTVIKAPHYPGIGPVDESGIPTAIRTTVDRPKDWYKTMFKQIHMVHKPDDDTDMYNTPYTYNAGLYNPPYSAQSHPAAKTQTYRPLSKSHSDNSPNAFKDASSPVPPPHVPPPVPPLRPRDRSSTEKHDWDPPDRKVDTRKFRSEPRSIFEYEPGKSSILQHERPPPKKPLDYVQDHSSGVFNEASLYQSSIDRSLERPMSSASMASDFRKRRKSEPAVGPPRGLGDQSASRTSPGRVDLPGSSTTLTKSFTSSSPSSPSRAKDRESPRSYSSTLTDMGRSAPRERRGTPEKEKLPAKAVYDFKAQTSKELSFKKGDTVYILRKIDQNWYEGEHHGRVGIFPISYVEKLTPPEKAQPARPPPPAQPGEIGEAIAKYNFNADTNVELSLRKGDRVILLKRVDQNWYEGKIPGTNRQGIFPVSYVEVVKKNTKGAEDYPDPPIPHSYSSDRIHSLSSNKPQRPVFTHENIQGGGEPFQALYNYTPRNEDELELRESDVIDVMEKCDDGWFVGTSRRTKFFGTFPGNYVKRL

SEQ ID NO: 7988 - protein, 160 aa, Homo sapiens; identical to SEQ ID NO: 6461

SEQ ID NO: 7989 - protein, 238 aa, Homo sapiens
MDCREMDLYEDYQSPFDFDAGVNKSYLYLSPSGNSSPPGSPTLQKFGLLRTDPVPEEGEDVAATISATETLSEEEQEELRRELAKVEEEIQTLSQVLAAKEKHLAEIKRKLGINSLQELKQNIAKGWQDVTATSAYKKTSETLSQAGQKASAAFSSVGSVITKKLEDVNIRSIQHSISMPAMRNSPTFKSFEEKVENLKSKVGGTKPAGGDFGEVLNSAANASATTTEPLPEKTQESL

SEQ ID NO: 7990 - protein, 35 aa, Homo sapiens
MQTSSSRSVHLSEWQKNYFAITSGICTGPKADAYR

SEQ ID NO: 7991 - protein, 108 aa, Homo sapiens
MTRGNQRELARQKNMKKQSDSVKGKRRDDGLSAAARKQSAITSSRNFLYPAYVYFPSSVPSPPRKYTQTYYAAVPAGWWGSGGGPATQPAAGGRWRFLHILGTQPQSH

SEQ ID NO: 7992 - protein, 281 aa, Homo sapiens
MGAGNLPPITQEEALHILGFQPPFEDIRFGPFTGNTTLMRWFRQINDHFHVKGCSYVLYKPHGKNKTAGETASGALSKLTRGLKDESLAYIYHCQNHYFCPIGFEATPVKANKAFSRGPLSPQEVEYWILIGESSRKHPAIHCKKWADIVTDLNTQNPEYLDIRHLERGLQYRKTKKPTFFSSQVGGNLHCIIAFQRLNWQRFGLWNFPFGTIRQESQPPTHAQGIAKSESEDNISKKQHGRLGRSFSASFHQDSAWKKMSSIHERRNSGYQGYSDYDGND

SEQ ID NO: 7993 - protein, 70 aa, Homo sapiens
MRALTVQRVKFAMDLPLLKRAGQDLAEKTKNFVSRSLVIGEVLSMADMATGVKCGIIYWLFGGAIRNLGS

SEQ ID NO: 7994 - protein, 547 aa, Homo sapiens; identical to SEQ ID NO: 6039

SEQ ID NO: 7995 - protein, 161 aa, Homo sapiens
MSYNCCSRNFSSCSHGGYLHYPGSSCGSSYPSNLVYSTDLCSPSTCQLGSSLYRGCQETCWRPNSCQTFCYYAAHMLCNSCLTMHVGSRGFGSNSCCSLSCGSRSCSSLGCGSNGFRYLNYRIHTSPSQSYRSRFCHPIYFPPRRWFHSSCYQPFCRSGFY

SEQ ID NO: 7996 - protein, 164 aa, Homo sapiens [sequence omitted]

SEQ ID NO: 7997 - protein, 721 aa, Homo sapiens
MEEELKCPVCGSLFREPIILPCSHNVCLPCARTIAVQTPDGGSAAGGLGGGAGGGGDHADKLSLYSETDSGYGSYTPSLKSPNGVRVLPMVPAPPGSSAAAARGAACSSLSSSSSSITCPQCHRSASLDHRGLRGFQRNRLLEAIVQRYQQGRGAVPGTSAAAAVAICQLCDRTPPEPAATLCEQCDVLYCSACQLKCHPSRGPFAKHRLGAPSGGGGCKSPGGAGAGATGGSTARKFPTCPEHEMENYSMYCVSCRTPVCYLCLEEGRHAKHEVKPLGAMWKQHKAQLSQALNGVSDKAKEAKEFLVQLKNILQQIQENGLDYEACLVAQCDALVDALTRQKAKLLTKVTKEREHKLKMVWDQINHCTLKLRQSTGLMEYCLEVIKENDPSGFLQISDALIKRVQVSQEQWVKGALEPKVSAEFDLTLDSEPLLQAIHQLDFIQMKCRVPPVPLLQLEKCCTRNNSVTLAWRMPPFTHSPVDGYILELDDGAGGQFREVYVGKETLCTIDGLHFNSTYNARVKAFNSSGVGPYSKTVVLQTSDVAWFTFDPNSGHRDIILSNDNQTATCSSYDDRVVLGTAAFSKGVHYWELHVDRYDNHPDPAFGVARASVVKDMMLGKDDKAWAMYVDNNRSWFMHCNSHTNRTEGGVCKGATVGVLLDLNKHTLTFFINGQQQGPTAFSHVDGVFMPALSLNRNVQVTLHTGLEVPTNLGRPKLSGN

SEQ ID NO: 7998 - protein, 492 aa, Homo sapiens
MDFLLGNPFSSPVGQRIEKATDGSLQSEDWALNMEICDIINETEEGPKDALRAVKKRIVGNKNFHEVMLALTVLETCVKNCGHRFHVLVASQDFVESVLVRTILPKNNPPTIVHDKVLNLIQSWADAFRSSPDLTGVVTIYEDLRRKGLEFPMTDLDMLSPIHTPQRTVFNSETQSGQDSVGTDSSQQEDSGQHAAPLPAPPILSGDTPIAPTPEQIGKLRSELEMVSGNVRVMSEMLTELVPTQAEPADLELLQELNRTCRAMQQRVLELIPQIANEQLTEELLIVNDNLNNVFLRHERFERFRTGQTTKAPSEAEPAADLIDMGPDPAATGNLSSQLAGMNLGSSSVRAGLQSLEASGRLEDEFDMFALTRGSSLADQRKEVKYEAPQATDGLAGALDARQQSTGAIPVTQACLMEDIEQWLSTDVGNDAEEPKGVTSEEFDKFLEERAKAADRLPNLSSPSAEGPPGPPSGPAPRKKTQEKDDDMLFAL

SEQ ID NO: 7999 - protein, 248 aa, Homo sapiens; identical to SEQ ID NO: 7249

SEQ ID NO: 8000 - protein, 6 aa, Homo sapiens
MSRRRF

SEQ ID NO: 8001 - protein, 54 aa, Homo sapiens
MSEQGDLNQAIAEEGGTEQETATPENGIVKSESLDEEEKLELQRRLEAQNQERR

SEQ ID NO: 8002 - protein, 481 aa, Homo sapiens; identical to SEQ ID NO: 7546

SEQ ID NO: 8003 - protein, 103 aa, Homo sapiens; identical to SEQ ID NO: 6256

SEQ ID NO: 8004 - protein, 972 aa, Homo sapiens
MERMNWLSRLASRGPGHRIPQGANLQTPVMADPETCLMVFKNHWSQVVRILERQGPRAAPGGADDLSAVRNHTYQMLTLLAEDRAVPSAPTGPGPLLEFALHEDLLTRVLTWQLQWDELGDGVEERRAEQLKLFEMLVSEARQPLLRHGPVREALLTLLDACGRPVPSSPALDEGLVLLLSQLCVCVAQEPSLLEFFLQPPPEPGAAPRLLLFSRLVPFVHREGTLGQQARDALLLLMALSAGSPTVGRYIADHSYFCPVLATGLSALYSSLPRKIEVPGDDWHCLRREDWLGVPALALFMSSLEFCNAVIQVAHPLVQKQLVDYIHNGFLVPVMGPALHKTSVEEMIASTAYLELFLRSISEPALLRTFLRFLLLHRHDTHTILDTLVARIGSNSRLCMVSLSLFRTLLNLSCEDVLLQLVLRYLVPCNHVMLSQKPAVRDVDLYGRAADKFLSLIPRCCRHHAPSPPRPEHASWARGPGSPSVDSSSVTTVPRPSTPSRLALFLRQQSLGGSESPGPAPCSPGLSASPASSPGRRPTPAEEPGELEDNYLEYLREARRGVDRCVRACRTWSAPYDGERPSPEPSPFGSRTKKRSLLPEEDRNNVGEGEEEELGRRGRAGGAGEGPGHLPPPQLNGVPGSWPEGAKKVRLVPKEGAGELLEGISEGMAGLEGFGQELRELEVALSNGGTGSESPLEPPLPLEEEEAYESFTCPPEPPGPFLSSPLRTLNQLPSQPFTGPFMAVLFAKLENMLQNSVYVNFLLTGLVAQLACHPQPLLRSFLLNTNMVFQPSVKSLLQVLGSVKNKIENFAASQEDFPALLSKAKKYLIARGKLDWAEGPAAGPAPRRSDPLVKSRRPSLGELLLRHAHSPTRARQAAQLVLQPGRDGAGLGLSGGSPGASTPVLLTRGGAPERQGEALRVKNAVYCAVIFPEFLKELAAISQAHAVTSPFLLETSEEGSGPLISGCGPLNP

SEQ ID NO: 8005 - protein, 641 aa, Homo sapiens; identical to SEQ ID NO: 7834

SEQ ID NO: 8006 - protein, 644 aa, Homo sapiens
MSVTLTSVKRVQSSPNLLAAGRDSQSPDSAWRSYNDGNQETLNGDATYSSLAAKGFRSVRPNLQDKRSPTQSQITVNGNSGGAVSPMSYYQRPFSPSAYSLPASLNSSIVMQHGTSLDSTDTYPQHAQSLDGTTSSSIPLYRSSEEEKRVTVIKAPHYPGIGPVDESGIPTAIRTTVDRPKDWYKTMFKQIHMVHKPGLYNPPYSAQSHPAAKTQTYRPLSKSHSDNSPNAFKDASSPVPPPHVPPPVPPLRPRDRSSTEKHDWDPPDRKVDTRKFRSEPRSIFEYEPGKSSILQHERPASLYQSSIDRSLERPMSSASMASDFRKRRKSEPAVGPPRGLGDQSASRTSPGRVDLPGSSTTLTKSFTSSSPSSPSRAKDRESPRSYSSTLTDMGRSAPRERRGTPEKEKLPAKAVYDFKAQTSKELSFKKGDTVYILRKIDQNWYEGEHHGRVGIFPISYVEKLTPPEKAQPARPPPPAQPGEIGEAIAKYNFNADTNVELSLRKGDRVILLKRVDQNWYEGKIPGTNRQGIFPVSYVEVVKKNTKGAEDYPDPPIPHSYSSDRIHSLSSNKPQRPVFTHENIQGGGEPFQALYNYTPRNEDELELRESDVIDVMEKCDDGWFVGTSRRTKFFGTFPGNYVKRL

SEQ ID NO: 8007 - protein, 96 aa, Homo sapiens
MGKSCKVVVCGQASVGKTSILEQLLYGNHVVGSEMIETQEDIYVGSIETDRGVREQIAESLFSVWSCSRRRLTNAARRRSPSWSLATSVTYRSSGV

SEQ ID NO: 8008 - protein, 304 aa, Homo sapiens
MSKTHDHQLESSLSPVEVFAKTSASLEMNQGVSEERIHLGSSPKKGGNCDLSHQERLQSKSLHLSPQEQSASYQDRRQSWRRASMKETNRRKSLHPIHQGITELSRSISVDLAESKRLGCLLLSSFQFSIQKLEPFLRDTKGFSLESFRAKASSLSEELKHFADGLETDGTLQKCFEDSNGKASDFSLEASVAEMKEYITKFSLERQTWDQLLLHYQQEAKEILSRGSTEAKITEVKVEPMTYLGSSQNEVLNTKPDYQKILQNQSKVFDCMELVMDELQGSVKQLQAFMDESTQCFQKVSVQL

SEQ ID NO: 8009 - protein, 613 aa, Homo sapiens; identical to SEQ ID NO: 5032

SEQ ID NO: 8010 - protein, 519 aa, Homo sapiens
MEGVLYKWTNYLSGWQPRWFLLCGGILSYYDSPEDAWKGCKGSIQMAVCEIQVHSVDNTRMDLIIPGEQYFYLKARSVAERQRWLVALGSAKACLTDSRTQKEKEFAENTENLKTKMSELRLYCDLLVQQVDKTKEVTTTGVSNSEEGIDVGTLLKSTCNTFLKTLEECMQIANAAFTSELLYRTPPGSPQLAMLKSSKMKHPIIPIHNSLERQMELSTCENGSLNMEINGEEEILMKNKNSLYLKSAEIDCSISSEENTDDNITVQGEIRKEDGMENLKNHDNNLTQSGSDSSCSPECLWEEGKEVIPTFFSTMNTSFSDIELLEDSGIPTEAFLASCYAVVPVLDKLGPTVFAPVKMDLVGNIKKVNQKYITNKEEFTTLQKIVLHEVEADVAQVRNSATEALLWLKRGLKFLKGFLTEVKNGEKDIQTALNNAYGKTLRQHHGWVVRGVFALALRAAPSYEDFVAALTVKEGDHQKEAFSIGMQRDLSLYLPAMEKQLAILDTLYEVHGLESDEVV

SEQ ID NO: 8011 - protein, 481 aa, Homo sapiens; identical to SEQ ID NO: 7546

SEQ ID NO: 8012 - protein, 390 aa, Homo sapiens
MSAANPETPNSTISREASTQSSSAAASQGWVLPEGKIVPNTVFVGGIDARMDETEIGSCFGRYGSVKEVKIITNRTGVSKGYGFVSFVNDVDVQKIVGSQIHFHGKKLKLGPAIRKQKLCARHVQPRPLVVNPPPPPQFQNVWRNPNTETYLQPQITPNPVTQHVQAYSAYPHSPGQVITGCQLLVYNYQEYPTYPDSAFQVTTGYQLPVYNYQPFPAYPRSPFQVTAGYQLPVYNYQAFPAYPNSPFQVATGYQFPVYNYQPFPAYPSSPFQVTAGYQLPVYNYQAFPAYPNSPFQVATGYQFPVYNYQAFPAYPNSPVQVTTGYQLPVYNYQAFPAYPNSAVQVTTGYQFHVYNYQMPPQCPVGEQRRNLWTEAYKWWYLVCLIQRRD

SEQ ID NO: 8013 - protein, 380 aa, Homo sapiens
MEKKKMVTQGNQEPTTTPDAMVQPFTTIPFPPPPQNGIPTEYGVPHTQDYAGQTGEHNLTLYGSTQAHGEQSSNSPSTQNGSLTTEGGAQTDGQQSQTQSSENSESKSTPKRLHVSNIPFRFRDPDLRQMFGQFGKILDVEIIFNERGSKGFGFVTFENSADADRAREKLHGTVVEGRKIEVNNATARVMTNKKMVTPYANGWKLSPVVGAVYGPELYAASSFQADVSLGNDAAVPLSGRGGINTYIPLISLPLVPGFPYPTAATTAAAFRGAHLRGRGRTVYGAVRAVPPTAIPAYPGVVYQDGFYGADLYGGYAAYRYAQPATATAATAAAAAAAAYSDGYGRVYTADPYHALAPAASYGVGAVASLYRGGYSRFAPY

SEQ ID NO: 8014 - protein, 537 aa, Homo sapiens
MDPGDAAILESSLRILYRLFESVLPPLPAALQSRMNVIDHVRDMAAAGLHSNVRLLSSLLLTMSNNNPELFSPPQKYQLLVYHADSLFHDKEYRNAVSKYTMALQQKKALSKTSKVRPSTGNSASTPQSQCLPSEIEVKYKMAECYTMLKQDKDAIAILDGIPSRQRTPKINMMLANLYKKAGQERPSVTSYKEVLRQCPLALDAILGLLSLSVKGAEVASMTMNVIQTVPNLDWLSVWIKAYAFVHTGDNSRAISTICSLEKKSLLRDNVDLLGSLADLYFRAGDNKNSVLKFEQAQMLDPYLIKGMDVYGYLLAREGRLEDVENLGCRLFNISDQHAEPWVVSGCHSFYSKRYSRALYLGAKAIQLNSNSVQALLLKGAALRNMGRVQEAIIHFREAIRLAPCRLDCYEGLIECYLASNSIREAMVMANNVYKTLGANAQTLTLLATVCLEDPVTQEKAKTLLDKALTQRPDYIKAVVKKAELLSREQKYEDGIALLRNALANQSDCVLHRILGDFLVAVNEYQEAMDQYSIALR

SEQ ID NO: 8015 - protein, 116 aa, Homo sapiens [sequence omitted]

SEQ ID NO: 8016 - protein, 94 aa, Homo sapiens
MTGSRNWRATRDMCRYRHNYPDLVERDCNGDTPNLSFYRNEIRFLPNGCFIEDILQNWTDNYDLLEDNHSYIQWLFPLREPGVNWHAKPLTLRE

SEQ ID NO: 8017 - protein, 342 aa, Homo sapiens
MRFWAPWGSRTPSGRSLWTDPVTYYTALHIAVLRNQPDMVELLVHHGADVNRRDRIHESSPLDLASEEPERLPCLQRLLDLGADVNAADKHGKTALLHALASSDGVQIHNTENIRLLLEGGADVKATTKDGDTVFTCIIFLLGETVGGDKEEAQMINRFCFQVTRLLLAHGADPSECPAHESLTHICLKSFKLHFPLLRFLLESGAAYNCSLHGASCWSGFHIIFERLCSHPGCTEDESHADLLRKAETVLDLMVTNSQKLQLPENFDIHPVGSLAEKIQALHFSLRQLESYPPPLKHLCRVAIRLYLQPWPVDVKVKALPLPDRLKWYLLSEHSGSVEDDI

SEQ ID NO: 8018 - protein, 1063 aa, Homo sapiens; identical to SEQ ID NO: 6702

SEQ ID NO: 8019 - protein, 31 aa, Homo sapiens
MSDEVFSTTLAYTKSPKVTKRTTFQDELIRA

SEQ ID NO: 8020 - protein, 201 aa, Homo sapiens
MPLQLKNPRLRQKSRTRCNKSQKKAELLDNEKPAAVVAPITTGYTVKISNYGWDQSDKFVKIYITLTGVHQVPTENVQVHFTERSFDLLVKNLNGKSYSMIVNNLLKPISVEGSSKKVKTDTVLILCRKKVENTRWDYLTQVEKECKEKEKPSYDTETDPSEGLMNVLKKIYEDGDDDMKRTINKAWVESREKQAKGDTEF

SEQ ID NO: 8021 - protein, 159 aa, Homo sapiens; identical to SEQ ID NO: 7300

SEQ ID NO: 8022 - protein, 1534 aa, Homo sapiens
MQRELVYARGDGPGAPRPGSTAHPPHAIPNSPPSTPVPHSMPPSPSRIPYGGTRSMVVPGNATIPRDRISSLPVSRPISPSPSAILERRDVKPDEDMSGKNIAMYRNEGFYADPYLYHEGRMSIASSHGGHPLDVPDHIIAYHRTAIRSASAYCNPSMQAEMHMEQSLYRQKSRKYPDSHLPTLGSKTPPASPHRVSDLRMIDMHAHYNAHGPPHTMQPDRASPSRQAFKKEPGTLVYIEKPRSAAGLSSLVDLGPPLMEKQVFAYSTATIPKDRETSEKMMKTTANRNHTDSAGTPHVSGGKMLSALESTVPPSQPPPVGTSAIHMSLLEMRRSVAELRLQLQQMRQLQLQNQELLRAMMKKAELEISGKVMETMKRLEDPVQRQRVLVEQERQKYLHEEEKIVKKLCELEDFVEDLKKDSTAASRLVTLKDVEDGAFLLRQVGEAVATLKGEFPTLQNKMRAILRIEVEAVRFLKEEPHKLDSLLKRVRSMTDVLTMLRRHVTDGLLKGTDAAQAAQYMAMEKATAAEVLKSQEEAAHTSGQPFHSTGAPGDAKSEVVPLSGMMVRHAQSSPVVIQPSQHSVALLNPAQNLPHVASSPAVPQEATSTLQMSQAPQSPQIPMNGSAMQSLFIEEIHSVSAKNRAVSIEKAEKKWEEKRQNLDHYNGKEFEKLLEEAQANIMKSIPNLEMPPATGPLPRGDAPVDKVELSEDSPNSEQDLEKLGGKSPPPPPPPPRRSYLPGSGLTTTRSGDVVYTGRKENITAKASSEDAGPSPQTRATKYPAEEPASAWTPSPPPVTTSSSKDEEEEEEEGDKIMAELQAFQKCSFMDVNSNSHAEPSRADSHVKDTRSGATVPPKEKKNLEFFHEDVRKSDVEYENGPQMEFQKVTTGAVRPSDPPKWERGMENSISDASRTSEYKTEIIMKENSISNMSLLRDSRNYSQETVPKASFGFSGISPLEDEINKGSKISGLQYSIPDTENQTLNYGKTKEMEKQNTDKCHVSSHTRLTESSVHDFKTEDQEVITTDFGQVVLRPKEARHANVNPNEDGESSSSSPTEENAATDNIAFMITETTVQVLSSGEVHDIVSQKGEDIQTVNIDARKEMTPRQEGTDNEDPVVCLDKKPVIIIFDEPMDIRSAYKRLSTIFEECDEELERMMMEEKIEEEEEEENGDSVVQNNNTSQMSHKKVAPGNLRTGQQVETKSQPHSLATETRNPGGQEMNRTELNKFSHVDSPNSECKGEDATDDQFESPKKKFKFKFPKKQLAALTQAIRTGTKTGKKTLQVVVYEEEEEDGTLKQHKEAKRFEIARSQPEDTPTSIPSASARGSGSSGAPQTSRMPVPMSAKNRPGTLDKPGKQSKLQDPRQYRQANGSAKKSGGDFKPTSPSLPASKIPALSPSSGKSSSLPSSSGDSSNLPNPPATKPSIASNPLSPQTGPPAHSASLIPSVSNGSLKFQSLTHTGKGHHLSFSPQSQNGRAPPPLSFSSSPPSPASSVSLNQGAKGTRTIHTPSLTSYKAQNGSSSKATPSTAKETS

SEQ ID NO: 8023 - protein, 521 aa, Homo sapiens
MTSAFKLDFLPDMMVEGRLLVPDRINGTANKMNGALDHSDQPDPDAIKMFVGQIPRSWSEKELKELFEPYGAVYQINVLRDRSQNPPQSKGCCFVTFYTRKAALEAQNALHNIKTLPGMHHPIQMKPADSEKSNAVEDRKLFIGMVSKKCNENDIRVMFSPFGQIEECRILRGPDGLSRGCAFVTFSTRAMAQNAIKAMHQSQTMEGCSSPIVVKFADTQKDKEQRRLQQQLAQQMQQLNTATWGNLTGLGGLTPQYLALLQQATSSSNLGAFSGIQQMAGMNALQLQNLATLAAAAAAAQTSATSTNANPLSTTSSALGALTSPVAASTPNSTAGAAMNSLTSLGTLQGLAGATVGLNNINALAVAQMLSGMAALNGGLGATGLTNGTAGTMDALTQAYSGIQQYAAAALPTLYSQSLLQQQSAAGSQKEGPEGANLFIYHLPQEFGDQDILQMFMPFGNVISAKVFIDKQTNLSKCFGFVSYDNPVSAQAAIQAMNGFQIGMKRLKVQLKRSKNDSKPY

SEQ ID NO: 8024 - protein, 104 aa, Homo sapiens
MSEQGDLNQAIAEEGGTEQETATPENGIVKSESLDEEEKLELQRRLEAQNQERRKSKSGAGKGKLTRSLAVCEESSARPGGESLQDQESIHLQLSSFSSLQEED

SEQ ID NO: 8025 - protein, 550 aa, Homo sapiens
MEPPQETNRPFSTLDNRSGQVQVLSATPLLQRNPYSSPDIMHIKGSEASSVPYALNQGTTALPKNKNQEGTGHRLLNMLRKTLKESDSEELEITQETPNLVPFGDVVGCLGIHIKNCRHFMPKISLQHYANLFIRISINKAVKCTKMCSLLSKNDEKNTVIKFDEVKYFSVQVPRRYDDKRNNILLELIQYDNREKRAFLLGSVQIHLYEVIQKGCFIEEVQVLHGNIFVCRLEVEFMFSYGNFGYGFSHQLKPLQKITEPSMFMNLAPPPERTDPVTKVITPQTVEYPAFLSPDLNVTVGTPAVQSSNQPSVVRLEKLQQQPRERLEKMKKEYRNLNTWIDKANYLESILMPKLEHKDSEETNIDEASENTKSNHPEEELENIVGVDIPLVNEEAETTANELLDNDSEKGLTIPTLNQSDQDNSTADASKNDESTPSPTEVHSLCTISNQETIKAGRIPPLGERQSESMPDRKMKNVFFPLEVKLKDNYPSILKADSSLSEVNLRSICINPKSRNLDSSPTEISWQNNNLNLAERENTGLVSTRLKIKR

SEQ ID NO: 8026 - protein, 120 aa, Homo sapiens
MSISSDEVNFLVYRYLQESGFSHSAFTFGIESHISQSNINGALVPPAALISIIQKGLQYVEAEVSINEDGTLFDGRPIESLSLIDAVMPDVVQTRQQAYRDKLAQQQAAAAAAAAAAASQ

SEQ ID NO: 8027 - protein, 73 aa, Homo sapiens
MSYYQRPFSPSAYSLPASLNSSIVMQHGTSLDSTDTYPQHAQSLDGTTSSSIPLYRSSEEEKRVTVIKAPHYP

SEQ ID NO: 8028 - protein, 238 aa, Homo sapiens
MTEDSQRNFRSVYYEKVGFRGVEEKKSLEILLKDDRLGILPPHHESHAKVMMYRKEQYLDVLHALKVVRFVSDATPQAEVYLRMYQLESGKLPRSPSFPLEPDDEVFLAIAKAMEEMVEDSVDCYWITRRFVNQLNTKYRDSLPQLPKAFEQYLNLEDGRLLTHLRMCSAAPKLPYDLWFKRCFAGCLPESSLQRVWDKVVSGSCKILVFVAVEILLTFKIKVMALNSAEKITKFLEN

SEQ ID NO: 8029 - protein, 539 aa, Homo sapiens; identical to SEQ ID NO: 5502

SEQ ID NO: 8030 - protein, 202 aa, Homo sapiens
MGQKVTGGIKTVDMRDPTYRPLKQELQGLDYCKPTRLDLLLDMPPVSYDVQLLHSWNNNDRSLNVFVKEDDKLIFHRHPVAQSTDAIRGKVGYTRGLHVWQITWAMRQRGTHAVVGVATADAPLHSVGYTTLVGNNHESWGWDLGRNRLYHDGKNQPSKTYPAFLEPDETFIVPDSFLVALDMDDGTLSFIVDGQYMGVAFR

SEQ ID NO: 8031 - protein, 57 aa, Homo sapiens
NLPICMAKTHLSLSHQPDKKGVPRDFILPISDVRASIGAGFIYPLVGTGGREAPLWL

SEQ ID NO: 8032 - protein, 155 aa, Homo sapiens
MNNQKQQKPTLSGQRFKTRKRDEKERFDPTQFQDCIIQGLTETGTDLEAVAKFLDASGAKLDYRRYAETLFDILVAGGMLAPGGTLADDMMRTDVCVFAAQEDLETMQAFAQVFNKLIRRYKYLEKGFEDEVKKLLLFLKGFSESERNKLAMLTG

SEQ ID NO: 8033 - protein, 175 aa, Homo sapiens
  VARIANT 1: note = X can be any amino acid
XFDDQRRMSLHLHGADCDPKTQNEMNICEEEFVEYKNRDAISALMPLFSEEESSDGSKHNNGLPDHISAQLQNTYTLKAFTVGSKCVVWSSLRNTWSKCEILETAEEGTRVLNLSNGMEEIVNPENVWNGIPKLDKSPPEAVSQRVGKDLYFMSVGDTTIKEKGFGGDGDLTVDL

SEQ ID NO: 8034 - protein, 937 aa, Homo sapiens
  VARIANT 1: note = X can be any amino acid
XLRSQPGCGCLWQEAPTHSTGPSVEGEAPSSETGTSLDSPSAYPQGPLVPGSSLSPDHYEHTSVGAYGLYSGPPGQQQRTRRPKLQHSTSILRKQAEEEAIKRSRSLSESYELSSDLQDKQVEMLERKYGGRLVTRHAARTIQTAFRQYQMNKNFERLRSSMSENRMSRRIVLSNMRMQFSFEGPEKVHSSYFEGKQVSVTNDGSQLGALVSPECGDLSEPTTLKSPAPSSDFADAITELEDAFSRQVKSLAESIDDALNCRSLHTEEAPALDAARARDTEPQTALHGMDHRKLDEMTASYSDVTLYIDEEELSPPLPLSQAGDRPSSTESDLRLRAGGAAPDYWALAHKEDKADTDTSCRSTPSLERQEQRLRVEHLPLLTIEPPSDSSVDLSDRSERGSLKRQSAYERSLGGQQGSPKHGPHSGAPKSLPREEPELRPRPPRPLDSHLAINGSANRQSKSESDYSDGDNDSINSTSNSNDTINCSSESSSRDSLREQTLSKQTYHKEARNSWDSPAFSNDVIRKRHYRIGLNLFNKKPEKGVQYLIERGFVPDTPVGVAHFLLQRKGLSRQMIGEFLGNRQKQFNRDVLDCVVDEMDFSTMELDEALRKFQAHIRVQGEAQKVERLIEAFSQRYCICNPGVVRQFRNPDTIFILAFAIILLNTDMYSPNVKPERKMKLEDFIKNLRGVDDGEDIPREMLMGIYERIRKRELKTNEDHVSQVQKVEKLIVGKKPIGSLHPGLGCVLSLPHRRLVCYCRLFEVPDPNKPQKLGLHQREIFLFNDLLVVTKIFQKKKNSVTYSFRQSFSLYGMQVLLFENQYYPNGIRLTSSVPGADIKVLINFNAPNPQDRKKFTDDLRESIAEVQEMEKHRIESELEKQKGVVRPSMSQCSSLKKESGNGTLSRACLDDSYASGEGLKRSALSSSLRDLSEAGVHH

SEQ ID NO: 8035 - protein, 65 aa, Homo sapiens
MVEAADREKVELLNQLEEEKRKVEDLQFRVEEESITKGDLEQKSQISEDPENVATVSEKSRIMEL

SEQ ID NO: 8036 - protein, 209 aa, Homo sapiens
MDFLLGNPFSSPVGQRIEKATDGSLQSEDWALNMEICDIINETEEGPKDALRAVKKRIVGNKNFHEVMLALTVLETCVKNCGHRFHVLVASQDFVESVLVRTILPKNNPPTIVHDKVLNLIQSWADAFRSSPDLTGVVTIYEDLRRKGLEFPMTDLDMLSPIHTPRGPCSTQRHNQDRILWALTPASKRTLASMLPLCPPRPYSPVTRP

SEQ ID NO: 8037 - protein, 84 aa, Homo sapiens
MADTDLFMECEEEELEPWQKISDVIEDSVVEDYNSVDKTTTAGNPLVQQGGQPLILTQNPAPGLGTMVTQPVLRPVQVMQNANH

SEQ ID NO: 8038 - protein, 205 aa, Homo sapiens
MATPLGWSKAGSGSVCLALDQLRDVIESQEELIHQLRNVMVLQDENFVSKEEFQAVEKKLVEEKAAHAKTKVLLAKEEEKLQFALGEVEVLSKQLEKEKLAFEKALSSVKSKVLQESSKKDQLITKCNEIESHIIKQEDILNGKENEIKELQQVISQQKQIFRNHMSDFRIQKQQESYMAQVLDQKHKKASGTRQARSHQHPREK

SEQ ID NO: 8039 - protein, 109 aa, Homo sapiens
MEPSAQQLQLAASLPANLSNFCQGSEMPTTSRPALDVKGGTSPAKEDANQEMSSVAYSNLAVKDRKAVAILHYPGVASNGTKASGAPTSSSGSPIGSPTTTPPTKPPSF

SEQ ID NO: 8040 - protein, 578 aa, Homo sapiens
MPEIRVTPLGAGQDVGRSCILVSIAGKNVMLDCGMHMGFNDDRRFPDFSYITQNGRLTDFLDCVIISHFHLDHCGALPYFSEMVGYDGPIYMTHPTQAICPILLEDYRKIAVDKKGEANFFTSQMIKDCMKKVVAVHLHQTVQIKVGSESVVYTGDYNMTPDRHLGAAWIDKCRPNLLITESTYATTIRDSKRCRERDFLKKVHETVERGGKVLIPVFALGRAQELCILLETFWERMNLKVPIYFSTGLTEKANHYYKLFIPWTNQKIRKTFVQRNMFEFKHIKAFDRAFADNPGPMVVFATPGMLHAGQSLQIFRKWAGNEKNMVIMPGYCVQGTVGHKILSGQRKLEMEGRQVLEVKMQVEYMSFSAHADAKGIMQLVGQAEPESVLLVHGEAKKMEFLKQKIEQELRVNCYMPANGETVTLPTSPSIPVGISLGLLKREMAQGLLPEAKKPRLLHGTLIMKDSNFRLVSSEQALKELGLAEHQLRFTCRVHLHDTRKEQETALRVYSHLKSVLKDHCVQHLPDGSVTVESVLLQAAAPSEDPGTKVLLVSWTYQDEELGSFLTSLLKKGLPQAPS

SEQ ID NO: 8041 - protein, 189 aa, Homo sapiens
MQPMSFGWDHSLHKRKRLPPVKRSLVYYLKNREVRLQNETSYSRVLHGYAAQQLPSLLKEREFHLGTLNKVFASQWLNHRQVVCGTKCNTLFVVDVQTSQITKIPILKDREPGGVTQQGCGIHAIELNPSRTLLATGGDNPNSLAIYRLPTLDPVCVGDDGHKDWIFSIAWISDTMAVSGSRDGSMGLW

SEQ ID NO: 8042 - protein, 762 aa, Homo sapiens; identical to SEQ ID NO: 7343

SEQ ID NO: 8043 - protein, 453 aa, Homo sapiens
MAGAAGRVQDRALRRFPITLPVGDLSNLHLKEEKIKPDTNGAVVKTNANAEKTDEEEKEDRAAQSLLNKLIRSNLVDNTNQVEVLQRDPNSPLYSVKSFEELRLPQNLIAQSQSGTGKTAAFVLAMLSQVEPANKYPQCLCLSPTYELALQTGKVIEQMGKFYPELKLAYAVRGNKLERGQKISEQIVIGTPGTVLDWCSKLKFIDPKKIKVFVLDEADVMIATQGHQDQSIRIQRMLPRNCQMLLFSATFEDSVWKFAQKVVPDPNVIKLKREEETLDTIKQYYVLCSSRDEKFQALCNLYGAITIAQAMIFCHTRKTASWLAAELSKEGHQVALLSGEMMVEQRAAVIERFREGKEKVLVTTNVCARGIDVEQVSVVINFDLPVDKDGNPDNETYLHRIGRTGRFGKRGLAVNMVDSKHSMNILNRIQEHFNKKIERLDTDDLDEIEKIAN

SEQ ID NO: 8044 - protein, 306 aa, Homo sapiens
MARVPLGRSLTLSPRLEHNGMTSAHHNFRLPGSRDSPASASQVAEIIDLEWYEKSEETHASQIELLETSSTQEPLNASEAFCPRDCMVPVVFPGPVSQEGCCQFTCELLKHIMYQRQQLPLPYEQLKHFYRKPSPQAEEMLKKKPRATTEVSSRKCQQALAELESVLSHLEDFFARTLVPRVLILLGGNALSPKEFYELDLSLLAPYSVDQSLSTAACLRRLFRAIFMADAFSELQAPPLMGTVVMAQGHRNCGEDWFRPKLNYRVPSRGHKLTVTLSCGRPSIRTTAWEDYIWFQAPVTFKGFRE

SEQ ID NO: 8045 - protein, 141 aa, Homo sapiens
MPQLLQNINGIIEAFRRYARTEGNCTALTRGELKRLLEQEFADVIVKPHDPATVDEVLRLLDEDHTGTVEFKEFLVLVFKVAQACFKTLSESAEGACGSQESGSLHSGASQELGFRPRVRPLALRGSAAMTGKLSPRARKE

SEQ ID NO: 8046 - protein, 159 aa, Homo sapiens; identical to SEQ ID NO: 7300

SEQ ID NO: 8047 - protein, 501 aa, Homo sapiens
MDFLLGNPFSSPVGQRIEKATDGSLQSEDWALNMEICDIINETEEGPKDALRAVKKRIVGNKNFHEVMLAHSARRHLSALQVLETCVKNCGHRFHVLVASQDFVESVLVRTILPKNNPPTIVHDKVLNLIQSWADAFRSSPDLTGVVTIYEDLRRKGLEFPMTDLDMLSPIHTPQRTVFNSETQSGQDSVGTDSSQQEDSGQHAAPLPAPPILSGDTPIAPTPEQIGKLRSELEMVSGNVRVMSEMLTELVPTQAEPADLELLQELNRTCRAMQQRVLELIPQIANEQLTEELLIVNDNLNNVFLRHERFERFRTGQTTKAPSEAEPAADLIDMGPDPAATGNLSSQLAGMNLGSSSVRAGLQSLEASGRLEDEFDMFALTRGSSLADQRKEVKYEAPQATDGLAGALDARQQSTGAIPVTQACLMEDIEQWLSTDVGNDAEEPKGVTSEEFDKFLEERAKAADRLPNLSSPSAEGPPGPPSGPAPRKKTQEKDDDMLFAL

SEQ ID NO: 8048 - protein, 38 aa, Homo sapiens
EPVYFAEKVMSLGRNWHRPCLRCQRCHKTLTAGSHAEV

SEQ ID NO: 8049 - protein, 373 aa, Homo sapiens; identical to SEQ ID NO: 5843

SEQ ID NO: 8050 - protein, 150 aa, Homo sapiens
MHTGDPKQDLAYERQYEQQTYQVIPEVIKNFIQYFHKTVSDLIDQKVYELQASRVSSDVIDQKVYEIQDIYENSWTKLTERFFKNTPWPEAEAIAPQVGNDAVFLILYKELYYRHIYAKVSGGPSLEQRFESYYNYCNLFNYILNADGPA

SEQ ID NO: 8051 - protein, 710 aa, Homo sapiens
MAMQEKYPTEGISHVTSPNFCSSSGSPPFQPIKSHVTIPTAHVMPSTLGTSPAKPNSTPVGPSSSKLPLSGLAESVGMTRNGDLGAMKHSPGLSRDLMYFSGATGENGIEQSWFPAVGHERQEEARKFDIPSMESTLNQSAMMETLYSDPHHRVRFHNAASTSKELYRVLPEAKKAPGSGAVFERNGPHSNSSGVLPLGLQPAPGLSKPLPSQVWQPSPDTWHPREQSCELSTCRQQLELIRLQMEQMQLQNGAICHHPAAFGPSLPILEPAQWISILNSNEHLLKEKELLIDKQRKHISQLEQKVRESELQVHSALLGRPAPFGDVCLLRLQELQRENTFLRAQFAQKTEALSREKIDLEKKLSASEVEVQLIRESLKVALQKHSEEVKKQEERVKGRDKHINNLKKKCQKESEQNREKQQRIETLERYLADLPTLEDHQKQSQQLKDSELKSTELQEKVTELESLLEETQAICREKEIQLESLRQREAEFSSAGHSLQDKQSVEETSGEGPEVEMESWQKRYDSLQKIVEKQQQKMDQLRSQVQSLEQEVAQEEGTSQALREEAQRRDSALQQLRTAVKELSVQNQDLIEKNLTLQEHLRQAQPGSPPSPDTAQLALELHQELASCLQDLQAVCSIVTQRAQGHDPNLSLLLGIHSAQHPETQLDLQKPDVIKRKLEEVQQLRRDIEDLRTTMSDRYAQDMGENCVTQ

SEQ ID NO: 8052 - protein, 176 aa, Homo sapiens
MAAATGDPGLSKLQFAPFSSALDVGFWHELTQKKLNEYRLDEAPKDIKGYYYNGDSAGLPARLTLEFSAFDMSAPTPARCCPAIGTLYNTNTLESFKTADKKLLLEQAANEIWESIKSGTALENPVLLNKFLLLTFADLKKYHFYYWFCYPALCLPESLPLIQGPVGLDQRFSLKQ

SEQ ID NO: 8053 - protein, 480 aa, Homo sapiens
MKLKELERPAVQAWSPASQYPLYLATGTSAQQLDSSFSTNGTLEIFEVDFRDPSLDLKHRGVLSALSRFHKLVWGSFGSGLLESSGVIVGGGDNGMLILYNVTHILSSGKEPVIAQKQKHTGAVRALDLNPFQGNLLASGASDSEIFIWDLNNLNVPMTLGSKSQQPPEDIKALSWNRQAQHILSSAHPSGKAVVWDLRKNEPIIKVSDHSNRMHCSGLAWHPDIATQLVLCSEDDRLPVIQLWDLRFASSPLKVLESHSRGILSVSWSQADAELLLTSAKDSQILCRNLGSSEVVYKLPTQSSWCFDVQWCPRDPSVFSAASFNGWISLYSVMGRSWEVQHMRQADKISSSFSKGQPLPPLQVPEQVAQAPLIPPLKKPPKWIRRPTGVSFAFGGKLVTFGLPSTPAHLVPQPCPRLVFISQVTTESEFLMRSAELQEALGSGNLLNYCQNKSQQALLQSEKMLWQFLKPARDSSGARR

SEQ ID NO: 8054 - protein, 613 aa, Homo sapiens; identical to SEQ ID NO: 5032

SEQ ID NO: 8055 - protein, 481 aa, Homo sapiens; identical to SEQ ID NO: 7546

SEQ ID NO: 8056 - protein, 178 aa, Homo sapiens
MSSNECFKCGRSGHWARECPTGGGRGRGMRSRGRGGFTSDRGFQFVSSSLPDICYRCGESGHLAKDCDLQEDEACYNCGRGGHIAKDCKEPKREREQCCYNCGKPGHLARDCDHADEQKCYSCGEFGHIQKDCTKVKCYRCGETGHVAINCSKTSEVNCYRCGESGHLARECTIEATA

SEQ ID NO: 8057 - protein, 28 aa, Homo sapiens
MAMAPSPSLVQVYTSPAAVAVWEWQDGL

SEQ ID NO: 8058 - protein, 200 aa, Homo sapiens
MAATAREDGASGQERGQRGCEHYDRGCLLKAPCCDKLYTCRLCHDNNEDHQLDRFKVKEVQCINCEKIQHAQQTCEECSTLFGEYYCDICHLFDKDKKQYHCENCGICRIGPKEDFFHCLKCNLCLAMNLQGRHKCIENVSRQNCPICLEDIHTSRVVAHVLPCGHLLHRTCYEEMLKELQMSIMYALCFRYDQVLETAG

SEQ ID NO: 8059 - protein, 188 aa, Homo sapiens
MATPLGWSKAGSGSVCLALDQLRDVIESQEELIHQLRNVMVLQDENFVSKEEFQAVEKKLVEEKAAHAKTKVLLAKEEEKLQFALGEVEVLSKQLEKEKLAFEKALSSVKSKVLQESSKKDQLITKCNGRREARALHHGYINGLFPNHPVPVSKAGFHSNTCPQLRIQAGPGGPHLRKGLKGPGRPRK

SEQ ID NO: 8060 - protein, 126 aa, Homo sapiens
MDRSKRNSIAGFPPRVERLEEFEGGGGGEGNVSQVGRVWPSSYRALISAFSRLTRLDDFTCEKIGSGFFSEVFKVRHRASGQVMALKMNTLSSNRANMLKEVQLMNRLSHPNILRCRSMNQNFSPN

SEQ ID NO: 8061 - protein, 480 aa, Homo sapiens
METDLNSQDRKDLDKFIKFFALKTVQVIVQARLGEKICTRSSSSPTGSDWFNLAIKDIPEVTHEAKKALAGQLPAVGRSMCVEISLKTSEGDSMELEIWCLEMNEKCDKEIKVSYTVYNRLSLLLKSLLAITRVTPAYRLSRKQGHEYVILYRIYFGEVQLSGLGEGFQTVRVGTVGTPVGTITLSCAYRINLAFMSTRQFERTPPIMGIIIDHFVDRPYPSSSPMHPCNYRTAGEDTGVIYPSVEDSQEVCTTSFSTSPPSQLMVPGKEGGVPLAPNQPVHGTQADQERLATCTPSDRTHCAATPSSSEDTETVSNSSEGRASPHDVLETIFVRKVGAFVNKPINQVTLTSLDIPFAMFAPKNLELEDTDPMVNPPDSPETESPLQGSLHSDGSSGGSSGNTHDDFVMIDFKPAFSKDDILPMDLGTFYREFQNPPQLSSLSIDIGAQSMAEDLDSLPEKLAVHEKNVREFDAFVETLQ

SEQ ID NO: 8062 - protein, 129 aa, Homo sapiens; identical to SEQ ID NO: 6440

SEQ ID NO: 8063 - protein, 115 aa, Homo sapiens
MVEDELALFDKSINEFWNKFKSTDTSCQMAGLRDTYKDSIKAFAEKLSVKLKEEERMVEMFLEYQNQISRQNKLIQEKKDNLLKLIAEVKGKKQELEVLTANIQDLKEEYSRKKE

SEQ ID NO: 8064 - protein, 133 aa, Homo sapiens
MASSAREHLLFVRRRNPQMRYTLSPENLQSLAAQSSMPENMTLQRANSDTDLVTSESRSSLTASMYEYTLGQAQNLIIFWDIKEEVDPSDWIGLYHIDENSPANFWDSKNRGVTGTQKGQIVWRIEPGPYFME

SEQ ID NO: 8065 - protein, 87 aa, Homo sapiens
MSLFGTTSGFGTSGTSMFGSATTDNHNPMKDIEVTSSPDDSIGCLSFSPPTLPGNFLIAGSWANDVRCWEVQDSGQTIPKAQQMHTG

SEQ ID NO: 8066 - protein, 442 aa, Homo sapiens
MANSFAARIFTTLSDLQTNMANLKVIGIVIGKTDVKGFPDRKSIGSERYTFSFTIRDSPAHFVNAASWGNEDYIKSLSDSFRVGDCVIIENPLIQRKEIEREEKFSPATPSNCKLLLSENHSTVKVCSSYEVDTKLLSLIHLPVKESHDYYSLGDIVANGHSLNGRIINVLAAVKSVGEPKYFTTSDRRKGQRCEVRLYDETESSFAMTCWDNESILLAQSWMPRETVIFASDVRINFDKFRNCMTATVISKTIITTNPDIPEANILLNFIRENKETNVLDDEIDSYFKESINLSTIVDVYTVEQLKGKALKNEGKADPSYGILYAYISTLNIDDETTKVVRNRCSSCGYIVNEASNMCTTCNKNSLDFKSVFLSFHVLIDLTDHTGTLHSCSLTGSVAEETLGCTFVLSHRARSGLKISVLSCKLADPTEASRNLSGQKHV

SEQ ID NO: 8067 - protein, 216 aa, Homo sapiens
MNNQKQQKPTLSGQRFKTRKRDEKERFDPTQFQDCIIQGLTETGTDLEAVAKFLDASGAKLDYRRYAETLFDILVAGGMLAPGGTLADDMMRTDVCVFAAQEDLETMQAFAQVFNKLIRRYKYLEKGFEDEVKKLLLFLKGFSESERNKLAMLTGVLLANGTLNASILNSLYNENLVKEGVSAAFAVKLFKSWINEKDINAVAASLRKVSMDNRLM

SEQ ID NO: 8068 - protein, 142 aa, Homo sapiens; identical to SEQ ID NO: 7587

SEQ ID NO: 8069 - protein, 148 aa, Homo sapiens
AIHILDVLVLNGTDVREQHFNQRIQLAEKFVKAVSKPSRPDMNPIRVKEVYRLEEMEKIFVRLEMKIIKGSSGTPKLSYTGRDDRHFVPMGLYIVRTVNEPWTMGFSKSFKKKFFYNKKTKDSTFDLPYYPFPSFFFPNRRYNLLLFV

SEQ ID NO: 8070 - protein, 99 aa, Homo sapiens
MEEIPAQEAAGSPRVQFQSLETQSECLSPEPQFVQDTDMEQGLTGGILLRLPTTRIHSVNSCPALSHTQASAFSGETLAVLTAGISKRWPKYRLPIDIA

SEQ ID NO: 8071 - protein, 830 aa, Homo sapiens
MKRGRLPSSSEDSDDNGSLSTTWSQNSRSQHRRSSCSRHEDRKPSEVFRTDLITAMKLHDSYQLNPDEYYVLADPWRQEWEKGVQVPVSPGTIPQPVARPKKYIVSSGSEPPELGYVDIRTLADSVCRYDLNDMDAAWLELTNEEFKEMGMPELDEYTMERVLEEFEQRCYDNMNHAIETEEGLGIEYDEDVVCDVCQSPDGEDGNEMVFCDKCNICVHQACYGILKVPEGSWLCRTCALGVQPKCLLCPKKGGAMKPTRSGTKWVHVSCALWIPEVSIGSPEKMEPITKVSHIPSSRWALVCSLCNEKFGASIQCSVKNCRTAFHVTCAFDRGLEMKTILAENDEVKFKSYCPKHSSHRKPEESLGKGAAQENGAPECSPRNPLEPFASLEQNREEAHRVSVRKQKLQQLEDEFYTFVNLLDVARALRLPEEVVDFLYQYWKLKRKVNFNKPLITPKKDEEDNLAKREQDVLFRRLQLFTHLRQDLERVRNLTYMVTRREKIKRSVCKVQEQIFNLYTKLLEQERVSGVPSSCSSSSLENMLLFNSPSVGPDAPKIEDLKWHSAFFRKQMGTSLVHSLKKPHKRDPLQNSPGSEGKTLLKQPDLCGRREGMVVPESFLGLEKTFAEARLISAQQKNGVVMPDHGKRRDNRFHCDLIKGDLKDKSFKQSHKPLRSTDVSQRHLDNTRAATSPGVGQSAPGTRKEIVPKCNGSLIKVNYNQTAVKVPTTPASPVKNWGGFRIPKKGERQQQGEAHDGACHQHSDYPYLGLGRVPAKERAKSKLKSDNENDGYVPDVEMSDSESEASEKKCIHTSSTISRRTDIIRRSILAS

SEQ ID NO: 8072 - protein, 133 aa, Homo sapiens
MASEDIAKLAETLAKTQVAGGQLSFKGKSLKLNTAEDAKDVIKEIEDFDSLEALRLEGNTVGVEAARVIAKALEKKSELKRCHWSDMFTGRLRTEIPPALISLGEGLITAGAQLVELDLSDNAFGPDGVQGFE

SEQ ID NO: 8073 - protein, 129 aa, Homo sapiens
MSPGSGVKSEYMKRYQEPRWEEYGPCYRELLHYRLGRRLLEQAHAPWLWDDWGPAGSSEDSASSESSGAGGPAPRCAPPSPPPPVEPATQEEAERRARGAPEEQDAEAGDAEAEDAEDAALPGNAWLRT

SEQ ID NO: 8074 - protein, 129 aa, Homo sapiens; identical to SEQ ID NO: 6440

SEQ ID NO: 8075 - protein, 133 aa, Homo sapiens
MAEKLITQTFSHHNQLAQKTRREKRARQEAERREKAERAARLAKEAKSETSGPQIKELTDEEAERLQLEIDQKKDAENHEAQLKNGSLDSPGKQDTEEDEEEDEKDKGKLKPNLGNGADLPNYRWTQTLSELD

SEQ ID NO: 8076 - protein, 790 aa, Homo sapiens; identical to SEQ ID NO: 4974

SEQ ID NO: 8077 - protein, 451 aa, Homo sapiens
MYGAPGAPAQSASVTVVRSLRRPPPQATGVSFMNNQKQQKPTLSGQRFKTRKRDEKERFDPTQFQDCIIQGLTETGTDLEAVAKFLDASGAKLDYRRYAETLFDILVAGGMLAPGGTLADDMMRTDVCVFAAQEDLETMQAFAQVFNKLIRRYKYLEKGFEDEVKKLLLFLKGFSESERNKLAMLTGVLLANGTLNASILNSLYNENLVKEGVSAAFAVKLFKSWINEKDINAVAASLRKVSMDNRLMELFPANKQSVEHFTKYFTEAGLKELSEYVRNQQTIGARKELQKELQEQMSRGDPFKDIILYVKEEMKKNNIPEPVVIGIVWSSVMSTVEWNKKEELVAEQAIKHLKQYSPLLAAFTTQGQSELTLLLKIQEYCYDNIHFMKAFQKIVVLFYKAEVLSEEPILKWYKDAHVAKGKSVFLEQMKKFVEWLKNAEEESESEAEEGD

SEQ ID NO: 8078 - protein, 315 aa, Homo sapiens
MAGGAREVLTLQLGHFAGFVGAHWWNQQDAALGRATDSKEPPGELCPDVLYRTGRTLHGQETYTPRLILMDLKGSLSSLKEEGGLYRDKQLDAAIAWQGKLTTHKEELYPKNPYLQDFLSAEGVLSSDGVWRVKSIPNGKGSSPLPTATTPKPLIPTEASIRVWSDFLRVHLHPRSICMIQKYNHDGEAGRLEAFGQGESVLKEPKYQEELEDRLHFYVEECDYLQVVAWQCALQGGSSSHPANYLSSLTPAQGFQILCDLHDGFSGVGAKAAELLQDEYSGRGIITWGLLPGPYHRGVSGTWRSKHSNPIGRVA

SEQ ID NO: 8079 - protein, 94 aa, Homo sapiens
CTSSCTPSCCQQSSCQPACCTSSPCQQACCVPVCCKTVCCKPSSCQPACCISSPCQQSCCVPVCCKPICCVPPACCTTSCCRPSSSVSLLCRPV

SEQ ID NO: 8080 - protein, 406 aa, Homo sapiens
MAANLSRNGPALQEAYVRVVTEKSPTDWALFTYEGNSNDIRVAGTGEGGLEEMVEELNSGKVMYAFCRVKDPNSGLPKFVLINWGAHVTINARAEEDVEPECIMEKVAKASGANYSFHKESGRFQDVGPQAPVGSVYQKTNAVSEIKRVGKDSFWAKAEKEEENRRLEEKRRAEEAQRQLEQERRERELREAARREQRYQEQGGEASPQSRTWEQQQEVVSRNRNEQESAVHPREIFKQKERAMSTTSISSPQPGKLRSPFLQKQLTQPETHFGREPAAAISRPRADLPAEEPAPSTPPCLVQAEEEAVYEEPPEQETFYEQPPLVQQQGAGSEHIDHHIQGQGLSGQGLCARALYDYQAADDTEISFDPENLITGIEVIDEGWWRGYGPDGHFGMFPANYVELIE

SEQ ID NO: 8081 - protein, 326 aa, Homo sapiens; identical to SEQ ID NO: 7218

SEQ ID NO: 8082 - protein, 227 aa, Homo sapiens
MLCWGYWSLGQPGISTNLQGIVAEPQVCGFISDRSVKEVACGGNHSVFLLEDGEVYTCGLNTKGQLGHEREGNKPEQIGALADQHIIHVACGESHSLALSDRGQLFSWGAGSDGQLGLMTTEDSVAVPRLIQKLNQQTILQVSCGNWHCLALAADGQFFTWGKNSHGQLGLGKEFPSQASPQRVRSLEGIPLAQVAAGGAHSFALSLSGAVFGWGMNNAGQLGLSDE

SEQ ID NO: 8083 - protein, 207 aa, Homo sapiens
MSSPLASLSKTRKVPLPSEPMNPGRRGIRIYGDVPASHDSELMAFMTRKLWDLEQQVKAQTDEILSKDQKIAALEDLVQTLRPHPAEATLQRQEELETMCVQLQRQVREMERFLSDYGLQWVGEPMDQEDSESKTVSEHGERDWMTAKKFWKPGDSLAPPEVDFDRLLASLQDLSELVVEGDTQVTPVPGGARLRTLEPIPLKLYRN

SEQ ID NO: 8084 - protein, 238 aa, Homo sapiens; identical to SEQ ID NO: 8028

SEQ ID NO: 8085 - protein, 122 aa, Homo sapiens
VRELEAELDAEQKKHAEALKGVRKHERRVKELAYQAEEDRKNLARMQDLVDKLQSKVKSYKRQFEEAEQQANTNLAKYRKAQHELDDAEERADMAETQANKLRARTRDALGPKLSLSPQHKE

SEQ ID NO: 8086 - protein, 160 aa, Homo sapiens
  VARIANT 1: note = X can be any amino acid
XESLVGLQEGKSTEQGNHDQLKELYSAGNLTVLATDPLLHQDPVQLDFHFRLTSQTSAHWHGLLCDRRLFLDIPYQALDQGNRESLTATLEYVEEKTNVDSVFVNFQNDRNDRGALLRAFSYMGFEVVRPDHPALPPLDNVIFMVYPLERDVGHLPSEPP

SEQ ID NO: 8087 - protein, 33 aa, Homo sapiens
MSVTYDDSVGVEVSSDSFWEVGNYKRTVKRIDD

SEQ ID NO: 8088 - protein, 133 aa, Homo sapiens
MWSLTASEGESTTAHFFLGAGDEGLGTRGIGMRPEESDSELLEDEEDEVPPEPQIIVGICAMTKKSKSKPMTQILERLCRFDYLTVVILGEDVILNEPVENWPSCHCLISFHSKGFPLDKAVAYSKLRNPFLI

SEQ ID NO: 8089 - protein, 312 aa, Homo sapiens; identical to SEQ ID NO: 7297

SEQ ID NO: 8090 - protein, 435 aa, Homo sapiens
  VARIANT 1: note = X can be any amino acid
XSILNSNEHLLKEKELLIDKQRKHISQLEQKVRESELQVHSALLGRPAPFGDVCLLRLQELQRENTFLRAQFAQKTEALSREKIDLEKKLSASEVEVQLIRESLKVALQKHSEEVKKQEERVKGRDKHINNLKKKCQKESEQNREKQQRIETLERYLADLPTLEDHQKQSQQLKDSELKSTELQEKVTELESLLEETQAICREKEIQLESLRQREAEFSSAGHSLQDKQSVEETSGEGPEVEMESWQKRYDSLQKIVEKQQQKMDQLRSQVQSLEQEVAQEEGTSQALREEAQRRDSALQQLRTAVKELSVQNQDLIEKNLTLQEHLRQAQPGSPPSPDTAQLALELHQELASCLQDLQAVCSIVTQRAQGHDPNLSLLLGIHSQHPETQLDLQKPDVIKRKLEEVQQLRRDIEDLRTTMSDRYAQDMGENCVTQ

SEQ ID NO: 8091 - protein, 157 aa, Homo sapiens
MELRCGGLLFSSRFDSGNLAHVEKVESLSSDGEGVGGGASALTSGIASSPDYEFNVWTRPDCAETEFENGNRSWFYFSVRGGMPGKLIKINIMNMNKQSKLYSQGMAPFVRTLPTRPRWERIRDRPTFEMTETQFVLSFVHRFVEGRGATTFFAFCY

SEQ ID NO: 8092 - protein, 539 aa, Homo sapiens; identical to SEQ ID NO: 5502

SEQ ID NO: 8093 - protein, 2046 aa, Homo sapiens
MDEVEQDQHEARLKELFDSFDTTGTGSLGQEELTDLCHMLSLEEVAPVLQQTLLQDNLLGRVHFDQFKEALILILSRTLSNEEHFQEPDCSLEAQPKYVRGGKRYGRRSLPEFQESVEEFPEVTVIEPLDEEARPSHIPAGDCSEHWKTQRSEEYEAEGQLRFWNPDDLNASQSGSSPPQDWIEEKLQEVCEDLGITRDGHLNRKKLVSICEQYGLQNVDGEMLEEVFHNLDPDGTMSVEDFFYGLFKNGKSLTPSASTPYRQLKRHLSMQSFDESGRRTTTSSAMTSTIGFRVFSCLDDGMGHASVERILDTWQEEGIENSQEILKALDFSLDGNINLTELTLALENELLVTKNSIHQAALASFKAEIRHLLERVDQVVREKEKLRSDLDKAEKLKSLMASEVDDHHAAIERRNEYNLRKLDEEYKERIAALKNELRKEREQILQQAGKQRLELEQEIEKAKTEENYIRDRLALSLKENSRLENELLENAEKLAEYENLTNKLQRNLENVLAEKFGDLDPSSAEFFLQEERLTQMRNEYERQCRVLQDQVDELQSELEEYRAQGRVLRLPLKNSPSEEVEANSGGIEPEHGLGSEECNPLNMSIEAELVIEQMKEQHHRDICCLRLELEDKVRHYEKQLDETVVSCKKAQENMKQRHENETHTLEKQISDLKNEIAELQGQAAVLKEAHHEATCRHEEEKKQLQVKLEEEKTHLQEKLRLQHEMELKARLTQAQASFEREREGLQSSAWTEEKVRGLTQELEQFHQEQLTSLVEKHTLEKEELRKELLEKHQRELQEGREKMETECNRRTSQIEAQFQSDCQKVTERCESALQSLEGRYRQELKDLQEQQREEKSQWEFEKDELTQECAEAQELLKETLKREKTTSLVLTQEREMLEKTYKEHLNSMVVERQQLLQDLEDLRNVSETQQSLLSDQILELKSSHKRELREREEVLCQAGASEQLASQRLERLEMEHDQERQEMMSKLLAMENIHKATCETADRERAEMSTEISRLQSKIKEMQQATSPLSMLQSGCQVIGEEEVEGDGALSLLQQGEQLLEENGDVLLSLQRAHEQAVKENVKMATEISRLQQRLQKLEPGLVMSSCLDEPATEFFGNTAEQTEQFLQQNRTKQVEGVTRRHVLSDLEDDEVRDLGSTGTSSVQRQEVKIEESEASVEGFSELENSEETRTESWELKNQISQLQEQLMMLCADCDRASEKKQDLLFDVSVLKKKLKMLERIPEASPKYKLLYEDVSRENDCLQEELRMMETRYDEALENNKELTAEVFRLQDELKKMEEVTETFLSLEKSYDEVKIENEGLNVLVLRLQGKIEKLQESVVQRCDCCLWEASLENLEIEPDGNILQLNQTLEECVPRVRSVHHVIEECKQENQYLEGNTQLLEKVKAHEIAWLHGTIQTHQERPRVQNQVILEENTTLLGFQDKHFQHQATIAELELEKTKLQELTRKLKERVTILVKQKDVLSHGEKEEELKAMMHDLQITCSEMQQKVELLRYESEKLQQENSILRNEITTLNEEDSISNLKLGTLNGSQEEMWQKTETVKQENAAVQKMVENLKKQISELKIKNQQLDLENTELSQKNSQNQEKLQELNQRLTEMLCQKEKEPGNSALEEREQEKFNLKEELERCKVQSSTLVSSLEAELSEVKIQTHIVQQENHLLKDELEKMKQLHRCPDLSDFQQKISSVLSYNEKLLKEKEALSEELNSCVDKLAKSSLLEHRIATMKQEQKSWEHQSASLKSQLVASQEKVQNLEDTVQNVNLQMSRMKSDLRVTQQEKEALKQEVMSLHKQLQNAGGKSWAPEIATHPSGLHNQQKRLSWDKLDHLMNEEQQLLWQENERLQTMVQNTKAELTHSREKVRQLESNLLPKHQKHLNPSGTMNPTEQEKLSLKRECDQFQKEQSPANRKVSQMNSLEQELETIHLENEGLKKKQVKLDEQLMEMQHLRSTATPSPSPHAWDLQLLQQQACPMVPREQFLQLQRQLLQAERINQHLQEELENRTSETNTPQALLPEQRAVHADSYRRIGHL

SEQ ID NO: 8094 - protein, 400 aa, Homo sapiens
MAGENHQWQGSILYNMLMSAKQTRAAPEAPETRLVDQCWGCSCGDEPGVGREGLLGGRNVALLYRCCFCGKDHPRQGSILYSMLTSAKQTYAAPKAPEATLGPCWGCSCGSDPGVGRAGLPGGRPVALLYRCCFCGEDHPRQGSILYSLLTSSKQTHVAPAAPEARPGGAWWDRSYFAQRPGGKEALPGGRATALLYRCCFCGEDHPQQGSTLYCVPTSTNQAQAAPEERPRAPWWDTSSGALRPVALKSPQVVCEAASAGLLKTLRFVKYLPCFQVLPLDQQLVLVRNCWASLLMLELAQDRLQFETVEVSEPSMLQKILTTRRRETGGNEPLPVPTLQHHLAPPAEARKVPSASQVQAIKCFLSKCWSLNISTKEYAYLKGTVLFNPGKGKENDCNHH

SEQ ID NO: 8095 - protein, 208 aa, Homo sapiens
MKQLEDHEAFETSSLIGHSARVYALYYKDGLLCTGSDDLSAKLWDVSTGQCVYGIQTHTCAAVKFDEQKLVTGSFDNTVACWEWSSGARTQHFRGHTGAVFSVDYNDELDILVSGSADFTVKVWALSAGTCLNTLTGHTEWVTKVVLQKCKVKSLLHSPGDYILLSADKYEIKIWPIGREINCKCLKTLSVSEDRSICLQPRLHFDGK

SEQ ID NO: 8096 - protein, 212 aa, Homo sapiens
MFGVTKFGDNIEDEWFIVYVIKQITKEFPELVARIEDNDGEFLLIEAADFLPKWLDPENSTNRVFFCHGELCIIPAPRKSGAESWLPTTPPTIPQALNIITAHSEKILASESIRAAVNRRIRGYPEKIQASLHRAHCFLPAGIVAVLKQRPRLVAAAVQAFYLRDPIDLRACRVFKTFLPETRIMTSVTFTKCLYAQLVQQRFVPDRRSGYR

SEQ ID NO: 8097 - protein, 157 aa, Homo sapiens; identical to SEQ ID NO: 7296

SEQ ID NO: 8098 - protein, 1594 aa, Homo sapiens
MSATSWFLVSSSGARHRLPRELIFVGREECELMLQSRSVDKQHAVINYDQDRDEHWVKDLGSLNGTFVNDMRIPDQKYVTLKLNDVIRFGYDSNMYVLERVQHRVPEEALKHEKYTSQLQVSVKGLAPKRSEALPEHTPYCEASNPRPEKGDRRPGTEAASYRTPLYGQPSWWGEDDGSTLPDAQRQGEPYPAERPKGPVQQDGELHGFRAPAEPQGCSFRREPSYFEIPTKETPQPSQPPEVPAHEMPTKDAEAGGGGAAPVVQSHASFTIEFDDCSPGKMKIKDHITKFSLRQRRPPGKEATPGEMVSAETKVADWLVQNDPSLLHRVGPGDDRHSTKSDLPVHTRTLKGHKHEDGTQSDSEDPLAKAASAAGVPLEASGEQVRLQRQIKRDPQELLHNQQAFVIEFFDEDTPRKKRSQSFTHSPSGDPKADKRRGPTPADRDRPSVPAPVQAGGRSSGPQRAGSLKREKTEERLGSPSPASRTPARPFGSVGRRSRLAQDFMAQCLRESSPAARPSPEKVPPVLPAPLTPHGTSPVGPPTPPPAPTDPQLTKARKQEEDDSLSDAGTYTIETEAQDTEVEEARKMIDQVFGVLESPELSRASSATFRPVIRGDRDESDDGGVAQRMALLQEFASRPLGAAPQAEHQGLPVPGSPGGQKWVSRWASLADSYSDPGLTEDGLGRRGGEPEGSLPVRMRRRLPQLPSERADSPAGPESSRRSGPGPPELDSEQPSRLFGQEELDPDSLSDASGSDGGRGPEPGVEPQDSRRRSPQEGPTWSRGRRSPRAPGEPTPASFFIGDQNGDAVLSRKPLAAPGDGEGLGQTAQPSPPARDGVYVSANGRMVIQLRPGRSPEPDGPAPAFLRQESFTKEPASGPPAPGKPPHISSHPLLQDLAATRAARMDFHSQDTHLILKETETALAALEARLLSNSVDAECEGGSTPRPPEDALSGDSDVDTASTVSLRSGKSGPSPTTPQPLRAQKEMSPSPPAAQDPGGTALVSAREQSSERQHHPLGPTDMGRGEPVRRSAIRRGHRPRGSLDWPSEERGPVLAHLPSSDVMASNHETPEATGAGRLGSRRKPAAPPPSPAAREEQSRSSASSQKGPQALTRSNSLSTPRPTRASRLRRARLGDASDTEAADGERGSLGNPEPVGRPAAEQAKKLSRLDILAMPARGSRAGSFTGTSDPEAAPARTSFSGRSVELCCASRKPTMAEARAVSARGSAANTATTTGPRQPFSRARSGSARYTSNTRRRQQGSDYTSTSEEEYGSRHGSPKHTRSHTSTATQTPRAGSSSRARSRAPGPRDTDDDEEEPDPYGFIVQTAEIAEIARLSQTLVKDVAILAQEIHDVAGDGDTLGSSEPAHSASLSNMPSTPASTISAREELVQRIPEASLNFQKVPPGSLNSRDFDQNMNDSCEDALANKTRPRNREEVIFDNLMLNPVSQLSQAIRENTEHLAEKMKILFQNTGRAWEDLEARINAENEVPILKTSNKEISSILKELRRVQKQLEVINAIVDPSGSLDLLTGNRSLASSAQPGLGKGRVAAQSPPSPASAEALLPALPLRNFPQRASCGPPSLPDPTFLPDAERFLI

SEQ ID NO: 8099 - protein, 483 aa, Homo sapiens; identical to SEQ ID NO: 4727

SEQ ID NO: 8100 - protein, 462 aa, Homo sapiens
MGGAEAEPWGRAPGPAIGGRRAGDSCPGWRRRSRSRGRGQRLSHGPRRRPQLLTAAPPLQARGAFRSFPHSWGEDFLASLMFKIQLEPLKLRAWTLNGFVKFRNKETSAGPVAVMGKDYYKILGIPSGANEDEIKKAYRKMALKYHPDKNKEPNAEEKFKEIAEAYDVLSDPKKRGLYDQYGEEGLKTGGGTSGGSSGSFHYTFHGDPHATFASFFGGSNPFDIFFASSRSTRPFSGFDPDDMDVDEDEDPFGAFGRFGFNGLSRGPRRAPEPLYPRRKVQDPPVVHELRVSLEEIYHGSTKRMKITRRRLNPDGRTVRTEDKILHIVIKRGWKEGTKITFPKEGDATPDNIPADIVFVLKDKPHAHFRRDGTNVLYSALISLKEALCGCTVNIPTIDGRVIPLPCNDVIKPGTVKRLRGEGLPFPKVPTQRGDLIVEFKVRFPDRLTPQTRQILKQHLPCS

SEQ ID NO: 8101 - protein, 92 aa, Homo sapiens
VYGAKDIELSPEAQAKIDRYTQQGFGNLPICMAKTHLSLSHQPDKKGVPRDFILPISDVRASIGAGFIYPLVGTRSSPLALVGESQPKQVHP

SEQ ID NO: 8102 - protein, 155 aa, Homo sapiens
MSVTYDDSVGVEVSSDSFWEVGNYKRTVKRIDDGHRLCSDLMNCLHERARIEKAYAQQLTEWARRWRQLVEKGPQYGTVEKAWMAFMSEAERVSELHLEVKASLMNDDFEKIKNWQKEAFHKQMMGGFKETKEAEDGFRKAQKPWAKKLKEVHLS

SEQ ID NO: 8103 - protein, 160 aa, Homo sapiens; identical to SEQ ID NO: 6461

SEQ ID NO: 8104 - protein, 219 aa, Homo sapiens; identical to SEQ ID NO: 7631

SEQ ID NO: 8105 - protein, 105 aa, Homo sapiens
MNMIWRNSISCLRLGKVPHRYQSGYHPVAPLGSRILTDPAKVFEHNMWDHMQWSKEEEAAARKKVKENSAVRVLLEEQVKYEREASKYWDTFYKIHKNKFFKDRN

SEQ ID NO: 8106 - protein, 121 aa, Homo sapiens
  VARIANT 1: note = X can be any amino acid
XEGESPTASPHSSATDDLHHSDRYQTFLRVRANRQTRLNARIGKMKRRKQDEGQVCPLCNRPLAGSEQEMSRHVEHCLSKREGSCMAEDDAVDIEHENNNRFEEYEWCGQKRIRATTLLEG

SEQ ID NO: 8107 - protein, 566 aa, Homo sapiens; identical to SEQ ID NO: 5875

SEQ ID NO: 8108 - protein, 1571 aa, Homo sapiens
MLLHLCSVKNLYQNRFLGLAAMASPSRNSQSRRRCKEPLRYSYNPDQFHNMDLRGGPHDGVTIPRSTSDTDLVTSDSRSTLMVSSSYYSIGHSQDLVIHWDIKEEVDAGDWIGMYLIDEVLSENFLDYKNRGVNGSHRGQIIWKIDASSYFVEPETKICFKYYHGVSGALRATTPSVTVKNSAAPIFKSIGADETVQGQGSRRLISFSLSDFQAMGLKKGMFFNPDPYLKISIQPGKHSIFPALPHHGQERRSKIIGNTVNPIWQAEQFSFVSLPTDVLEIEVKDKFAKSRPIIKRFLGKLSMPVQRLLERHAIGDRVVSYTLGRRLPTDHVSGQLQFRFEITSSIHPDDEEISLSTEPESAQIQDSPMNNLMESGSGEPRSEAPESSESWKPEQLGEGSVPDGPGNQSIELSRPAEEAAVITEAGDQGMVSVGPEGAGELLAQVQKDIQPAPSAEELAEQLDLGEEASALLLEDGEAPASTKEEPLEEEATTQSRAGREEEEKEQEEEGDVSTLEQGEGRLQLRASVKRKSRPCSLPVSELETVIASACGDPETAAHYIRIHTLLHSMPSAQGGSAAEEEDGAEEESTLKDSSEKDGLSEVDTVAADPSALEEDREEPEGATPGTAHPGHSGGHFPSLANGAAQDGDTHPSTGSESDSSPRQGGDHSCEGCDASCCSPSCYSSSCYSTSCYSSSCYSASCYSPSCYNGNRFASHTRFSSVDSAKISESTVFSSQDDEEEENSAFESVPDSMQSPELDPESTNGAGPWQDELAAPSGHVERSPEGLESPVAGPSNRREDWEARIDSHGRVFYVDHVNRTTTWQRPTAAATPDGMRRSGSIQQMEQLNRRYQNIQRTIATERSEEDSGSQSCEQAPAGGGGGGGSDSEAESSQSSLDLRREGSLSPVNSQKITLLLQSPAVKFITNPEFFTVLHANYSAYRVFTSSTCLKHMILKVRRDARNFERYQHNRDLVNFINMFADTRLELPRGWEIKTDQQGKSFFVDHNSRATTFIDPRIPLQNGRLPNHLTHRQHLQRLRSYSAGEASEVSRNRGASLLARPGHSLVAAIRSQHQHESLPLAYNDKIVAFLRQPNIFEMLQERQPSLARNHTLREKIHYIRTEGNHGLEKLSCDADLVILLSLFEEEIMSYVPLQAAFHPGYSFSPRCSPCSSPQNSPGLQRASARAPSPYRRDFEAKLRNFYRKLEAKGFGQGPGKIKLIIRRDHLLEGTFNQVMAYSRKELQRNKLYVTFVGEEGLDYSGPSREFFFLLSQELFNPYYGLFEYSANDTYTVQISPMSAFVENHLEWFRFSGRILGLALIHQYLLDAFFTRPFYKALLRLPCDLSDLEYLDEEFHQSLQWMKDNNITDILDLTFTVNEEVFGQVTERELKSGGANTQVTEKNKKEYIERMVKWRVERGVVQQTEALVRGFYEVVDSRLVSVFDARELELVIAGTAEIDLNDWRNNTEYRGGYHDGHLVIRWFWAAVERFNNEQRLRLLQFVTGTSSVPYEGFAALRGSNGLRRFCIEKWGKITSLPRAHTCFNRLDLPPYPSYSMLYEKLLTAVEETSTFGLE

SEQ ID NO: 8109 - protein, 542 aa, Homo sapiens
MSGLVLGQRDEPAGHRLSQEEILGSTRLVSQGLEALRSEHQAVLQSLSQTIECLQQGGHEEGLVHEKARQLRRSMENIELGLSEAQEEKEGDATKDSLDDLFPNEEEEDPSNGLSRGQGATAAQQGGYEIPARLRTLHNLVIQYAAQGRYEVAVPLCKQALEDLERTSGRGHPDVATMLNILALVYRDQNKYKEAAHLLNDALSIRESTLGPDHPAVAATLNNLAVLYGKRGKYKEAEPLCQRALEIREKVLGTNHPDVAKQLNNLALLCQNQGKYEAVERYYQRALAIYEGQLGPDNPNVARTKNNLASCYLKQGKYAEAETLYKEILTRAHVQEFGSVDDDHKPIWMHAEEREEMSKSRHHEGGTPYAEYGGWYKACKVSSPTVNTTLRNLGALYRRQGKLEAAETLEECALRSRRQGTDPISQTKVAELLGESDGRRTSQEGPGDSVKFEGGEDASVAVEWSGDGSGTLQRSGSLGKIRDVLRRSSELLVRKLQGTEPRPSSSNMKRAASLNYLNQPSAAPLQVSRGLSASTMDLSSSS

SEQ ID NO: 8110 - protein, 515 aa, Homo sapiens
MCQVGEDYGEPAPEEPPPAPRPSREQKCVKCKEAQPVVVIRAGDAFCRDCFKAFYVHKFRAMLGKNRLIFPGEKVLLAWSGGPSSSSMVWQVLEGLSQDSAKRLRFVAGVIFVDEGAACGQSLEERSKTLAEVKPILQATGFPWHVVALEEVFSLPPSVLWCSAQELVGSEGAYKAAVDSFLQQQHVLGAGGGPGPTQGEEQPPQPPLDPQNLARPPAPAQTEALSQLFCSVRTLTAKEELLQTLRTHLILHMARAHGYSKVMTGDSCTRLAIKLMTNLALGRGAFLAWDTGFSDERHGDVVVVRPMRDHTLKEVAFYNRLFSVPSVFTPAVDTKAPEKASIHRLMEAFILRLQTQFPSTVSTVYRTSEKLVKGPRDGPAAGDSGPRCLLCMCALDVDAADSATAFGAQTSSRLSQMQSPIPLTETRTPPGPCCSPGVGWAQRCGQGACRREDPQACIEEQLCYSCRVNMKDLPSLDPLPPYILAEAQLRTQRAWGLQEIRDCLIEDSDDEAGQS

SEQ ID NO: 8111 - protein, 420 aa, Homo sapiens
MFKRTVLSCPPPAAPPLQARGAFRSFPHSWGEDFLASLMFKIQLEPLKLRAWTLNGFVKFRNKETSAGPVAVMGKDYYKILGIPSGANEDEIKKAYRKMALKYHPDKNKEPNAEEKFKEIAEAYDVLSDPKKRGLYDQYGEEGLKTGGGTSGGSSGSFHYTFHGDPHATFASFFGGSNPFDIFFASSRSTRPFSGFDPDDMDVDEDEDPFGAFGRFGFNGLSRGPRRAPEPLYPRRKVQDPPVVHELRVSLEEIYHGSTKRMKITRRRLNPDGRTVRTEDKILHIVIKRGWKEGTKITFPKEGDATPDNIPADIVFVLKDKPHAHFRRDGTNVLYSALISLKEALCGCTVNIPTIDGRVIPLPCNDVIKPGTVKRLRGEGLPFPKVPTQRGDLIVEFKVRFPDRLTPQTRQILKQHLPCS

SEQ ID NO: 8112 - protein, 992 aa, Homo sapiens
MYGSARSVGKVEPSSQSPGRSPRLPRSPRLGHRRTNSTGGSSGSSVGGGSGKTLSMENIQSLNAAYATSGPMYLSDHENVGSETPKSTMTLGRSGGRLPYGVRMTAMGSSPNIASSGVASDTIAFGEHHLPPVSMASTVPHSLRQARDNTIMDLQTQLKEVLRENDLLRKDVEVKESKLSSSMNSIKTFWSPELKKERALRKDEASKITIWKEQYRVVQEENQHMQMTIQALQDELRIQRDLNQLFQQDSSSRTGEPCVAELTEENFQRLHAEHERQAKELFLLRKTLEEMELRIETQKQTLNARDESIKKLLEMLQSKGLSAKATEEDHERTRRLAEAEMHVHHLESLLEQKEKENSMLREEMHRRFENAPDSAKTKALQTVIEMKDSKISSMERGLRDLEEEIQMLKSNGALSTEEREEEMKQMEVYRSHSKFMKNKIGQVKQELSRKDTELLALQTKLETLTNQFSDSKQHIEVLKESLTAKEQRAAILQTEVDALRLRLEEKETMLNKKTKQIQDMAEEKGTQAGEIHDLKDMLDVKERKVNVLQKKIENLQEQLRDKEKQMSSLKERVKSLQADTTNTDTALTTLEEALAEKERTIERLKEQRDRDEREKQEEIDNYKKDLKDLKEKVSLLQGDLSEKEASLLDLKEHASSLASSGLKKDSRLKTLEIALEQKKEECLKMESQLKKAHEAALEARASPEMSDRIQHLEREITRYKDESSKAQAEVDRLLEILKEVENEKNDKDKKIAELESLFSRQVKDQNKKVANLKHKEQVEKKKSAQMLEEARRREDNLNDSSQQLQDSLRKKDDRIEELEEALRESVQITAEREMVLAQEESARTNAEKQVEELLMAMEKVKQELESMKAKLSSTQQSLAEKETHLTNLRAERRKHLEEVLEMKQEALLAAISEKDANIALLELSSSKKKTQEEVAALKREKDRLVQQLKQQTQNRMKLMADNYEDDHFKSSHSNQTNHKPSPDQDEEEGIWA

SEQ ID NO: 8113 - protein, 59 aa, Homo sapiens
MEPSAQQLQLAASLPANLSNFCQGSEMPTTSRPALDVKGGTSPAKEDANQEMSSVAYSN

SEQ ID NO: 8114 - protein, 2325 aa, Homo sapiens
MKKGSQQKIFSKAKIPSSSHSPIPSSMSNMRSRSLSPLIGSETLPFHSGGQWCEQVEIADENNMLLDYQDHKGADSHAGVRYITEALIKKLTKQDNLALIKSLNLSLSKDGGKKFKYIENLEKCVKLEVLNLSYNLIGKIEKLDKLLKLRELNLSYNKISKIEGIENMCNLQKLNLAGNEIEHIPVWLGKKLKSLRVLNLKGNKISSLQDISKLKPLQDLISLILVENPVVTLPHYLQFTIFHLRSLESLEGQPVTTQDRQEAFERFSLEEVERLERDLEKKMIETEELKSKQTRFLEEIKNQDKLNKSLKEEAMLQKQSCEELKSDLNTKNELLKQKTIELTRACQKQYELEQELAFYKIDAKFEPLNYYPSEYAEIDKAPDESPYIGKSRYKRNMFATESYIIDSAQAVQIKKMEPDEQLRNDHMNLRGHTPLDTQLEDKEKKISAAQTRLSELHDEIEKAEQQILRATEEFKQLEEAIQLKKISEAGKDLLYKQLSGRLQLVNKLRQEALDLELQMEKQKQEIAGKQKEIKDLQIAIDSLDSKDPKHSHMKAQKSGKEQQLDIMNKQYQQLESRLDEILSRIAKETEEIKDLEEQLTEGQIAANEALKKDLEGVISGLQEYLGTIKGQATQAQNECRKLRDEKETLLQRLTEVEQERDQLEIVAMDAENMRKELAELESALQEQHEVNASLQQTQGDLSAYEAELEARLNLRDAEANQLKEELEKVTRLTQLEQSALQAELEKERQALKNALGKAQFSEEKEQENSELHAKLKHLQDDNNLLKQQLKDFQNHLNHVVDGLVRPEEVAARVDELRRKLKLGTGEMNIHSPSDVLGKSLADLQKQFSEILARSKWERDEAQVRERKLQEEMALQQEKLATGQEEFRQACERALEARMNFDKRQHEARIQQMENEIHYLQENLKSMEEIQGLTDLQLQEADEEKERILAQLRELEKKKKLEDAKSQEQVFGLDKELKKLKKAVATSDKLATAELTIAKDQLKSLHGTVMKINQERAEELQEAERFSRKAAQAARDLTRAEAEIELLQNLLRQKGEQFRLEMEKTGVGTGANSQVLEIEKLNETMERQRTEIARLQNVLDLTGSDNKGGFENVLEEIAELRREVSYQNDYISSMADPFKRRGYWYFMPPPPSSKVSSHSSQATKDSGVGLKYSASTPVRKPRPGQQDGKEGSQPPPASGYWVYSPIRSGLHKLFPSRDADSGGDSQEESELDDQEEPPFVPPPGYMMYTVLPDGSPVPQGMALYAPPPPLPNNSRPLTPGTVVYGPPPAGAPMVYGPPPPNFSIPFIPMGVLHCNVPEHHNLENEVSRLEDIMQHLKSKKREERWMRASKRQSEKEMEELHHNIDDLLQEKKSLECEVEELHRTVQKRQQQKDFIDGNVESLMTELEIEKSLKHHEDIVDEIECIEKTLLKRRSELREADRLLAEAESELSCTKEKTKNAVEKFTDAKRSLLQTESDAEELERRAQETAVNLVKADQQLRSLQADAKDLEQHKIKQEEILKEINKIVAAKDSDFQCLSKKKEKLTEELQKLQKDIEMAERNEDHHLQVLKESEVLLQAKRAELEKLKSQVTSQQQEMAVLDRQLGHKKEELHLLQGSMVQAKADLQEALRLGETEVTEKCNHIREVKSLLEELSFQKGELNVQISERKTQLTLIKQEIEKEEENLQVVLRQMSKHKTELKNILDMLQLENHELQGLKLQHDQRVSELEKTQVAVLEEKLELENLQQISQQQKGEIEWQKQLLERDKREIERMTAESRALQSCVECLSKEKEDLQEKCDIWEKKLAQTKRVLAAAEENSKMEQSNLEKLELNVRKLQQELDQLNRDKLSLHNDISAMQQQLQEKREAVNSLQEELANVQDHLNLAKQDLLHTTKHQDVLLSEQTRLQKDISEWANRFEDCQKEEETKQQQLQVLQNEIEENKLKLVQQEMMFQRLQKERESEESKLETSKVTLKEQQHQLEKELTDQKSKLDQVLSKVLAAEERVRTLQEEERWCESLEKTLSQTKRQLSEREQQLVEKSGELLALQKEADSMRADFSLLRNQFLTERKKAEKQVASLKEALKIQRSQLEKNLLEQKQENSCIQKEMATIELVAQDNHERARRLMKELNQMQYEYTELKKQMANQKDLERRQMEISDAMRTLKSEVKDEIRTSLKNLNQFLPELPADLEAILERNENLEGELESLKENLPFTMNEGPFEEKLNFSQVHIMDEHWRGEALREKLRHREDRLKAQLRHCMSKQAEVLIKGKRQTEGTLHSLRRQVDALGELVTSTSADSASSPSLSQLESSLTEDSQLGQNQKQNNSLR

SEQ ID NO: 8115 - protein, 218 aa, Homo sapiens
MDELVTLEEADGGSDILLVVPKATVLQNQLDESQQERNDLMQLKLQLEGQVTELRSRVQELERALATARQEHTELMEQYKGISRSHGEITEERDILSRQQGDHVARILELEDDIQTISEKVLTKEVELDRLRDTVKALTREQEKLLGQLKEVQADKEQSEAELQVAQQENHHLNLDLKEAKSWQEEQSAQAQRLKDKVAQMKDTLGQAQQRVRPSWSP

SEQ ID NO: 8116 - protein, 230 aa, Homo sapiens
MKKPRPAAAAPSPRPPACSRGAHPGTASELRVPALRRGGCGDRRLREEAAPEQAAAGPRRSTVGALLASELGWKFYDADDYHPEENRRKMGKGIPLNDQDRIPWLCNLHDILLRDVASGQRVVLACSALKKTYRDILTQGKDGVALKCEESGKEAKQAEMQLLVVHLSGSFEVISGRLLKREGHFMPPELLQSQFETLEPPAAPENFIQISVDKNVSEIIATIMETLKMK

SEQ ID NO: 8117 - protein, 318 aa, Homo sapiens
MCRTALGVTTLQDLGVCWRKEHDPAEMLRVGRAELGGWKPSWEAIVKEVAAATGHTVVLVDQTEDILAKSKKGIEESLRKVAKKKFAENLKAGDEFVEKTLSTIATSTDAASVVHSTDLVVEAIVENLKVKNELFKRLDKFAAEHTIFASNTSSLQITSIANATTRQDRFAGLHFFNPVPVMKLVEVIKTPMTSQKTFESLVDFSKALGKHPVSCKDTPGFIVNRLLVPYLMEAIRLYERGDASKEDIDTAMKLGAGYPMGPFELLDYVGLDTTKFIVDGWHEMDAENPLHQPSPSLNKLVAENKFGKKTGEGFYKYK

SEQ ID NO: 8118 - protein, 221 aa, Homo sapiens
MAIVQTLPVPLEPAPEAATAPQAPVMGSVSSLISGRPCPGGPAPPRHHGPPGPTFFRQQDGLLRGGYEAQEPLCPAVPPRKAVPVTSFTYINEDFRTESPPSPSSDVEDAREQRAHNAHLRGPPPKLIPVSGKLEKNMEKILIRPTAFKPVLPKPRGAPSLPSFMGPRATGLSGSQGSLTQLFGGPASSSSSSSSSSAADKPLAFSGWASGCPSGTLSDSG

SEQ ID NO: 8119 - protein, 194 aa, Homo sapiens
MRELAAVVSRDIYLHNPNIKWNDIIGLDAAKQLVKEAVVYPIRYPQLFTGILSPWKGLLLYGPPGTGKTLLAKAVATECKTTFFNISASTIVSKWRGDSEKLVRVLFELARYHAPSTIFLDELESVMSQRGTASGGEHEGSLRMKTELLVQMDGLARSEDLVFVLAASNLPCLKAIALQPGDRARLRLKKKKCT

SEQ ID NO: 8120 - protein, 184 aa, Homo sapiens
MTFQFNFTIEDHLENELTPIRDGALTLDSSKELSVSESQKGEERDRKCSAEQFDLPQDHLWEHKSMENAAPSQDTDSPLSAASSSRNLEPHGKQPSLRAAKEHAMPKDLKKMLENKVIETLPGFQHVKLSVVKTILLKENFPGENIVSKSFSSHSDLITGVYEGGLKIWECTFDLLAYFTKAKV

SEQ ID NO: 8121 - protein, 117 aa, Homo sapiens
MVLILGRRLNREDLGVRDSPATKRKVFEMDPKSLTGHEFFDFSSGSSHAENILQIFNEFRDSRLFTDVIICVEGKEFPCHRAVLSACSSYFRAMFCNDHRESREMLVEINGILAEAM

SEQ ID NO: 8122 - protein, 165 aa, Homo sapiens
MILNVLEYGSQQVADLTLNLDDYIDAEHLGDFHRTYKNSEELRSRIVSGIITPIHEQWEKANVSSPHREFPPATAREVDPLRIPPHHPHTSRQPPWPRRGGMIVDPLRSGFPRALIDPSSGLPNRLPPGAVPPGARFDPFGPIGTSPPGPNPDHLPPPGYDDMYL

SEQ ID NO: 8123 - protein, 122 aa, Homo sapiens
ALTFSLRAGAASAQDGRCPCGARRPDSRLLQLHITMPFSSPMEAELVRRILSRDAAPLPRPGAVLKDFTVSGNLLFIRLTAADHRQLQLSISSCLQQLSLLMWITQCFLPVFLAQAPSGQRR

SEQ ID NO: 8124 - protein, 804 aa, Homo sapiens
MKSIGVKTVKVCGSKSSVRIEGQPCSLGQSRRKVKLMGERSYTLSIGNGDYFWANKEMLWDYVQTLSDQGAEKHEGTGQSSGITDQEKELSTNAFQAFTSGNYDACLQHLACLQDINKDDYKIILNTAVAEFFKSNQTTTDNLRQTLNQLKNQVHSAVEEMDGLDDVENSMLYYNQAVILYHLRQYTEAISVGEKLYQFIEPFEEKFAQAVCFLLVDLYILTYQAEKALHLLAVLEKMISQGNNNKNGKNETGNNNNKDGSNHKAESGALIEAAKSKIHQYKVRAYIQMKSLKACKREIKSVMNTAGNSAPSLFLKSNFEYLRGNYRKAVKLLNSSNIAEHPGFMKTGECLRCMFWNNLGCIHFAMSKHNLGIFYFKKALQENDNVCAQLSAGSTDPGKKFSGRPMCTLLTNKRYELLYNCGIQLLHIGRPLAAFECLIEAVQVYHANPRLWLRLAECCIAANKGTSEQETKGLPSKKGIVQSIVGQGYHRKIVLASQSIQNTVYNDGQSSAIPVASMEFAAICLRNALLLLPEEQQDPKQENGAKNSNQLGGNTESSESSETCSSKSHDGDKFIPAPPSSPLRKQELENLKCSILACSAYVALALGDNLMALNHADKLLQQPKLSGSLKFLGHLYAAEALISLDRISDAITHLNPENVTDVSLGISSNEQDQGSDKGENEAMESSGKRAPQCYPSSVNSARTVMLFNLGSAYCLRSEYDKARKCLHQAASMIHPKEVPPEAILLAVYLELQNGNTQLALQIIKRNQLLPAVKTHSEVRKKPVFQPVHPIQPIQMPAFTTVQRK

SEQ ID NO: 8125 - protein, 631 aa, Homo sapiens; identical to SEQ ID NO: 5339

SEQ ID NO: 8126 - protein, 194 aa, Homo sapiens
MEDLFETFQDEMGFSNMEDDGPEEEERVAEPQANFNTPQALRFEELLANLLNEQHQIAKELFEQLKMKKPSAKQQKEVEKVKPQCKEVHQTLILDPAQRKRLQQQMQQHVQLLTQIHLLATCNPNLNPEASSTRICLKELGTFAQSSIALHHQYNPKFQTLFQPCNLMGAMQLIEDFSTHVSIDCSPHKTVKKT

SEQ ID NO: 8127 - protein, 599 aa, Homo sapiens; identical to SEQ ID NO: 4782

SEQ ID NO: 8128 - protein, 539 aa, Homo sapiens; identical to SEQ ID NO: 5502

SEQ ID NO: 8129 - protein, 188 aa, Homo sapiens
  VARIANT 1: note = X can be any amino acid
XYVNAVDSRWSSYGNEATSSAHYVERDRFIVTDLSGHRKHSSTGDLLSLELQQAKSNSLLLQREANALAMQQKWNSLDEGRHLTLNLLSKEIELRNGELQSDYTEDATDTKPDRDIELELSALDTDEPDGQSEPIEEILDIQLGISSQNDQLLNGMAVENGHPVQQHQKEPPKQKKQSLGRSKKQFCR

SEQ ID NO: 8130 - protein, 601 aa, Homo sapiens
MEETMKLATMEDTVEYCLFLIPDESRDSDKHKEILQKYIERIITRFAPMLVPYIWQNQPFNLKYKPGKGGVPAHMFGVTKFGDNIEDEWFIVYVIKQITKEFPELVARIEDNDGEFLLIEAADFLPKWLDPENSTNRVFFCHGELCIIPAPRKSGAESWLPTTPPTIPQALNIITAHSEKILASESIRAAVNRRIRGYPEKIQASLHRAHCFLPAGIVAVLKQRPRLVAAAVQAFYLRDPIDLRACRVFKTFLPETRIMTSAHGFEILCSKCSPHFSDCKKSLVTASPLWASFLESLKKNDYFKGLIEGSAQYRERLEMAENYFQLSVDWPESSLAMSPGEEILTLLQTIPFDIEDLKKEAANLPPEDDDQWLDLSPDQLDQLLQEAVGKKESESVSKEEKEQNYDLTEVSESMKAFISKVSTHKGAELPREPSEAPITFDADSFLNYFDKILGPRPNESDSDDLDDEDFECLDSDDDLDFETHEPGEEASLKGTLDNLKSYMAQMDQELAHTCISKSFTTRNQVEPVSQTTDNNSDEEDSGTGESVMAPVDVDLNLVSNILESYSSQAGLAGPASNLLQSMGVQLPDNTDHRPTSKPTKN

SEQ ID NO: 8131 - protein, 134 aa, Homo sapiens
MKKKHDGIVYETKEVLNPSPKVTHCCKSLWLKYSFQKAYMTQLVSSQPVPAMSRNPDHNLLSQPKEHSIVQKHHQEEIIHKLAMQLRHIGDNIDHRMVREDLQQDGRDALDHFVFFFFRRVQVLLHFFWNNHLL

SEQ ID NO: 8132 - protein, 596 aa, Homo sapiens
MEDAPQRLRWQAHLEFTHNHDVGDLTWDKIAVSLPRSEKLRSLVLAGIPHGMRPQLWMRLSGALQKKRNSELSYREIVKNSSNDETIAAKQIEKDLLRTMPSNACFASMGSIGVPRLRRVLRALAWLYPEIGYCQGTGMVAACLLLFLEEEDAFWMMSAIIEDLLPASYFSTTLLGVQTDQRVLRHLIVQYLPRLDKLLQEHDIELSLITLHWFLTAFASVVDIKLLLRIWDLFFYEGSRVLFQLTLGMLHLKEEELIQSENSASIFNTLSDIPSQMEDAELLLGVAMRLAGSLTDVAVETQRRKHLAYLIADQGQLLGAGTLTNLSQVVRRRTQRRKSTITALLFGEDDLEALKAKNIKQTELVADLREAILRVARHFQCTDPKNCSVELTPDYSMESHQRDHENYVACSRSHRRRAKALLDFERHDDDELGFRKNDIITIVSQKDEHCWVGELNGLRGWFPAKFVEVLDERSKEYSIAGDDSVTEGVTDLVRGTLCPALKALFEHGLKKPSLLGGACHPWLFIEEAAGREVERDFASVYSRLVLCKTFRLDEDGKVLTPEELLYRAVQSVNVTHDAVHAQMDVKLRSLICVGLK

SEQ ID NO: 8133 - protein, 132 aa, Homo sapiens
MESRVADAGTGETARAAGGSPAVGCTTRGPVVSAPLGAARWKLLRQVLKQKHLDDCLRHVSVRRFESFNLFSVTEGKERETEEEVGAWVQYTSIFCPEYSISLRHNSGSLNVEDVLTSFDNTGNVWSFSRGK

SEQ ID NO: 8134 - protein, 539 aa, Homo sapiens; identical to SEQ ID NO: 5502

SEQ ID NO: 8135 - protein, 729 aa, Homo sapiens
MNNSSSETRGHPHSASSPSERVFPMPLPRKAPLNIPGTPVLEDFPQNDDEKERLQRRRSRVFDLQFSTDSPRLLASPSSRSIDISATIPKFTNTQITEHYSTCIKLSTENKITTKNAFGLHLIDFMSEILKQKDTEPTNFKVAAGTLDASTKIYAVRVDAVHADVYRVLGGLGKDAPSLEEVEGHVADGSATEMGTTKKAVKPKKKHLHRTIEQNINNLNVSEADRKCEIDPMFQKTAASFDECSTAGVFLSTLHCQDYRSELLFPSDVQTLSTGEPLELPELGCVEMTDLKAPLQQCAEDRQICPSLAGFQFTQWDSETHNESVSALVDKFKKNDQVFDINAEVDESDCGDFPDGSLGDDFDANDEPDHTAVGDHEEFRSWKEPCQVQSCQEEMISLGDGDIRTMCPLLSMKPGEYSYFSAAMSMWAGPDHWRFRPRRKQDAPSQSENKKKSTKKDFEIDFEDDIDFDVYFRKTKAATILTKSTLENQNWRATTLPTDFNYNVDTLVQLHLKPGTRLLKMAQGHRVETEHYEEIEDYDYNNPNDTSNFCPGLQAADSDDEDLDDLFVGPVGNSDLSPYPCHPPKTAQQNGDTPEAQGLDITTYGESNLVAEPQKVNKIEIHYAKTAKKMDMKKLKQSMWSLLTALSGKEADAEANHREAGKEAALAEVADEKMLSGLTKDLQRSLPPVMAQNLSIPLAFACLLHLANEKNLKLEGTEDLSDVLVRQGD

SEQ ID NO: 8136 - protein, 299 aa, Homo sapiens
METQFPVSEGKVDPYRSCGFSYEQDPTLRDPEAVARRWPWMVSVRANGTHICAGTIIASQWVLTVAHCLIWRDVIYSVRVGSPWIDQMTQTASDVPVLQVIMHSRYRAQRFWSWVGQANDIGLLKLKQELKYSNYVRPICLPGTDYVLKDHSRCTVTGWGLSKADGMWPQFRTIQEKEVIILNNKECDNFYHNFTKIPTLVQIIKSQMMCAEDTHREKFCYELTGEPLVCSMEGTWYLVGLVSWGAGCQKSEAPPIYLQVSSYQHWIWDCLNGQALALPAPSRTLLLALPLPLSLLAAL

SEQ ID NO: 8137 - protein, 362 aa, Homo sapiens
MLVPGSTRPYSKKRQNSKSAQGLAGLRNLGNTCFMNSILQCLSNTRELRDYCLQRLYMRDLHHGSNAHTALVEEFAKLIQTIWTSSPNDVVSPSEFKTQIQRYAPRFVGYNQQDAQEFLRFLLDGLHNEVNRVTLRPKSNPENLDHLPDDEKGRQMWRKYLEREDSRIGDLFVGQLKSSLTCTDCGYCSTVFDPFWDLSLPIAKRGYPEVTLMDCMRLFTKEDVLDGDEKPTCCRCRGRKRCIKKFSIQRFPKILVLHLKRFSESRIRTSKLTTFVNFPLRDLDLREFASENTNHAVYNLYAVSNHSGTTMGGHYTAYCRSPGTGEWHTFNDSSVTPMSSSQVRTSDAYLLFYELASPPSRM

SEQ ID NO: 8138 - protein, 599 aa, Homo sapiens
MDPGDAAILESSLRILYRLFESVLPPLPAALQSRMNVIDHVRDMAAAGLHSNVRLLSSLLLTMSNNNPELFSPPQKYQLLVYHADSLFHDKEYRNAVSKYTMALQQKKALSKTSKVRPSTGNSASTPQSQCLPSEIEVKYKMAECYTMLKQDKDAIAILDGIPSRQRTPKINMMLANLYKKAGQERPSVTSYKEVLRQCPLALDAILGLLSLSVKGAEVASMTMNVIQTVPNLDWLSVWIKAYAFVHTGDNSRAISTICSLEKKSLLRDNVDLLGSLADLYFRAGDNKNSVLKFEQAQMLDPYLIKGMDVYGYLLAREGRLEDVENLGCRLFNISDQHAEPWVVSGCHSFYSKRYSRALYLGAKAIQLNSNSVQALLLKGAALRNMGRVQEAIIHFREAIRLAPCRLDCYEGLIECYLASNSIREAMVMANNVYKTLGANAQTLTLLATVCLEDPVTQEKAKTLLDKALTQRPDYIKAVVKKAELLSREQKYEDGIALLRNALANQSDCVLHRILGDFLVAVNEYQEAMDQYSIALSLDPNDQKSLEGMQKMEKEESPTDATQEEDVDDMEGSGEEGDLEGSDSEAAQWADQEQWFGMQ

SEQ ID NO: 8139 - protein, 168 aa, Homo sapiens
MPATRKPMRYGHTEGHTEVCFDDSGSFIVTCGSDGDVRIWEDLDDDDPKFINVGEKAYSCALKSGKLVTAVSNNTIQVHTFPEGVPDGILTRFTTNANHVVFNGDGTKIAAGSSDFLVKIVDVMDSSQQKTFRGHDAPVLSLSFDPKDIFLASASCDGSVRVWQISDQ

SEQ ID NO: 8140 - protein, 46 aa, Homo sapiens
MVNSCCGSVCSDQGCGLENCCRPSCCQTTCCRTTCCRPLCCASSCC

SEQ ID NO: 8141 - protein, 222 aa, Homo sapiens
MASVVEYKGLRAGYHCGYCDSKEGKASCGMWAHSMTVQDYQDLIDRGWRRSGKYVYKPVMNQTCCPQYTIRCRPLQFQPSKSHKKVLKKMLKFLAKGEVPKGSCEDEPMDSTMDDAVAGDFALINKLDIQCDLKTLSDDIKESLESEGKNSKKEEPQELLQSQDFVGEKLGSGEPSHSVKVHTVPKPGKGADLSKPPCRKAKEIRKERKRLKLMQQNPAGEL

SEQ ID NO: 8142 - protein, 164 aa, Homo sapiens
MLKAVILIGGPQKGTRFRPLSFEVPKPLFPVAGVPMIQHHIEACAQVPGMQEILLIGFYQPDEPLTQFLEAAQQEFNLPVRYLQEFAPLGTGGGLYHFRDQILAGSPEAFFVLNADVCSDFPLSAMLEAHRRQRHPFLLLGTTANRTQSLNYGCIVENPQTHEV

SEQ ID NO: 8143 - protein, 112 aa, Homo sapiens
MFVSDFRKEFYEVVQSQRVLLFVASDVDALCACKILQALFQCDHVQYTLVPVSGWQELETAFLEHKEQFHYFILINCGANVDLLDILQPDEDTIFFVCDTHRPVNVVNVYND

SEQ ID NO: 8144 - protein, 313 aa, Homo sapiens
TLVVSGRDDPPTHSQPDSDDEAEEIQWSDDENTATLTAPEFPEFATKVQEAINSLGGSVFPKLNWSAPRDAYWIAMNSSLKCKTLSDIFLLFKSSDFITRDFTQPFIHCTDDSPDPCIEYELVLRKWCELIPGAEFRCFVKENKLIGISQRDYTQYYDHISKQKEEIRRCIQDFFKKHIQYKFLDEDFVFDIYRDSRDSPAFRCTNSEVTVQPSPYLSYRLPKDFVDLSTGEDAHKLIDKSAGGRLMSVLELEKRRPRPTAPGAAHQPQLPADPDAGGPSSVDISHFLYSCTFTWGKKRRDFATCKNNIINRS

SEQ ID NO: 8145 - protein, 338 aa, Homo sapiens; identical to SEQ ID NO: 4756

SEQ ID NO: 8146 - protein, 372 aa, Homo sapiens; identical to SEQ ID NO: 6355

SEQ ID NO: 8147 - protein, 135 aa, Homo sapiens
  VARIANT 1: note = X can be any amino acid
XQLASMVWNNPSQQQFMQFGGSSGSQLPQIQTDVVLPSCKKKAPAETPVKERLFIVFNPHPLPLDVLEDIFCRFGNLIEVYLVSGKNVGYAKYADRISANDAIATLHGKILNGVRLKVMLADSPREESNKRQRTY

SEQ ID NO: 8148 - protein, 587 aa, Homo sapiens; identical to SEQ ID NO: 5895

SEQ ID NO: 8149 - protein, 613 aa, Homo sapiens; identical to SEQ ID NO: 5032

SEQ ID NO: 8150 - protein, 158 aa, Homo sapiens
MTHCCSPCCQPTCCRTTCCRTTCWKPTTVTTCSSTPCCQPACCVSSCCQPCCRPTCCQNTCCRTTCCQPTCPTCCGSSCCGQTSCGSSCGQSSSCAPVYCRRTCYYPTTVCLPGCLNQSCGSNCCQPCCRPACCETTCCRTTCFQPTCVSSCCQPSCC

SEQ ID NO: 8151 - protein, 539 aa, Homo sapiens; identical to SEQ ID NO: 5502

SEQ ID NO: 8152 - protein, 836 aa, Homo sapiens
MAAALGPPEVIAQLENAAKVLMQTLACSILTALLSEFSSSSKTSNIGLSMEFHGNCKRVFQEEDLRQIFMLTVEVLQEFSRRENLNAQMSSVFQRYLALANQVLSWNFLPPKLGRHYIAMFESSQNVLLKPTESWRETLLDSRVMELFFTVHRKIREDSDMAQDSLQCLAQLASLHGPIFPDEGSQVDYLAHFIEGLLNTINGIEIEDSEAVGISSIISNLITVFPRNVLTAIPSELFSSFVNCLTHLTCSFGRSAALEEVLDKDDMVYMEAYDKLLESWLTLVQDDKHFHKGFFTQHAVQVFNSYIQCHLAAPDGTRNLTANGVASREEEEISELQEDDRDQFSDQLASVGMLGRIAAEHCIPLLTSLLEERVTRLHGQLQRHQQQLLASPGSSTVDNKMLDDLYEDIHWLILVTGYLLADDTQGETPLIPPEIMEYSIKHSSEVDINTTLQILGSPGEKASSIPGYNRTDSVIRLLSAILRVSEVESRAIRADLTHLLSPQMGKDIVWFLKRWAKTYLLVDEKLYDQISLPFSTAFGADTEGSQWIIGYLLQKVISNLSVWSSEQDLANDTVQLLVTLVERRERANLVIQCENWWNLAKQFASRSPPLNFLSSPVQRTLMKALVLGGFAHMDTETKQQYWTEVLQPLQQRFLRVINQENFQQMCQQEEVKQEITATLEALCGIAEATQIDNVAILFNFLMDFLTNCIGLMEVYKNTPETVNLIIEVFVEVAHKQICYLGESKAMNLYEACLTLLQVYSKNNLGRQRIDVTAEEEQYQDLLLIMELLTNLLSKEFIDFSDTDEVFRGHEPGQAANRSVSAADVVLYGVNLILPLM

SEQ ID NO: 8153 - protein, 335 aa, Homo sapiens
MDFLLGNPFSSPVGQRIEKATDGSLQSEDWALNMEICDIINETEEGPKDALRAVKKRIVGNKNFHEVLETCVKNCGHRFHVLVASQDFVESVLVRTILPKNNPPTIVHDKVLNLIQSWADAFRSSPDLTGVVTIYEDLRRKGLEFPMTDLDMLSPIHTPQRTVFNSETQSGQDSVGTDSSQQEDSGQHAAPLPAPPILSGDTPIAPTPEQIGKLRSELEMVSGNVRVMSEMLTELVPTQAEPADLELLQELNRTCRAMQQRVLELIPQIANEQLTEELLIVNDNLNNVFLRHERFERFRTGQTTKAPSEAEPAADLIDMGPDPAATGNLSSQLAG

SEQ ID NO: 8154 - protein, 1729 aa, Homo sapiens
MGNSDSQYTLQGSKNHSNTITGAKQIPCSLKIRGIHAKEEKSLHGWGHGSNGAGYKSRSLARSCLSHFKSNQPYASRLGGPTCKVSRGVAYSTHRTNAPGKDFQGISAAFSTENGFHSVGHELADNHITSRDCNGHLLNCYGRNESIASTPPGEDRKSPRVLIKTLGKLDGCLRVEFHNGGNPSKVPAEDCSEPVQLLRYSPTLASETSPVPEARRGSSADSLPSHRPSPTDSRLRSSKGSSLSSESSWYDSPWGNAGELSEAEGSFLAPGMPDPSLHASFPPGDAKKPFNQSSSLSSLRELYKDANLGSLSPSGIRLSDEYMGTHASLSNRVSFASDIDVPSRVAHGDPIQYSSFTLPCRKPKAFVEDTAKKDSLKARMRRISDWTGSLSRKKRKLQEPRSKEGSDYFDSRSDGLNTDVQGSSQASAFLWSGGSTQILSQRSESTHAIGSDPLRQNIYENFMRELEMSRTNTENIETSTETAESSSESLSSLEQLDLLFEKEQGVVRKAGWLFFKPLVTVQKERKLELVARRKWKQYWVTLKGCTLLFYETYGKNSMDQSSAPRCALFAEDSIVQSVPEHPKKENVFCLSNSFGDVYLFQATSQTDLENWVTAVHSACASLFAKKHGKEDTLRLLKNQTKNLLQKIDMDSKMKKMAELQLSVVSDPKNRKAIENQIQQWEQNLEKFHMDLFRMRCYLASLQGGELPNPKSLLAAASRPSKLALGRLGILSVSSFHALVCSRDDSALRKRTLSLTQRGRNKKGIFSSLKGLDTLARKGKEKRPSITQVDELLHIYGSTVDGVPRDNAWEIQTYVHFQDNHGVTVGIKPEHRVEDILTLACKMRQLEPSHYGLQLRKLVDDNVEYCIPAPYEYMQQQVYDEIEVFPLNVYDVQLTKTGSVCDFGFAVTAQVDERQHLSRIFISDVLPDGLAYGEGLRKGNEIMTLNGEAVSDLDLKQMEALFSEKSVGLTLIARPPDTKATLCTSWSDSDLFSRDQKSLLPPPNQSQLLEEFLDNFKKNTANDFSNVPDITTGLKRSQTDGTLDQVSHREKMEQTFRSAEQITALCRSFNDSQANGMEGPRENQDPPPRSLARHLSDADRLRKVIQELVDTEKSYVKDLSCLFELYLEPLQNETFLTQDEMESLFGSLPEMLEFQKVFLETLEDGISASSDFNTLETPSQFRKLLFSLGGSFLYYADHFKLYSGFCANHIKVQKVLERAKTDKAFKAFLDARNPTKQHSSTLESYLIKPVQRVLKYPLLLKELVSLTDQESEEHYHLTEALKAMEKVASHINEMQKIYEDYGTVFDQLVAEQSGTEKEQPEWSSEVMDVLDPRGKLTKGTLEEAALVTELSMGELLMHSTVSWLNPFLSLGKARKDLELTVFVFKRAVILVYKENCKLKKKLPSNSRPAHNSTDLDPFKFRWLIPISALQVRLGNPAGTENNSIWELIHTKSEIEGRPETIFQLCCSDSESKTNIVKVIRSILRENFRRHIKCELPLEKTCKDRLVPLKNRVPVSAKLASSRSLKVLKNSSSNEWTGETGKGTLLDSDEGSLSSGTQSSGCPTAEGRQDSKSTSPGKYPHPGLADFADNLIKESDILSDEDDDHRQTVKQGSPTKDIEIQFQRLRISEDPDVHPEAEQQPGPESGEGQKGGEQPKLVRGHFCPIKRKANSTKRDRGTLLKAQIRHQSLDSQSENATIDLNSVLEREFSVQSLTSVVSEECFYETESHGKS

SEQ ID NO: 8155 - protein, 115 aa, Homo sapiens
MAPAKKGGEKKKGRSAINEVVTREYTINIHKRIHGVGFKKRAPRALKEIRKFAMKEMGTPDVRIDTRLNKAVWAKGIRNVPYRIRVRLSRKRNEDEDSPNKLYTLVTYVPVTTFK

SEQ ID NO: 8156 - protein, 248 aa, Homo sapiens
MALEVGDMEDGQLSDSDSDMTVAPSDRPLQLPKVLGGDSAMRAFQNTATACAPVSHYRAVESVDSSEESFSDSDDDSCLWKRKRQKCFNPPPKPEPFQFGQSSQKPPVAGGKKINNIWGAVLQKLRKESQEHTKDLDKELDEYMHGGKKMGSKEEENGQGHLKRKRPVKDRLGNRPEMNYKGRYEITAEDSQEKVADEISFRLQEPKKDLIARVVRNKLRTFSTLKTKRNMKIKKLLGRGEHKCWGKR

SEQ ID NO: 8157 - protein, 25 aa, Homo sapiens
MAMAPSPSLVQVYTSPAAVAVWEWQ

SEQ ID NO: 8158 - protein, 56 aa, Homo sapiens
MSYYQRPFSPSAYSLPASLNSSIVMQHGTSLDSTDTYPQHAQSLDGTTSSSIPLYR

SEQ ID NO: 8159 - protein, 149 aa, Homo sapiens
VRELEAELDAEQKKHAEALKGVRKHERRVKELAYQAEEDRKNLARMQDLVDKLQSKVKSYKRQFEEAEQQANTNLAKYRKAQHELDDAEERADMAETQANKLRARTRDALGPKVRSGRGIALCAGGLWGLTGSTAHSAIPFSSAQGVTA

SEQ ID NO: 8160 - protein, 155 aa, Homo sapiens
SNVMEANAARQATPAEWSQDDSNDMWEDQEEEEEEEEDGLAGQLLSDILATSKYEEDYYEDDEEDDPDALKDPLYQIDLQATLMTMRGEFYRPSASKKGSLSTFAPSGPAANHFAALTGLEMHFLLNLKWHLDPWPLASAVTLMTIQTRLTGAVT

SEQ ID NO: 8161 - protein, 539 aa, Homo sapiens; identical to SEQ ID NO: 5502

SEQ ID NO: 8162 - protein, 214 aa, Homo sapiens
MPSPWGWFAVTACGAQRNNFEEPVALQEMDTSNGVLLPFYDPDSSIVYLCGKGDSSIRYFEITDEPPFVHYLNTFSSKEPQRGMGFMPKRGLDVSKCEIARFYKLHERKCEPIIMTVPRKSDLFQDAEPVLISLRDGYVPPKHRELRVTKRNILDVRPPSGPRRSQSASDAPLSQHTLETLLEEIKALRERVQAQEQRITALENMLCELVDGTD

SEQ ID NO: 8163 - protein, 229 aa, Homo sapiens
MLQLRDSVDSAGTSPTAVLAAGEEPGSIEQAVEEIRVVVRPVEDGEIQGVWLLTEVDHWNNEKERLVLVTEQSLLICKYDFISLQCQQVVRIALNAVDTISYGEFQFPPKSLNKREGFGIRIQWDKQSRPSFINRWNPWSTNVPYATFTEHPMAGADEKTASLCQLESFKALLIQAVKKAQKESPLPGQANGVLILERPLLIETYVGLMSFINNEAKLGYSMTRGKIGF

SEQ ID NO: 8164 - protein, 129 aa, Homo sapiens
MCEVSRGWKPCTEGILKVRPTRKISYEGNITPTVELNALCMKLGKKPMYKPVDPYSRMQSTYNYNMRGGAYPPRYFYPFPVPPLLYQVELSVGGQQFNGKGKTRQAAKHDAAAKALRILQNEPLPERLE

SEQ ID NO: 8165 - protein, 1013 aa, Homo sapiens
MDLFRMRCYLASLQGGELPNPKSLLAAASRPSKLALGRLGILSVSSFHALVCSRDDSALRKRTLSLTQRGRNKKGIFSSLKGLDTLARKGKEKRPSITQVDELLHIYGSTVDGVPRDNAWEIQTYVHFQDNHGVTVGIKPEHRVEDILTLACKMRQLEPSHYGLQLRKLVDDNVEYCIPAPYEYMQQQVYDEIEVFPLNVYDVQLTKTGSVCDFGFAVTAQVDERQHLSRIFISDVLPDGLAYGEGLRKGNEIMTLNGEAVSDLDLKQMEALFSEKSVGLTLIARPPDTKATLCTSWSDSDLFSRDQKSLLPPPNQSQLLEEFLDNFKKNTANDFSNVPDITTGLKRSQTDGTLDQVSHREKMEQTFRSAEQITALCRSFNDSQANGMEGPRENQDPPPRSLARHLSDADRLRKVIQELVDTEKSYVKDLSCLFELYLEPLQNETFLTQDEMESLFGSLPEMLEFQKVFLETLEDGISASSDFNTLETPSQFRKLLFSLGGSFLYYADHFKLYSGFCANHIKVQKVLERAKTDKAFKAFLDARNPTKQHSSTLESYLIKPVQRVLKYPLLLKELVSLTDQESEEHYHLTEALKAMEKVASHINEMQKIYEDYGTVFDQLVAEQSGTEKEVTELSMGELLMHSTVSWLNPFLSLGKARKDLELTVFVFKRAVILVYKENCKLKKKLPSNSRPAHNSTDLDPFKFRWLIPISALQVRLGNPAGTENNSIWELIHTKSEIEGRPETIFQLCCSDSESKTNIVKVIRSILRENFRRHIKCELPLEKTCKDRLVPLKNRVPVSAKLASSRSLKVLKNSSSNEWTGETGKGTLLDSDEGSLSSGTQSSGCPTAEGRQDSKSTSPGKYPHPGLADFADNLIKESDILSDEDDDHRQTVKQGSPTKDIEIQFQRLRISEDPDVHPEAEQQPGPESGEGQKGGEQPKLVRGHFCPIKRKANSTKRDRGTLLKAQIRHQSLDSQSENATIDLNSVLEREFSVQSLTSVVSEECFYETESHGKS

SEQ ID NO: 8166 - protein, 382 aa, Homo sapiens
MAANLSRNGPALQEAYVRVVTEKSPTDWALFTYEGNSNDIRVAGTGEGGLEEMVEELNSGKVMYAFCRVKDPNSGLPKFVLINWTGEGVNDVRKGACASHVSTMASFLKGSVYQKTNAVSEIKRVGKDSFWAKAEKEEENRRLEEKRRAEEAQRQLEQERRERELREAARREQRYQEQGGEASPQSRTWEQQQEVVSRNRNEQESAVHPREIFKQKERAMSTTSISSPQPGKLRSPFLQKQLTQPETHFGREPAAAISRPRADLPAEEPAPSTPPCLVQAEEEAVYEEPPEQETFYEQPPLVQQQGAGSEHIDHHIQGQGLSGQGLCARALYDYQAADDTEISFDPENLITGIEVIDEGWWRGYGPDGHFGMFPANYVELIE

SEQ ID NO: 8167 - protein, 219 aa, Homo sapiens
MVVLSVPAEVTVILLDIEGTTTPIAFVKDILFPYIEENVKEYLQTHWEEEECQQDVSLLRKQAEEDAHLDGAVPIPAASGNGVDDLQQMIQAVVDNVCWQMSLDRKTTALKQLQGHMWRAAFTAGRMKAEFFADVVPAVRKWREAGMKVYIYSSGSVEAQKLLFGHSTEGDILELVDGHFDTKIGHKVESESYKDCRQHWVLNQQHFVSDRCYSRGQCC

SEQ ID NO: 8168 - protein, 481 aa, Homo sapiens; identical to SEQ ID NO: 7546

SEQ ID NO: 8169 - protein, 547 aa, Homo sapiens; identical to SEQ ID NO: 6039

SEQ ID NO: 8170 - protein, 628 aa, Homo sapiens; identical to SEQ ID NO: 7958

SEQ ID NO: 8171 - protein, 157 aa, Homo sapiens
MRSGFRCDEPAEAVAPERQTVSGAVALASFTSPHTHPVDDGGRHYSWGSPKRILGLGPGDAAKEAGLVRPLQGQSEKILLRTRNRQPMEPPMEPSGGEQEPGAVRFLDLPWEDVLLPHVLNRVPLRQLLRLQRVSRAFRSLVQLHLAGLRRFDAAQV

SEQ ID NO: 8172 - protein, 160 aa, Homo sapiens; identical to SEQ ID NO: 6461

SEQ ID NO: 8173 - protein, 133 aa, Homo sapiens
MAALRPLVKPKIVKKRTKKFIRHQSDRYVKIKRNWRKPRGIDNRVRRRFKGQILMPNIGYGSNKKTKHMLPSGFRKFLVHNVKELEVLLMCNKSYCAEIAHNVSSKNRKAIVERAAQLAIRVTNPNARLRSEE

SEQ ID NO: 8174 - protein, 212 aa, Homo sapiens
MDLFGDLPEPERSPRPAAGKEAQKGPLLFDDLPPASSTDSGSGGPLLFDDLPPASSGDSGSLATSISQMVKTEGKGAKRKTSEEEKNGSEELVEKKVSSSVIFGLKGYVAERKGEREEMQDAHVILNDITEECRPPSSLITRVSYFAVFDGHGGIRASKFAAQNLHQNLIRKFPKGDVISVEKTVKRCLLDTFKHTDEEFLKQASSQKPAWK

SEQ ID NO: 8175 - protein, 376 aa, Homo sapiens; identical to SEQ ID NO: 5815

SEQ ID NO: 8176 - protein, 494 aa, Homo sapiens
MAAAAECDVVMAATEPELLDDQEAKREAETFKEQGNAYYAKKDYNEAYNYYTKAIDMCPKNASYYGNRAATLMMLGRFREALGDAQQSVRLDDSFVRGHLREGKCHLSLGNAMAACRSFQRALELDHKNAQAQQEFKNANAVMEYEKIAETDFEKRDFRKVVFCMDRALEFAPACHRFKILKAECLAMLGRYPEAQSVASDILRMDSTNADALYVRGLCLYYEDCIEKAVQFFVQALRMAPDHEKACIACRNAKALKAKKEDGNKAFKEGNYKLAYELYTEALGIDPNNIKTNAKLYCNRGTVNSKLRKLDDAIEDCTNAVKLDDTYIKAYLRRAQCYMDTEQYEEAVRDYEKVYQTEKTKEHKQLLKNAQLELKKSKRKDYYKILGVDKNASEDEIKKAYRKRALMHHPDRHSGASAEVQKEEEKKFKEVGEAFTILSDPKKKTRYDSGQDLDEEGMNMGDFDPNNIFKAFFGGPGGFSFEASGPGNFFFQFG

SEQ ID NO: 8177 - protein, 442 aa, Homo sapiens
NEVYNLTQEFFRHDKPVNAESQNSVGVFTREEVRNRIRNDPDDPEATKRLKLAMIQQYLKVESCESSSHSMDEVSLSAFGEWTEIPGAHHIIPSGFMRVVELLAEGIPAHVIQLGKPVRCIHWDQASARPRGPEIEPRGEGDHNHDTGEGGQGGEEPRGGRWDEDEQWSVVVECEDCELIPADHVIVTVSLGVLKRQYTSFFRPGLPTEKVAAIHRLGIGTTDKIFLEFEEPFWGPECNSLQFVWEDEAESHTLTYPPELWYRKICGFDVLYPPERYGHVLSGWICGEEALVMEKCDDEAVAEICTEMLRQFTGNPNIPKPRRILRSAWGSNPYFRGSYSYTQVGSSGADVEKLAKPLPYTESSKTAHGSSTKQQPGHLFSSKCPEQPLDANRGAVKPMQVLFSGEATHRKYYSTTHGALLSGQREAARLIEMYRDLFQQGT

SEQ ID NO: 8178 - protein, 59 aa, Homo sapiens
MSYYQRPFSPSAYSLPASLNSSIVMQHGTSLDSTDTYPQHAQSLDGTTSSSIPLYRSSE

SEQ ID NO: 8179 - protein, 278 aa, Homo sapiens
MKCEHCTRKECSKKTKTDDQENVSADAPSPAQENGEKGEFHKLADAKIFLSDCLACDSCMTAEEGVQLSQQNAKDFFRVLNLNKKCDTSKHKVLVVSVCPQSLPYFAAKFNLSVTDASRRLCGFLKSLGWVRYAERVLGRPITAHLCTAKSPQQVMGSLVKDYFARQQNLSPEKIFHVIVAPCYDKKLEALQESLPPALHGSRGADCVLTSGTGSLWECTPVITATQEAAARESLEPGRQRLQRDKIAPLDSSLGGGGEIAQIMEQGDLSVRDAAVDT

SEQ ID NO: 8180 - protein, 156 aa, Homo sapiens
  VARIANT 1: note = X can be any amino acid
XGKAQRKISAIHILDVLVLNGTDVREQHFNQRIQLAEKFVKAVSKPSRPDMNPIRVKEVYRLEEMEKIFVRLEMKIIKGSSGTPKLSYTGRDDRHFVPMGLYIVRTVNEPWTMGFSKSFKKKFFYNKKTKDSTFDLPADSIAPFHLPSLACLSKMD

SEQ ID NO: 8181 - protein, 399 aa, Homo sapiens; identical to SEQ ID NO: 7529

SEQ ID NO: 8182 - protein, 272 aa, Homo sapiens
MASLLQDQLTTDQDLLLMQEGMPMRKVRSKSWKKLRYFRLQNDGMTVWHARQARGSAKPSFSISDVETIRNGHDSELLRSLAEELPLEQGFTIVFHGRRSNLDLMANSVEEAQIWMRGLQLLVDLVTSMDHQERLDRWLSDWFQRGDKNQDGKMSFQEVQRLLHLMNVEMDQEYAFSLFQAADTSQSGTLEGEEFVQFYKALTKRAEVQELFESFSADGQKLTLLEFLDFLQEEQKERDCTSELALELIDRYEPSDSGASEEDPGEGEEVNT

SEQ ID NO: 8183 - protein, 119 aa, Homo sapiens; identical to SEQ ID NO: 7107

SEQ ID NO: 8184 - protein, 626 aa, Homo sapiens; identical to SEQ ID NO: 6327

SEQ ID NO: 8185 - protein, 62 aa, Homo sapiens
MAMAPSPSLVQVYTSPAAVAVWEWQDGLGTWHPYSATVCSFIEQQFVQQKGQRFGLGSLAHS

SEQ ID NO: 8186 - protein, 75 aa, Homo sapiens
MRLSLPLLLLLLGAWAIPGGLGDRAPLTATAPQLDDEEMYSAHMPAHLRCDACRAVAYQRLCSYPPHLPLTEQQS

SEQ ID NO: 8187 - protein, 872 aa, Homo sapiens
MGDSDDEYDRRRRDKFRRERSDYDRSRERDERRRGDDWNDREWDRGRERRSRGEYRDYDRNRRERFSPPRHELSPPQKRMRRDWDEHSSDPYHSGYEMPYAGGGGGPTYGPPQPWGHPDVHIMQHHVLPIQARLGSIAEIDLGVPPPVMKTFKEFLLSLDDSVDETEAVKRYNDYKLDFRRQQMQDFFLAHKDEEWFRSKYHPDEVGKRRQEARGALQNRLRVFLSLMETGWFDNLLLDIDKADAIVKMLDAAVIKMEGGTENDLRILEQEEEEEQAGKPGEPSKKEEGRAGAGLGDGERKTNDKDEKKEDGKQAENDSSNDDKTKKSEGDGDKEEKKEDSEKEAKKSSKKRNRKHSGDDSFDEGSVSESESESESGQAEEEKEEAEEALKEKEKPKEEEWEKPKDAAGLECKPRPLHKTCSLFMRNIAPNISRAEIISLCKRYPGFMRVALSEPQPERRFFRRGWVTFDRSVNIKEICWNLQNIRLRECELSPGVNRDLTRRVRNINGITQHKQIVRNDIKLAAKLIHTLDDRTQLWASEPGTPPLPTSLPSQNPILKNITDYLIEEVSAEEEELLGSSGGAPPEEPPKEGNPAEINVERDEKLIKVLDKLLLYLRIVHSLDYYNTCEYPNEDEMPNRCGIIHVRGPMPPNRISHGEVLEWQKTFEEKLTPLLSVRESLSEEEAQKMGRKDPEQEVEKFVTSNTQELGKDKWLCPLSGKKFKGPEFVRKHIFNKHAEKIEEVKKEVAFFNNFLTDAKRPALPEIKPAQPPGPAQSLTPGLPYPHQTPQGLMPYGQPRPPILGYGAGAVRPAVPTGGPPYPHAPYGAGRGNYDAFRGQGGYPGKPRNRMVRGDPRAIVEYRDLDAPDDVDFF

SEQ ID NO: 8188 - protein, 160 aa, Homo sapiens
  VARIANT 1: note = X can be any amino acid
XPEDVQALVSGKLALRYAGRQTEALKCVAQASKNRSLADFEKALTDYRAELRDDPIISTHLAKLYDNLLEQNLIRVIEPFSRVQIEHISSLIKLSKADVERKLSQMILDKKFHGILDQGEGVLIIFDEPPVDKTYEAALETIQNMSKVVDSLYNKAKKLT

SEQ ID NO: 8189 - protein, 1302 aa, Homo sapiens
MWRRKHAASGGTRGVLSGNRGVEYGSGRGHLGTFEGRWRKLPKMPEAVGTDPSTSRKMAELEEVTLDGKPLQALRVTDLKAALEQRGLAKSGQKSALVKRLKGALMLENLQKHSTPHAAFQPNSQIGEEMSQNSFIKQYLEKQQELLRQRLEREAREAAELEGKSSSISEEKGDSDDEKPRKGERRSSRVRQARAAKLSEGSQPAEEEEDQETPSRNLRVRADRNLKTEEEEEEEEEEEEDDEEEEGDDEGQKSREAPILKEFKEEGEEIPRVKPEEMMDERPKTRSQEQEVLERGGRFTRSQEEARKSHLARQQQEKEMKTTSPLEEEEREIKSSQGLKEKSKSPSPPRLTEDRKKASLVALPEQTASEEETPPPLLTKEASSPPPHPQLHSEEEIEPMEGPAPAVLIQLSPPNTDADTRELLVSQHTVQLVGGLSPLSSPSDTKAESPAEKVPEESVLPLVQKSTLADYSAQKDLEPESDRSAQPLPLKIEELALAKGITEECLKQPSLEQKEGRRASHTLLPSHRLKQSADSSSSRSSSSSSSSSRSRSRSPDSSGSRSHSPLRSKQRDVAQARTHANPRGRPKMGSRSTSESRSRSRSRSRSASSNSRKSLSPGVSRDSSTSYTETKDPSSGQEVATPPVPQLQVCEPKERTSTSSSSVQARRLSQPESAEKHVTQRLQPERGSPKKCEAEEAEPPAATQPQTSETQTSHLPESERIHHTVEEKEEVTMDTSENRPENDVPEPPMPIADQVSNDDRPEGSVEDEEKKESSLPKSFKRKISVVSATKGVPAGNSDTEGGQPGRKRRWGASTATTQKKPSISITTESLKSLIPDIKPLAGQEAVVDLHADDSRISEDETERNGDDGTHDKGLKICRTVTQVVPAEGQENGQREEEEEEKEPEAEPPVPPQVSVEVALPPPAEHEVKKVTLGDTLTRRSISQQKSGVSITIDDPVRTAQVPSPPRGKISNIVHISNLVRPFTLGQLKELLGRTGTLVEEAFWIDKIKSHCFVTYSTVEEAVATRTALHGVKWPQSNPKFLCADYAEQDELDYHRGLLVDRPSETKTEEQGIPRPLHPPPPPPVQPPQHPRAEQREQERAVREQWAEREREMERRERTRSEREWDRDKVREGPRSRSRSRDRRARGSERAKSKEKKSEKKEKAQEEPPAKLLDDLFRKTKAAPCIYWLPLTDSQIVQKEAERAERAKEREKRRKEQEEEEQKEREKEAERERNRQLEREKRREHSRERDRERERERERDRGDRDRDRERDRERGRERDRRDTKRHSRSRSRSTPVRDRGGRR

SEQ ID NO: 8190 - protein, 76 aa, Homo sapiens
MLLENLTDNESENTNLKKKVFEKEAHIQELSCLFQSEKSLETKIAKWNLQSRMNKNEAIVMKEASRQKTVALKKAS

SEQ ID NO: 8191 - protein, 582 aa, Homo sapiens
MEVRASLQKVSGSSDSVATMNSEEFVLVPQYADDNSTKHEEKPQLKIVSNGDEQLEKAMEEILRDSEKRPSSLLVDCQSSSEISDHSFGDIPASQTNKPSLQLILDPSNTEISTPRPSSPGGLPEEDSVLFNKLTYLGCMKVSSPRNEVEALRAMATMKSSSQYPFPVTLYVPNVPEGSVRIIDQSSNVEIASFPIYKVLFCARGHDGTTESNCFAFTESSHGSEEFQIHVFSCEIKEAVSRILYSFCTAFKRSSRQVSDVKDSVIPTPDSDVFTFSVSLEVKEDDGKGNFRLLVIPIPFEYFSPVPKDRDKFYFKLKQGIEKKVVITVQQLSNKELAIERCFGMLLSPGRNVKNSDMHLLDMESMGKSYDGRAYVITGMWNPNAPVFLALNEETPKDKQVYMTVAVDMVVTEVVEPVRFLLETVVRVYPANERFWYFSRKTFTETFFMRLKQSEGKGHTNAGDAIYEVVSLQRESDKEEPVTPTSGGGPMSPQDDEAEEESDNELSSGTGDVSKDCPEKILYSWGELLGKWHSNLGARPKGLSTLVKSGVPEALRAEVWQLLAGCHDNQAMLDRYRILITK

SEQ ID NO: 8192 - protein, 45 aa, Homo sapiens
MDADSDVALDILITNVVCVFRTRCHLNLRKIALEGANVIYKRDVG

SEQ ID NO: 8193 - protein, 253 aa, Homo sapiens
MEDAPQRLRWQAHLEFTHNHDVGDLTWDKIAVSLPRSEKLRSLVLAGIPHGMRPQLWMRLSGALQKKRNSELSYREIVKNSSNDETIAAKQIEKDLLRTMPSNACFASMGSIGVPRLRRVLRALAWLYPEIGYCQGTGMVAACLLLFLEEEDAFWMMSAIIEDLLPASYFSTTLLGVQTDQRVLRHLIVQYLPRLDKLLQEHDIELSLITLHWFLTAFASVVDIKLLLRIWDLFFYEGSRVLFQLTLGMLHLK

SEQ ID NO: 8194 - protein, 111 aa, Homo sapiens
  VARIANT 1: note = X can be any amino acid
XPLVKVQIFGVRLDTARQETNYVENNGFNPYWGQTLCFRVLVPELAMLRFVVMDYDWKSRNDFIGQYTLPWTCMQQGYRHIHLLSKDGISLRPASIFVYICIQEGLEGDES

SEQ ID NO: 8195 - protein, 183 aa, Homo sapiens; identical to SEQ ID NO: 5652

SEQ ID NO: 8196 - protein, 404 aa, Homo sapiens
MMLSTEGREGFVVKVRGLPWSCSADEVMRFFSDCKIQNGTSGIRFIYTREGRPSGEAFVELESEEEVKLALKKDRETMGHRYVEVFKSNSVEMDWMTLPVDFQGRSTGEAFVQFASQEIAEKALKKHKERIGHRYIEIFKSSRAEVRTHYDPPRKLMAMQRPGPYDRPGAGRGYNSIGRGAGFERMRRGAYGGGYGGYDDYGGYNDGYGFGSDRFGRDLNYCFSGMSDHRYGDGGSSFQSTTGHCVHMRGLPYRATENDIYNFFSPLNPMRVHIEIGPDGRVTGEADVEFATHEDAVAAMAKDKANMQHRYVELFLNSTAGTSGGAYDHSYVELFLNSTAGASGGAYGSQMMGGMGLSNQSSYGGPASQQLSGGYGGGYGGQSSMSGYDQVLQENSSDYQSNLA

SEQ ID NO: 8197 - protein, 514 aa, Homo sapiens; identical to SEQ ID NO: 7611

SEQ ID NO: 8198 - protein, 973 aa, Homo sapiens
MKFVSEDLHRCALLTADSFGDPFFAATQILLEYQLGRWVPRLREPRDLYGVSSSGPLSPTRWPYHCEVIDEKVQHIDWTPSCPEPVYIPTGLETEPLYPDSKEATVVYLAEDAYKEPCFVYSRVGGNRTPLKQPVDYRDNTLMFEARFESGNLQKVVKVAEYEYQLTVRPDLFTNKHTQWYYFQVTNMRAGIVYRFTIVNFTKPASLYSRGMRPLFYSEKEAKAHHIGWQRIGDQIKYYRNNPGQDGRHYFSLTWTFQFPHNKDTCYFAHCYPYTYTNLQEYLSGINNDPVRSKFCKIRVLCHTLARNMVYILTITTPLKNSDSRKRKAVILTARVHPGETNSSWIMKGFLDYILGNSSDAQLLRDTFVFKVVPMLNPDGVIVGNYRCSLAGRDLNRNYTSLLKESFPSVWYTRNMVHRLMEKREVILYCDLHGHSRKENIFMYGCDGSDRSKTLYLQQRIFPLMLSKNCPDKFSFSACKFNVQKSKEGTGRVVMWKMGIRNSFTMEATFCGSTLGNKRGTHFSTKDLESMGYHFCDSLLDYCDPDRTKYYRCLKELEEMERHITLEKVFEDSDTPVIDITLDVESSSRGSDSSESIDSLTYLLKLTSQKKHLKTKKERNSTIASHQNARGQEVYDRGHLLQRHTQSNSDVKDTRPNEPDDYMVDYFRRQLPNQGLAHCKLRLPGSRHSPASASRVAGTTGTRHHTWLIFVFLVEMGKKIPLKGTDLYGNCFKVTSLQSPMGKQTSTWTEKTRIPTEDLHHNLKSKIKECISFQSKKTGINWTDDEKRSYKDKGIVQTQEILQYLLPIVHSTKNMQTTQIKQLFNAANFQIQHQLNPATCRNIKKYSTSWTAPRNHPFVIQGDVMANSSEWVQSKPHRSLESLSPLKGPKKNKHSQIWAIKNEDIKPLSSKWETASSSFGMDANVLKYKSLQAEETNQQSSKHTALHLTKNKDEQANKNDGQPTLYLKFQRES

SEQ ID NO: 8199 - protein, 541 aa, Homo sapiens
MSSSGYPPNQGAFSTEQSRYPPHSVQYTFPNTRHQQEFAVPDYRSSHLEVSQASQLLQQQQQQQLRRRPSLLSEFHPGSDRPQERRTSYEPFHPGPSPVDHDSLESKRPRLEQVSDSHFQRVSAAVLPLVHPLPEGLRASADAKKDPAFGGKHEAPSSPISGQPCGDDQNASPSKLSKEELIQSMDRVDREIAKVEQQILKLKKKQQQLEEEAAKPPEPEKPVSPPPVEQKHRSIVQIIYDENRKKAEEAHKIFEGLGPKVELPLYNQPSDTKVYHENIKTGVPARRMMKNQVMRKKLILFFKRRNHARKQREQKICQRYDQLMEAWEKKVDRIENNPRRKAKESKTREYYEKQFPEIRKQREQQERFQRVGQRGAGLSATIARSEHEISEIIDGLSEQENNEKQMRQLSVIPPMMFDAEQRRVKFINMNGLMEDPMKVYKDRQFMNVWTDHEKEIFKDKFIQHPKNFGLIASYLERKSVPDCVLYYYLTKKNENYKALVRRNYGKRRGRNQQIARPSQEEKVEEKEEDKAEKTEKKEEEK

SEQ ID NO: 8200 - protein, 279 aa, Homo sapiens
MKFPFLPILVMKFIEKAQNMSKYVLIDTPGQIEVFTWSASGTIITEALASSFPTVVIYVMDTSRSTNPVTFMSNMLYACSILYKTKLPFIVVMNKTDIIDHSFAVEWMQDFEAFQDALNQETTYVSNLTRSMSLVLDEFYSSLRVVGVSAVLGTGLDELFVQVTSAAEEYEREYRPEYERLKKSLANAESQQQREQLERLRKDMGSVALDAGTAKDSLSPVLHPSDLILTRGTLDEEDEEADSDTDDIDHRVTEESHEEPAFQNFMQESMAQYWKRNNK

SEQ ID NO: 8201 - protein, 408 aa, Homo sapiens
MKDTQDIQEASKAMQNKVHEQEDKNEKQKQREDKLGVYSLVHFSPKMLGSVATTLPLSSSNSSGMPLGYYLSSPQISRVTISTTGQLTSKATVGSCSRVENSLDASPFSVPKKQDESPMIGDGEDYFLSLFGDSKKLTAHSNYTQKTLKYFSMILEEVGQFTSSSLGDVEIAEVNVKGLFVKLINSSLDKEMAIGDHILQQNVNGQTISLYRFLPNIVMQANSTVTVWAAASEAKHQPPSDFLWKEQDKFRASPDCITILCKPNGQAIAWYTPIHWKQAWEKLDADVEFNRCSVVSPTFRKRVFQWTASTATITKEKQDQPKKDISNYQVEQAQVLLKREKEIPPTVFPNRSPWCQNPYVSAHPYCPLIEPHNTSTAGGRLDRQAARSTRPNRASGSKKKKTSESQKQ

SEQ ID NO: 8202 - protein, 813 aa, Homo sapiens; identical to SEQ ID NO: 7347

SEQ ID NO: 8203 - protein, 590 aa, Homo sapiens
MPSPQLLVLFGSQTGTAQDVSERLGREARRRRLGCRVQALDSYPVVNLINEPLVIFVCATTGQGDPPDNMKNFWRFIFRKNLPSTALCQMDFAVLGLGDSSYAKFNFVAKKLHRRLLQLGGSALLPVCLGDDQHELGPDAAVDPWLRDLWDRVLGLYPPPPGLTEIPPGVPLPSKFTLLFLQEAPSTGSEGQRVAHPGSQEPPSESKPFLAPMISNQRVTGPSHFQDVRLIEFDILGSGISFAAGDVVLIQPSNSAAHVQRFCQVLGLDPDQLFMLQPREPDVSSPTRLPQPCSMRHLVSHYLDIASVPRRSFFELLACLSLHELEREKLLEFSSAQGQEELFEYCNRPRRTILEVLCDFPHTAAAIPPDYLLDLIPVIRPRAFSIASSLLILVAVVQFQTRLKEPRRGLCSSWLASLDPGQGPVRVPLWVRPGSLAFPETPDTPVIMVGPGTGVAPFRAAIQERVAQGQTGNFLFFGCRWRDQDFYWEAEWQELEKRDCLTLIPAFSREQEQKVYVQHRLRELGSLVWELLDRQGAYFYLAGNAKSMPADVSEALMSIFQEEGGLCSPDAAAYLARLQQTRRFQTETWA

SEQ ID NO: 8204 - protein, 811 aa, Homo sapiens; identical to SEQ ID NO: 5487

SEQ ID NO: 8205 - protein, 62 aa, Homo sapiens
MPEIRVTPLGACPVLSWNLVLPPGRGSRAPSSTDTRTGFHVLPHGVSASSEGAPRPGVDTVL

SEQ ID NO: 8206 - protein, 314 aa, Homo sapiens
MSGLVLGQRDEPAGHRLSQEEILGSTRLVSQGLEALRSEHQAVLQSLSQTIECLQQGGHEEGLVHEKARQLRRSMENIELGLSEAQVMLALASHLSTVESEKQKLRAQVRRLCQENQWLRDELAGTQQRLQRSEQAVAQLEEEKKHLEFLGQLRQYDEDGHTSEEKEGDATKDSLDDLFPNEEEEDPSNGLSRGQGATAAQQGGYEIPARLRTLHNLVIQYAAQGRYEVAVPLCKQALEDLERTSGRGHPDVATMLNILALVYRDQNKYKEAAHLLNDALSIRESTLGPDHPAVSIPCPPHPTAAPHHCCFGLS

SEQ ID NO: 8207 - protein, 683 aa, Homo sapiens; identical to SEQ ID NO: 4869

SEQ ID NO: 8208 - protein, 1351 aa, Homo sapiens
MEENESQKCEPCLPYSADRRQMQEQGKGNLHVTSPEDAECRRTKERLSNGNSRGSVSKSSRNIPRRHTLGGPRSSKEILGMQTSEMDRKREAFLEHLKQKYPHHASAIMGHQERLRDQTRSPKLSHSPQPPSLGDPVEHLSETSADSLEAMSEGDAPTPFSRGSRTRASLPVVRSTNQTKERSLGVLYLQYGDETKQLRMPNEITSADTIRALFVSAFPQQLTMKMLESPSVAIYIKDESRNVYYELNDVRNIQDRSLLKVYNKDPAHAFNHTPKTMNGDMRMQRELVYARGDGPGAPRPGSTAHPPHAIPNSPPSTPVPHSMPPSPSRIPYGGTRSMVVPGNATIPRDRISSLPVSRPISPSPSAILERRDVKPDEDMSGKNIAMYRNEGFYADPYLYHEGRMSIASSHGGHPLDVPDHIIAYHRTAIRSASAYCNPSMQAEMHMEQSLYRQKSRKYPDSHLPTLGSKTPPASPHRVSDLRMIDMHAHYNAHGPPHTMQPDRASPSRQAFKKEPGTLVYIEKPRSAAGLSSLVDLGPPLMEKQVFAYSTATIPKDRETSEKMMKTTANRNHTDSAGTPHVSGGKMLSALESTVPPSQPPPVGTSAIHMSLLEMRRSVAELRLQLQQMRQLQLQNQELLRAMMKKAELEISGKVMETMKRLEDPVQRQRVLVEQERQKYLHEEEKIVKKLCELEDFVEDLKKDSTAASRLVTLKDVEDGAFLLRQVGEAVATLKGEFPTLQNKMRAILRIEVEAVRFLKEEPHKLDSLLKRVRSMTDVLTMLRRHVTDGLLKGTDAAQAAQYMAMEKATAAEVLKSQEEAAHTSGQPFHSTGAPGDAKSEVVPLSGMMVRHAQSSPVVIQPSQHSVALLNPAQNLPHVASSPAVPQEATSTLQMSQAPQSPQIPMNGSAMQSLFIEEIHSVSAKNRAVSIEKAEKKWEEKRQNLDHYNGKEFEKLLEEAQANIMKSIPNLEMPPATGPLPRGDAPVDKVELSEDSPNSEQDLEKLGGKSPPPPPPPPRRSYLPGSGLTTTRSGDVVYTGARGSENITAKASSEDAGPSPQTRATKYPAEEPASAWTPSPPPVTTSSSKDEEEEEEEGDKIMAELQAFQKCSFMDVNSNSHAEPSRADSHVKDTRSGATVPPKEKKGSSGAPQTSRMPVPMSAKNRPGTLDKPGKQSKLQDPRQYRQANGSAKKSGGDFKPTSPSLPASKIPALSPSSGKSSSLPSSSGDSSNLPNPPATKPSIASNPLSPQTGPPAHSASLIPSVSNGSLKFQSLTHTGKGHHLSFSPQSQNGRAPPPLSFSSSPPSPASSVSLNQGAKGTRTIHTPSLTSYKAQNGSSSKATPSTAKETS

SEQ ID NO: 8209 - protein, 58 aa, Homo sapiens
  VARIANT 1: note = X can be any amino acid
XIIHKLAMQLRHIGDNIDHRMVREDLQQDGRDALDHFVFFFFRRVQVLLHFFWNNHLL

SEQ ID NO: 8210 - protein, 142 aa, Homo sapiens
MPEDQVGKLEATENTISAMAAAAAEQQQFYLLLGNLLSPDNVVRKQAEETYENIPGQSKITFLLQAIRNTTAAEEARQMAAVLLRRLLSSAFDEVYPALPSDVQTAIKSELLMIIQMETQSSMRKKVCDIAAELARNLIGVY

SEQ ID NO: 8211 - protein, 30 aa, Homo sapiens
MGSRKKEIALQVNISTQELWEEMLSSKGLT

SEQ ID NO: 8212 - protein, 214 aa, Homo sapiens; identical to SEQ ID NO: 5233

SEQ ID NO: 8213 - protein, 384 aa, Homo sapiens; identical to SEQ ID NO: 5364

SEQ ID NO: 8214 - protein, 84 aa, Homo sapiens
MSGLVLGQRDEPAGHRLSQEEILGSTRLVSQGLEALRSEHQAVLQSLSQTIECLQQGGHEEGLVHEKARQLRRSMENIELGLSE

SEQ ID NO: 8215 - protein, 160 aa, Homo sapiens [sequence omitted]

SEQ ID NO: 8216 - protein, 21 aa, Homo sapiens
MNPASAPPPLPPPGQQVIHVT

SEQ ID NO: 8217 - protein, 403 aa, Homo sapiens; identical to SEQ ID NO: 5446

SEQ ID NO: 8218 - protein, 1703 aa, Homo sapiens; identical to SEQ ID NO: 5407

SEQ ID NO: 8219 - protein, 135 aa, Homo sapiens
MGKSCKVVVCGQASVGKTSILEQLLYGNHVVGSEMIETQEDIYVGSIETDRGVREQVTIVVLGNKCDLQEQRRVDPDVAQHWAKSEKVKLWEVSVADRRSLLEPFVYLASKMTQPQSKSAFPLSRKNKGSGSLDG

SEQ ID NO: 8220 - protein, 1232 aa, Homo sapiens; identical to SEQ ID NO: 5996

SEQ ID NO: 8221 - protein, 88 aa, Homo sapiens
MPEDQVGKLEATENTISAMAAAAAEQQQFYLLLGNLLSPDNVVRKQAEETYENIPGQSKITFLLQAIRNTTAAEEARQMAAVLLRRLL

SEQ ID NO: 8222 - protein, 1210 aa, Homo sapiens; identical to SEQ ID NO: 6051

SEQ ID NO: 8223 - protein, 580 aa, Homo sapiens
MVLVGTQDAISAANPRVIDDSRARKLSTDLKRCTYYETCATYGLNVERVFQDVAQKVVALRKKQQLAIGPCKSLPNSPSHSAVSAASIPAVHINQATNGGGSAFSDYSSSVPSTPSISQRELRIETIAASSTPTPIRKQSKRRSNIFTSRKGADLDREKKAAECKVDSIGSGRAIPIKQGILLKRSGKSLNKEWKKKYVTLCDNGLLTYHPSLHDYMQNIHGKEIDLLRTTVKVPGKRLPRATPATAPGTSPRANGLSVERSNTQLGGGTEAEESFEFVVVSLTGQTWHFEASTAEERELWVQSVQAQILASLQGCRSAKDKTRLGNQNAALAVQAVRTVRGNSFCIDCDAPNPDWASLNLGALMCIECSGIHRHLGAHLSRVRSLDLDDWPPELLAVMTAMGNALANSVWEGALGGYSKPGPDACREEKERWIRAKYEQKLFLAPLPSSDVPLGQQLLRAVVEDDLRLLVMLLAHGSKEEVNETYGDGDGRTALHLSSAMANVVFTQLLIWYGVDVRSRDARGLTPLAYARRAGSQECADILIQHGCPGEGCGLAPTPNREPANGTNPSAELHRSPSLL

SEQ ID NO: 8224 - protein, 103 aa, Homo sapiens
MAELIQKKLQGEVEKYQQLQKDLSKSMSGRQKLEAQLTENNIVKEELALLDGSNVVFKLLGPVLVKQELGEARATVGKRLDYITAEIFLRTIPDPGDVPDSFF

SEQ ID NO: 8225 - protein, 150 aa, Homo sapiens
MTSRKKVLLKVIILGDSGVGKTSLMNQYVNKKFSNQYKATIGADFLTKEVMVDDRLVTMQIWDTAGQERFQSLGVAFYRGADCCVLVFDVTAPNTFKTLDSWRDEFLIQASPRDPENFPFVVLGNKIDLENRQVATKRAQAWCYSKNNIP

SEQ ID NO: 8226 - protein, 179 aa, Homo sapiens; identical to SEQ ID NO: 6811

SEQ ID NO: 8227 - protein, 56 aa, Homo sapiens
MDSSIHLSSLISRHDDEATRTSTSEGLEEGEVEGETLLIVESEDQASVDLSHDQSG

SEQ ID NO: 8228 - protein, 50 aa, Homo sapiens
MCSTSGCDLEEIPLDDDDLNTIEFKILAYYTRHHVFKSTPALFSPKLLRT

SEQ ID NO: 8229 - protein, 400 aa, Homo sapiens; identical to SEQ ID NO: 6020

SEQ ID NO: 8230 - protein, 170 aa, Homo sapiens
MPRKGTQPSTARRREEGPPPPSPDGASSDAEPEPPSGRTESPATAAETASEELDNRSLEEILNSIPPPPPPAMTNEAGAPRLMITHIVNQNFKSYAGEKILGPFHKRFSCIIGPNGSGKSNVIDSMLFVFGYRAQKIRSKKLSVLIHNSDEHKDIQSCTVEVHFQKIIDK

SEQ ID NO: 8231 - protein, 167 aa, Homo sapiens
MEKAVNDGSHSEELFCHLKTISEKEDLPRCTSESHLSCLKQDILNEKTELEATLKEAELVTHSVELLLPLFKDTIEKINFENANLSALNLKISEQKEILIKELDTFKSVKLALEHLLRKRDYKQTGDNLSSMLLENLTDNESENTNLKKKVFEKEAHIQELSCLFQS

SEQ ID NO: 8232 - protein, 791 aa, Homo sapiens; identical to SEQ ID NO: 5479

SEQ ID NO: 8233 - protein, 228 aa, Homo sapiens
MTDQTYCDRLVQDTPFLTGHGRLSEQQVDRIILQLNRYYPQILTNKEAEKFRNPKASLRVRLCDLLSHLQRSGERDCQEFYRALYIHAQPLHSRLPSRHALRKFHITNHACLVLARGGHPSLPLMAWMSSMTTQVCCSPGLASPLASAPPQRPPSGPEGRVWQAQAVQMLVSVSHFLPLPPSLSHGSFHTAWGILYVHSCPSFSNLIPRGSLHVCVDSNLVPTAAWRS

SEQ ID NO: 8234 - protein, 315 aa, Homo sapiens; identical to SEQ ID NO: 4846

SEQ ID NO: 8235 - protein, 400 aa, Homo sapiens; identical to SEQ ID NO: 6020

SEQ ID NO: 8236 - protein, 126 aa, Homo sapiens
MVLILGRRLNREDLGVRDSPATKRKVFEMDPKSLTGHEFFDFSSGSSHAENILQIFNEFRDSRLFTDVIICVEGKEFPCHRAVLSACSSYFRAMFCNDHRESREMLVEINGILAEAMECFLQYVYT

SEQ ID NO: 8237 - protein, 103 aa, Homo sapiens; identical to SEQ ID NO: 8224

SEQ ID NO: 8238 - protein, 78 aa, Homo sapiens
MVLILGRRLNREDLGVRDSPATKRKVFEMDPKSLTGHEFFDFSSGSSHAENILQIFNEFRDSRLFTDVIICVEGKEFP

SEQ ID NO: 8239 - protein, 439 aa, Homo sapiens
MAANLSRNGPALQEAYVRVVTEKSPTDWALFTYEGNSNDIRVAGTGEGGLEEMVEELNSGKVMYAFCRVKDPNSGLPKFVLINWTGEGVNDVRKGACASHVSTMASFLKGAHVTINARAEEDVEPECIMEKVAKASGANYSFHKESGRFQDVGPQAPVGSVYQKTNAVSEIKRVGKDSFWAKAEKEEENRRLEEKRRAEEAQRQLEQERRERELREAARREQRYQEQGGEASPQSRTWEQQQEVVSRNRNEQGSTCASLQESAVHPREIFKQKERAMSTTSISSPQPGKLRSPFLQKQLTQPETHFGREPAAAISRPRADLPAEEPAPSTPPCLVQAEEEAVYEEPPEQETFYEQPPLVQQQGAGSEHIDHHIQGQGLSGQGLCARALYDYQAADDTEISFDPENLITGIEVIDEGWWRGYGPDGHFGMFPANYVELIE

SEQ ID NO: 8240 - protein, 72 aa, Homo sapiens
MSYQQQQCKQPCQPPPVCPAPKCPEPCPPPKCPEPCPPSKCPQSCPPQQCQQKCPPVTPSPPCQPKCPPKSK

SEQ ID NO: 8241 - protein, 113 aa, Homo sapiens
MSAIQNLHSFDPFADASKGDDLLPAGTEDYIHIRIQQRNGRKTLTTVQGIADDYDKKKLVKAFKKKFACNGTVIEHPEYGEVIQLQGDQRKNICQFLVEIGLAKDDQLKVHGF

SEQ ID NO: 8242 - protein, 308 aa, Homo sapiens; identical to SEQ ID NO: 5445

SEQ ID NO: 8243 - protein, 602 aa, Homo sapiens
MIEKMQGSRMDEQRCSFPPPLKTEEDYIPYPSVHEVLGREGPFPLILLPQFGGYWIEGTNHEITSIPETEPLQSPTTKVKLECNPTARIYRKHFLGKEHFNYYSLDAALGHLVFSLKYDVIGDQEHLRLLLRTKCRTYHDVIPISCLTEFPNVVQMAKLVCEDVNVDRFYPVLYPKASRLIVTFDEHVISNNFKFGVIYQKLGQTSEEELFSTNEESPAFVEFLEFLGQKVKLQDFKGFRGGLDVTHGQTGTESVYCNFRNKEIMFHVSTKLPYTEGDAQQLQRKRHIGNDIVAVVFQDENTPFVPDMIASNFLHAYVVVQAEGGGPDGPLYKVSVTARDDVPFFGPPLPDPAVFRKGPEFQEFLLTKLINAEYACYKAEKFAKLEERTRAALLETLYEELHIHSQSMMGLGGDEDKMENGSGGGGFFESFKRVIRSRSQSMDAMGLSNKKPNTVSTSHSGSFAPNNPDLAKAAGISLIVPGKSPTRKKSGPFGSRRSSAIGIENIQEVQEKRESPPAGQKTPDSGHVSQEPKSENSSTQSSPEMPTTKNRAETAAQRAEALKDFSRSSSSASSFASVVEETEGVDGEDTGLHVAGGQCQHH

SEQ ID NO: 8244 - protein, 58 aa, Homo sapiens
MGRVWDLPGVLKVEGFRATMAQRLVRVLQICAGHVPGVSALNLLSLLRSSEGPSLEDL

SEQ ID NO: 8245 - protein, 732 aa, Homo sapiens
MLPCAAGARGRGAMVVLRAGKKTFLPPLCRAFACRGCQLAPERGAERRDTAPSGVSRFCPPRKSCHDWIGPPDKYSNLRPVHFYIPENESPLEQKLRKLRQETQEWNQQFWANQNLTFSKEKEEFIHSRLKTKGLGLRTESGQKATLNAEEMADFYKEFLSKNFQKHMYYNRMYDNMSTMVYIKEDKLEKLTQDEIISKTKQVIQGLEALKNEHNSILQSLLETLKCLKKDDESNLVEEKSNMIRKSLEMLELGLSEAQVMMALSNHLNAVESEKQKLRAQVRRLCQENQWLRDELANTQQKLQKSEQSVAQLEEEKKHLEFMNQLKKYDDDISPSEDKDTDSTKEPLDDLFPNDEDDPGQGIQQQHSSAAAAAQQGGYEIPARLRTLHNLVIQYASQGRYEVAVPLCKQALEDLEKTSGHDHPDVATMLNILALVYRDQNKYKDAANLLNDALAIREKTLGKDHPAVAATLNNLAVLYGKRGKYKEAEPLCKRALEIREKVLGKDHPDVAKQLNNLALLCQNQGKYEEVEYYYQRALEIYQTKLGPDDPNVAKTKNNLASCYLKQGKFKQAETLYKEILTRAHEREFGSVDDENKPIWMHAEEREECKGKQKDGTSFGEYGGWYKACKVDSPTVTTTLKNLGALYRRQGKFEAAETLEEAAMRSRKQGLDNVHKQRVAEVLNDPENMEKRRSRESLNVDVVKYESGPDGGEEVSMSVEWNGMRKMKLGLVN

SEQ ID NO: 8246 - protein, 82 aa, Homo sapiens
MSGLVLGQRDEPAGHRLSQEEILGSTRLVSQGLEALRSEHQAVLQSLSQTIECLQQGGHEEGLVHEKARQLRRSMENIELGL

SEQ ID NO: 8247 - protein, 73 aa, Homo sapiens
MVLILGRRLNREDLGVRDSPATKRKVFEMDPKSLTGHEFFDFSSGSSHAENILQIFNEFRDSRLFTDVIICVE

SEQ ID NO: 8248 - protein, 396 aa, Homo sapiens
MNFQAGGGQSPQQQQSLAAPGGGGAAAQQLVCGGQFGGAGPGAGGGGGPSQQLAGGPPQQFALSNSAAIRAEIQRFESVHPNIYAIYDLIERIEDLALQNQIREHVISIEDSFVNSQEWTLSRSVPELKVGIVGNLSSGKSALVHRYLTGTYVQEESPEGGRFKKEIVVDGQSYLLLIRDEGGPPELQFAAWVDAVVFVFSLEDEISFQTVYNYFLRLCSFRNASEVPMVLVGTQDAISAANPRVIDDSRARKLSTDLKRCTYYETCATYGLNVERVFQDVAQKVVALRKKQQLAIGPCKSLPNSPSHSAVSAASIPAVHINQATNGGGSAFSDYSSSVPSTPSISQRELRIETIAASSTPTPIRKQSKRRSNIFTICATVSNFSSTKRPFQLLPN

SEQ ID NO: 8249 - protein, 369 aa, Homo sapiens
MDSCLMVWHMKPQSRAYRFTGHKDAVTCVNFSPSGHLLASGSRDKTVRIWVPNVKGESTVFRAHTATVRSVHFCSDGQSFVTASDDKTVKVWATHRQKFLFSLSQHINWVRCAKFSPDGRLIVSASDDKTVKLWDKSSRECVHSYCEHGGFVTYVDFHPSGTCIAAAGMDNTVKVWDVRTHRLLQHYQLHSAAVNGLSFHPSGNYLITASSDSTLKILDLMEGRLLYTLHGHQGPATTVAFSRTGEYFASGGSDEQVMVWKSNFDIVDHGEVTKVPRPPATLASSMGNLPEVDFPVPPGRGRSVESVQSQPQEPVSVPQTLTSTLEHIVGQLDVLTQTVSILEQRLTLTEDKLKQCLENQQLIMQRATP

SEQ ID NO: 8250 - protein, 103 aa, Homo sapiens; identical to SEQ ID NO: 8224

SEQ ID NO: 8251 - protein, 89 aa, Homo sapiens; identical to SEQ ID NO: 6950

SEQ ID NO: 8252 - protein, 379 aa, Homo sapiens
MWHLDFGLHTGKTFQPLPFIIVVYPGAGRRWGLVLSLASHRRRTEAGGGTGPTSDTGWGCMLRCGQMIFAQALVCRHLGRDWRWTQRKRQPDSYFSVLNAFIDRKDSYYSIHQIAQMGVGEGKSIGQWYGPNTVAQVLKKLAVFDTWSSLAVHIAMDNTVVMEEIRRLCRTSVPCAGATAFPADSDRHCNGFPAGAEVTNRPSPWRPLVLLIPLRLGLTDINEAYVETLKHCFMMPQSLGVIGGKPNSAHYFIGYVGEELIYLDPHTTQPAVEPTDGCFIPDESFHCQHPPCRMSIAELDPSIAVGFFCKTEDDFNDWCQQVKKLSLLGGALPMFELVELQPSHLACPDVLNLSLDSSDVERLERFFDSEDEDFEILSL

SEQ ID NO: 8253 - protein, 560 aa, Homo sapiens; identical to SEQ ID NO: 7400

SEQ ID NO: 8254 - protein, 109 aa, Homo sapiens
MNPASAPPPLPPPGQQVIHVTQDLDTDLEALFNSVMNPKPSSWRKKILPESFFKEPDSGSHSRQSSTDSSGGHPGPRLAGGAQHVRSHSSPASLQLGTGAGAAGSPAQQ

SEQ ID NO: 8255 - protein, 202 aa, Homo sapiens
MGSRKKEIALQVNISTQELWEEMLSSKGLTVVDVYQGWCGPCKPVVSLFQKMRIEVGLDLLHFALAEADRLDVLEKYRGKCEPTFLFYAGGELVAVVRGANAPLLQKTILDQLEAEKKVLAEGRERKVIKDEALSDEDECVSHGKNNGEDEDMVSSERTCTLAIIKPDAVAHGKTDEIIMKIQEAGFEILTNEERTMTEAEV

SEQ ID NO: 8256 - protein, 64 aa, Homo sapiens
MAPQKDRKPKRSTWRFNLDLTHPVEDGIFDSGNFGTFPSEYLGFSSLVLHFFCFKIGAISTGEG

SEQ ID NO: 8257 - protein, 123 aa, Homo sapiens
MENLQTNFSLVQGSTKKLNGMGDDGSPPAKKMITDIHANGKTINKVPTVKKEHLDDYGEAPVETDGEHVKRTCTSVPETLHLNPSLKHTLAQFHLSSQSSLGGPAAFSARHSQESMSPTVFLP

SEQ ID NO: 8258 - protein, 66 aa, Homo sapiens
MNPSMKQKQEEIKENIKNSSVPRRTLKMIQPSASGSLVGRENELSAGLSKRKHRNDHLTSTTSSPG

SEQ ID NO: 8259 - protein, 536 aa, Homo sapiens
MVLILGRRLNREDLGVRDSPATKRKVFEMDPKSLTGHEFFDFSSGSSHAENILQIFNEFRDSRLFTDVIICVEGKEFPCHRAVLSACSSYFRAMFCNDHRESREMLVEINGILAEAMECFLQYVYTGKVKITTENVQYLFETSSLFQISVLRDACAKFLEEQLDPCNCLGIQRFADTHSLKTLFTKCKNFALQTFEDVSQHEEFLELDKDELIDYICSDELVIGKEEMVFEAVMRWVYRAVDLRRPLLHELLTHVRLPLLHPNYFVQTVEVDQLIQNSPECYQLLHEARRYHILGNEMMSAARPRRSTGYSEVIVVVGGCERVGGFNLPYTECYDPVTGEWKSLAKLPEFTKSEYAVCALRNDILVSGGRINSRDVWIYNSQLNIWIRVASLNKGRWRHKMAVLLGKVYVVGGYDGQNRLSSVECYDSFSNRWTEVAPLKEAVSSPAVTSCVGKLFVIGGGPDDNTCSDKVQSYDPETNSWLLRAAIPIAKRCITAVSLNNLIYVAGGLTKAIYCYDPVEDYWMHVQNTFSRQVIT

SEQ ID NO: 8260 - protein, 536 aa, Homo sapiens
MRLEELKRLQNPLEQVNDGKYSFENIQRAWREYLQRQEPLGKRSPSPPSVSSEKLSSSVSMNTFSDSSTPDYREDGMDLGSDAGSSSSSSRASSQSNSTKVTPCSECKSSSSPGGSLDLVSALEDYEEPFPVYQKKVIDEWAPEEDGEEEEEEDERDQRGYRDDRSPAREPGDVSARTRSGGGGGRSATTAMPPPVPNGNLHQHDPQDLRHNGNVVVAGRPSCSRGPRRAIQKPQPAGGRRSGRGPAAGGLCLQPPDGGTCVPEEPPVPPMDWEALEKHLAGLQFREQEVRNQGQARTNSTSAQKNERESIRQKLALGSFFDDGPGIYTSCSKSGKPSLSSRLQSGMNLQICFVNDSGSDKDSDADDSKTETSLDTPLSPMSKQSSSYSDRDTTEEESESLDDMDFLTRQKKLQAEAKMALAMAKPMAKMQVEVEKQNRKKSPVADLLPHMPHISECLMKRSLKPTDLRDMTIGQLQVIVNDLHSQIESLNEELVQLLLIRDELHTEQDAMLVDIEDLTRHAESQQKHMAEKMPAK

SEQ ID NO: 8261 - protein, 209 aa, Homo sapiens
MSENAAPGLISELKLAVPWGHIAAKAWGSLQGPPVLCLHGWLDNASSFDRLIPLLPQDFYYVAMDFGGHGLSSHYSPGVPYYLQTFVSEIRRVVAALKWNRFSILGHSFGGVVGGMFFCTFPEMVDKLILLDTPLFLLESDEMENLLTYKRRAIEHVLQVEASQEPSHVFSLKQLLQRLLKSNSHLSEECGELLLQRGTTKVATGREQH

SEQ ID NO: 8262 - protein, 66 aa, Homo sapiens
MPEDQVGKLEATENTISAMAAAAAEQQQFYLLLGNLLSPDNVVRKQAEETYENIPGQSKITFLLQA

SEQ ID NO: 8263 - protein, 686 aa, Homo sapiens
MAISQHQFYLDRKQSKAKIPSARSLDEIAMDLTETGTQRASKLVTLETKSQFIMASNGSLISSGSQDSEVSEEQKREKILELKKKEKLLQEKLLKKVEELKKICLREAELTGKMPKEYPLNIGEKPPQVRRRVGTAFKLDDNLLPSEEDPALQELESNFLIQQKLVEAAKKLANEPDLCKTVKKKRKQDYTDAMKKLQEIENAINEYRIRCGKKPSQKATVLPEDIIPSESSSLSDTTTYDDPSDAFTFPGQRSSSVPHSPRILPPKSLGIERIHFRKSSINEQFVDTRQSREMLSTHSSPYKTLERRPQGGRSMPTTPVLTRNAYSSSHLEPESSSQHCRQRSGSLESQSHLLSEMDSDKPFFSLSKSQRSSSTEILDDGSSYTSQSSTEYYCVTPVTGPYYTTQTLDTRTRGRRRSKKQNVSTSNSGSMPNLAQKDSLRNGVYSKSQEPPSSSYYIAGYTPYAECDFYYSGGYVYENDTEGQYSVNPSYRSSAHYGYERQRDYSRSFHEDEVDRVPHNPYATLRLPRKAAAKSEHITKNIHKALVAEHLRGWYQRASGQKDQGHSPQTSFDSDRGSQRCLGFAGLQVPCSPSSRASSYSSVSSTNASGNWRTQLTIGLSDYETPAHSSYTSCYGNVYNPLPSPSRQYTEISQLDGTDGNQLEDNLESSEQRLFWHEDSKPGTLV

SEQ ID NO: 8264 - protein, 72 aa, Homo sapiens
MMEEISIMVAYDAHVFSQLHDEDFLTSLVAISKPRSMVPTKKLKKYEKEYQTMRESQLQQEDPMDRYKFVYL

SEQ ID NO: 8265 - protein, 654 aa, Homo sapiens
MDSLPDEFFVRHPAVEDQRKEETENKLEKSSGQLNKQENDIPTDLVPVNLLLEVKKLLNAINTLPKGVVPHIKKFLQEDFSFQTMQREVAANSQNGEEIVPALTLRFLITQLEAALRNIQAGNYTAHQINIGYYLTLLFLYGVALTERGKKEDYTEAENKFLVMKMMIQENEICENFMSLVYFGRGLLRCAQKRYNGGLLEFHKSLQEIGDKNDHWFDIDPTEDEDLPTTFKDLLNNFIKTTESNIMKQTICSYLDCERSCEADILKNTSYKGFFQLMCSKSCCVYFHKICWKKFKNLKYPGENDQSFSGKKCLKEGCTGDMVRMLQCDVPGIVKILFEVVRKDEYITIENLGASYRKLISLKITDTDIRPKISLKFNTKDEMPIFKLDYNYFYHLLHIIIISGTDIVRQIFDEAMPPPLLKKELLIHKNVLESYYNHLWTNHPLGGSWHLLYPPNKELPQSKQFDLCLLLALIKHLNVFPAPKKGWNMEPPSSDISKSADILRLCKYRDILLSEILMNGLTESQFNSIWKKVSDILLRLGMMQEDIDKVKENPIENISLDYHQLSVYLGIPVPEIIQRMLSCYQQGIALQSITGSQRIEIEELQNEEEELSPPLMEYNINVKSHPEIQFAEINKDGTSIPSESSTESLKDLQE

SEQ ID NO: 8266 - protein, 189 aa, Homo sapiens
MNPASAPPPLPPPGQQVIHVTQDLDTDLEALFNSVMNPKPSSWRKKILPESFFKEPDSGSHSRQSSTDSSGGHPGPRLAGGAQHVRSHSSPASLQLGTGAGAAGSPAQQHAHLRQQSYDVTDELPLPPGWEMTFTATGQRYFLNHIEKITTWQDPRKAMNQPLNHMNLHPAVSSTPVPQRSMAVSQPNL

SEQ ID NO: 8267 - protein, 281 aa, Homo sapiens
MGPLAAVELFYDVLSPYSWLGFEILCRYQNIWNINLQLRPSLITGIMKDSGNKPPGLLPRKGLYMANDLKLLRHHLQIPIHFPKDFLSVMLEKGSLSAMRFLTAVNLEHPEMLEKASRELWMRVWSRVSVGLWESSGRTLDDFLTFPRHVFRVMILPPPGGSTVLPVTPLSPHRLPAVFSSSQNEDITEPQSILAAAEKAGMSAEQAQGLLEKIATPKVKNQLKETTEAACRYGAFGLPITVAHVDGQTHMLFGSDRMELLAHLLGEKWMGPIPPAVNARL

SEQ ID NO: 8268 - protein, 406 aa, Homo sapiens
MDQLENAKMEHTNASFDTFFCETRAGKHVPRALFVDLEPTVIDGIRTGQHRSLFHPEQLLSGKEDAANNYARGRYSVGSEVIDLVLERTRKLAEQCGGLQGFLIFRSFGGGTGSGFTSLLMERLTGEYSRKTKLEFSVYPAPRISTAVVEPYNSVLTTHSTTEHTDCTFMVDNEAVYDICHRKLGVECPSHASINRLVVQVVSSITASLRFEGPLNVDLIEFQTNLVPYPRIHFPMTAFAPIVSADKAYHEQFSVSDITTACFESSNQLVKCDPRLGKYMACCLLYRGDVVPKEVNAAIAATKSRHSVQFVDWCPTGFKVGINNRPPTVMPGGDLAKVHRSICMLSNTTAIVEAWARLDHKFDLMYAKRAFLHWYLREGMEEAEFLEAREDLAALERDYEEVAQSF

SEQ ID NO: 8269 - protein, 619 aa, Homo sapiens; identical to SEQ ID NO: 5804

SEQ ID NO: 8270 - protein, 96 aa, Homo sapiens; identical to SEQ ID NO: 8007

SEQ ID NO: 8271 - protein, 128 aa, Homo sapiens
MTDLVAVWDVALSDGVHKIEFEHGTTSGKRVVYVDGKEEIRKEWMFKLVGKETFYVGAAKTKATINIDAISGFAYEYTLEINGKSLKKYMEDRSKTTNTWVLHMDGENFRIVLEKDAMDVWCNGKKLE

SEQ ID NO: 8272 - protein, 292 aa, Homo sapiens
MTVSKFMAIQKALQPDWFQCLSDGEVSCKEATSIKRVRKSVDRSLLFLDNCLRLQEESEVLQKSVIIGVIEGGDVMEERLRSARETAKRPVGGFLLDGFQGNPTTLEARLRLLSSVTAELPEDKPRLISGVSRPDEVLECIERGVDLFESFFPYQVTERGCALTFSFDYQPNPEETLLQQNGTQEEIKCMDQIKKIETTGCNQEITSFEINLKEKKYQEDFNPLVRGCSCYCCKNHTRAYIHHLLVTNELLAGVLLMMHNFEHYFGFFHYIREALKSDKLAQLKELIHRQAS

SEQ ID NO: 8273 - protein, 199 aa, Homo sapiens; identical to SEQ ID NO: 4994

SEQ ID NO: 8274 - protein, 117 aa, Homo sapiens
MPEDQVGKLEATENTISAMAAAAAEQQQFYLLLGNLLSPDNVVRKQAEETYENIPGQSKITFLLQAIRNTTAAEEARQMAAVLLRRLLSSAFDEVYPALPSDVQTAIKSELLMIIQM

SEQ ID NO: 8275 - protein, 295 aa, Homo sapiens
  VARIANT 1: note = X can be any amino acid
XTKLATGSKDTTVIIWQVDPDTHLLKLLKTLEGHAYGVSYIAWSPDDNYLVACGPDDCSELWLWNVQTGELRTKMSQSHEDSLTSVAWNPDGKRFVTGGQRGQFYQCDLDGNLLDSWEGVRVQCLWCLSDGKTVLASDTHQRIRGYNFEDLTDRNIVQEDHPIMSFTISKNGRLALLNVATQGVHLWDLQDRVLVRKYQGVTQGFYTIHSCFGGHNEDFIASGSEDHKVYIWHKRSELPIAELTGHTRTVNCVSWNPQIPSMMASASDDGTVRIWGPAPFIDHQNIEEECSSMDS

SEQ ID NO: 8276 - protein, 350 aa, Homo sapiens
MARWIPTKRQKYGVAIYNYNASQDVELSLQIGDTVHILEMYEGWYRGYTLQNKSKKGIFPETYIHLKEATVEDLGQHETVIPGELPLVQELTSTLREWAVIWRKLYVNNKLTLFRQLQQMTYSLIEWRSQILSGTLPKDELAELKKKVTAKIDHGNRMLGLDLVVRDDNGNILDPDETSTIALFKAHEVASKRIEEKIQEEKSILQNLDLRGQSIFSTIHTYGLYVNFKNFVCNIGEDAELFMALYDPDQSTFISENYLIRWGSNGMPKEIEKLNNLQAVFTDLSSMDLIRPRVSLVCQIVRVGHMELKEGKKHTCGLRRPFGVAVMDITDIIHGKVDDEEKQHFIPFQQ

SEQ ID NO: 8277 - protein, 119 aa, Homo sapiens
MPEDQVGKLEATENTISAMAAAAAEQQQFYLLLGNLLSPDNVVRKQAEETYENIPGQSKITFLLQAIRNTTAAEEARQMAAVLLRRLLSSAFDEVYPALPSDVQTAIKSELLMIIQMET

SEQ ID NO: 8278 - protein, 92 aa, Homo sapiens
MSGLVLGQRDEPAGHRLSQEEILGSTRLVSQGLEALRSEHQAVLQSLSQTIECLQQGGHEEGLVHEKARQLRRSMENIELGLSEAQVMLALA

SEQ ID NO: 8279 - protein, 134 aa, Homo sapiens
MVLILGRRLNREDLGVRDSPATKRKVFEMDPKSLTGHEFFDFSSGSSHAENILQIFNEFRDSRLFTDVIICVEGKEFPCHRAVLSACSSYFRAMFCNDHRESREMLVEINGILAEAMECFLQYVYTGKVKITTE

SEQ ID NO: 8280 - protein, 103 aa, Homo sapiens; identical to SEQ ID NO: 8224

SEQ ID NO: 8281 - protein, 640 aa, Homo sapiens
MGRRSGLLGLRPGPEPVALERVINKVHLKANHVVKRDVDEHLRIKTVYDKSVEELLPEKKNLVKNKLFPQAISYLEKTFQVRRPAGTILLSRQCATNQYLRKENDPHRYCTGECAAHTKCGPVIVPEEHLQQCRVYRGGKWPHGAVGVPDQEGISDADFVLYVGALATERCSHENIISYAAYCQQEANMDRPIAGYANLCPNMISTQPQEFVGMLSTVKHEVIHALGFSAGLFAFYHDKDGNPLTSRFADGLPPFNYSLGLYQWSDKVVRKVERLWDVRDNKIVRHTVYLLVTPRVVEEARKHFDCPVLEGMELENQGGVGTELNHWEKRLLENEAMTGSHTQNRVLSRITLALMEDTGWYKANYSMAEKLDWGRGMGCDFVRKSCKFWIDQQRQKRQMLSPYCDTLRSNPLQLTCRQDQRAVAVCNLQKFPKPLPQEYQYFDELSGIPAEDLPYYGGSVEIADYCPFSQEFSWHLSGEYQRSSDCRILENQPEIFKNYGAEKYGPHSVCLIQKSAFVMEKCERKLSYPDWGSGCYQVSCSPQGLKVWVQDTSYLCSRAGQVLPVSIQMNGWIHDGNLLCPSCWDFCELCPPETDPPATNLTRALPLDLCSCSSSLVVTLWLLLGNLFPLLAGFLLCIWH

SEQ ID NO: 8282 - protein, 260 aa, Homo sapiens
MNLDSDGMDDIISQESSLDMEGNYKKAQKNERESIRQKLALGSFFDDGPGIYTSCSKSGKPSLSSRLQSGMNLQICFVNDSGSDKDSDADDSKTETSLDTPLSPMSKQSSSYSDRDTTEEESESLDDMDFLTRQKKLQAEAKMALAMAKPMAKMQVEVEKQNRKKSPVADLLPHMPHISECLMKRSLKPTDLRDMTIGQLQVIVNDLHSQIESLNEELVQLLLIRDELHTEQDAMLVDIEDLTRHAESQQKHMAEKMPAK

SEQ ID NO: 8283 - protein, 210 aa, Homo sapiens; identical to SEQ ID NO: 6033

SEQ ID NO: 8284 - protein, 126 aa, Homo sapiens
MNQRSHLGTTYLDTAKGAVETFMKLRARDPASRGDRYMLVTFEEPPYAIKAGWKENHATFMNELKNLQAEGLTTLGQSLRTAFDLLNLNRLVTGIDNYGQGRNPFFLEPAIIITITDGSKLTTTSG

SEQ ID NO: 8285 - protein, 395 aa, Homo sapiens
MANDPLEGFHEVNLASPTSPDLLGVYESGTQEQTTSPSVIYRPHPSALSSVPIQANALDVSELPTQPVYSSPRRLNCAEISSISFHVTDPAPCSTSGVTAGLTKLTTRKDNYNAEREFLQGATITEACDGSDDIFGLSTDSLSRLRSPSVLEVREKGYERLKEELAKAQRELKLKDEECERLSKVRDQLGQELEELTASLFEEAHKMVREANIKQATAEKQLKEAQGKIDVLQAEVAALKTLVLSSSPTSPTQEPLPGGKTPFKKGHTRNKSTSSAMSGSHQDLSVIQPIVKDCKEADLSLYNEFRLWKDEPTMDRTCPFLDKIYQEDIFPCLTFSKSELASAVLEAVENNTLSIEPVGLQPIRFVKASAVECGGPKSLLYVTFLHTFDTFSRDS

SEQ ID NO: 8286 - protein, 261 aa, Homo sapiens; identical to SEQ ID NO: 5727

SEQ ID NO: 8287 - protein, 427 aa, Homo sapiens
MVCWQDLEESLRMKLSLTKVVNGCRLGKIKNLGKTGDHTMDIPGCLLYTKTGSAPHLTHHTLHNIHGVPAMAQLTLSSLAEHHEVLTEYKEGVGKFIGMPESLLYCSLHDPVSPCPAGYVTNKSVSVWSVAGRVEMTVSKFMAIQKALQPDWFQCLSDGEVSCKEATSIKRVRKSVDRSLLFLDNCLRLQEESEVLQKSVIIGVIEGGDVMEERLRSARETAKRPVGGFLLDGFQGNPTTLEARLRLLSSVTAELPEDKPRLISGVSRPDEVLECIERGVDLFESFFPYQVTERGCALTFSFDYQPNPEETLLQQNGTQEEIKCMDQIKKIETTGCNQEITSFEINLKEKKYQEDFNPLVRGCSCYCCKNHTRAYIHHLLVTNELLAGVLLMMHNFEHYFGFFHYIREALKSDKLAQLKELIHRQAS

SEQ ID NO: 8288 - protein, 130 aa, Homo sapiens
MNQRSHLGTTYLDTAKGAVETFMKLRARDPASRGDRYMLVTFEEPPYAIKAGWKENHATFMNELKNLQAEGLTTLGQSLRTAFDLLNLNRLVTGIDNYGQGRNPFFLEPAIIITITDGSKLTTTSGVQDE

SEQ ID NO: 8289 - protein, 138 aa, Homo sapiens
MNPASAPPPLPPPGQQVIHVTQDLDTDLEALFNSVMNPKPSSWRKKILPESFFKEPDSGSHSRQSSTDSSGGHPGPRLAGGAQHVRSHSSPASLQLGTGAGAAGSPAQQHAHLRQQSYDVTDELPLPPGWEMTFTATG

SEQ ID NO: 8290 - protein, 563 aa, Homo sapiens
MRLEELKRLQNPLEQVNDGKYSFENHQLAMDAENNIEKYPLNLQPLESKVKIIQRAWREYLQRQEPLGKRSPSPPSVSSEKLSSSVSMNTFSDSSTPDYREDGMDLGSDAGSSSSSSRASSQSNSTKVTPCSECKSSSSPGGSLDLVSALEDYEEPFPVYQKKVIDEWAPEEDGEEEEEEDERDQRGYRDDRSPAREPGDVSARTRSGGGGGRSATTAMPPPVPNGNLHQHDPQDLRHNGNVVVAGRPSCSRGPRRAIQKPQPAGGRRSGRGPAAGGLCLQPPDGGTCVPEEPPVPPMDWEALEKHLAGLQFREQEVRNQGQARTNSTSAQKNERESIRQKLALGSFFDDGPGIYTSCSKSGKPSLSSRLQSGMNLQICFVNDSGSDKDSDADDSKTETSLDTPLSPMSKQSSSYSDRDTTEEESESLDDMDFLTRQKKLQAEAKMALAMAKPMAKMQVEVEKQNRKKSPVADLLPHMPHISECLMKRSLKPTDLRDMTIGQLQVIVNDLHSQIESLNEELVQLLLIRDELHTEQDAMLVDIEDLTRHAESQQKHMAEKMPAK

SEQ ID NO: 8291 - protein, 75 aa, Homo sapiens
MPEDQVGKLEATENTISAMAAAAAEQQQFYLLLGNLLSPDNVVRKQAEETYENIPGQSKITFLLQAIRNTTAAEE

SEQ ID NO: 8292 - protein, 903 aa, Homo sapiens; identical to SEQ ID NO: 5646

SEQ ID NO: 8293 - protein, 173 aa, Homo sapiens
MPRKGTQPSTARRREEGPPPPSPDGASSDAEPEPPSGRTESPATAAETASEELDNRSLEEILNSIPPPPPPAMTNEAGAPRLMITHIVNQNFKSYAGEKILGPFHKRFSCIIGPNGSGKSNVIDSMLFVFGYRAQKIRSKKLSVLIHNSDEHKDIQSCTVEVHFQKIIDKEGD

SEQ ID NO: 8294 - protein, 753 aa, Homo sapiens
MYSPIIYQALCEHVQTQMSLMNDLTSKNIPNGIPAVPCHAPSHSESQATPHSSYGLCTSTPVWSLQRPPCPPKVHSEVQTDGNSQFASQGKTVSATCTDVLRNSFNTSPGVPCSLPKTDISAIPTLQQLGLVNGILPQQGIHKETDLLKCIQTYLSLFRSHGKETHLDSQTHRSPTQSQPAFLATNEEKCAREQIREATSERKDLNIHVRDTKTVKDVQKAKNVNKTAEKVRIIKYLLGELKALVAEQEDSEIQRLITEMEACISVLPTVSGNTDIQVEIALAMQPLRSENAQLRRQLRILNQQLREQQKTQKPSGAVDCNLELFSLQSLNMSLQNQLEESLKSQELLQSKNEELLKVIENQKDENKKFSSIFKDKDQTILENKQQYDIEITRIKIELEEALVNVKSSQFKLETAEKENQILGITLRQRDAEVTRLRELTRTLQTSMAKLLSDLSVDSARCKPGNNLTKSLLNIHDKQLQHDPAPAHTSIMSYLNKLETNYSFTHSEPLSTIKNEETIEPDKTYENVLSSRGPQNSNTRGMEEASAPGIISALSKQDSDEGSETMALIEDEHNLDNTIYIPFARSTPEKKSPLSKRLSPQPQIRAATTQLVSNSGLAVSGKENKLCTPVICSSSTKEAEDAPEKLSRASDMKDTQLLKKIKEAIGKIPAATKEPEEQTACHGPSGCLSNSLQVKGNTVCDGSVFTSDLMSDWSISSFSTFTSRDEQDFRNGLAALDANIARLQKSLRTGLLEK

SEQ ID NO: 8295 - protein, 72 aa, Homo sapiens; identical to SEQ ID NO: 8264

SEQ ID NO: 8296 - protein, 195 aa, Homo sapiens
MWHMTRNWPLVGKTSLITRFMYDSFDNTYQATIGIDFLSKTMYLEDRTVRLQLWDTAGQERFRSLIPSYIRDSTVAVVVYDITNLNSFQQTSKWIDDVRTERGSDVIIMLVGNKTDLADKRQITIEEGEQRAKELSVMFIETSAKTGYNVKQLFRRVASALPGMENVQEKSKEGMIDIKLDKPQEPPASEGGCSC

SEQ ID NO: 8297 - protein, 348 aa, Homo sapiens; identical to SEQ ID NO: 6454

SEQ ID NO: 8298 - protein, 953 aa, Homo sapiens
MKRGIRRDPFRKRKLGGRAKKVREPTAVNSFYREASLPSVWASLRRREMVRSGARPGQVLSSGRHTGPAKLTNGKKATYLRKIPRFNADSGYSIHSDSESQAETVHGLDGCASLLRDILRNEDSGSETAYLENRSNSRPLESKRYGSKKKRHEKHTIPLVVQKETSSSDNKKQIPNEASARSERDTSDLEQNWSLQDHYRMYSPIIYQALCEHVQTQMSLMNDLTSKNIPNGIPAVPCHAPSHSESQATPHSSYGLCTSTPVWSLQRPPCPPKVHSEVQTDGNSQFASQGKTVSATCTDVLRNSFNTSPGVPCSLPKTDISAIPTLQQLGLVNGILPQQGIHKETDLLKCIQTYLSLFRSHGKETHLDSQTHRSPTQSQPAFLATNEEKCAREQIREATSERKDLNIHVRDTKTVKDVQKAKNVNKTAEKVRIIKYLLGELKALVAEQEDSEIQRLITEMEACISVLPTVSGNTDIQVEIALAMQPLRSENAQLRRQLRILNQQLREQQKTQKPSGAVDCNLELFSLQSLNMSLQNQLEESLKSQELLQSKNEELLKVIENQKDENKKFSSIFKDKDQTILENKQQYDIEITRIKIELEEALVNVKSSQFKLETAEKENQILGITLRQRDAEVTRLRELTRTLQTSMAKLLSDLSVDSARCKPGNNLTKSLLNIHDKQLQHDPAPAHTSIMSYLNKLETNYSFTHSEPLSTIKNEETIEPDKTYENVLSSRGPQNSNTRGMEEASAPGIISALSKQDSDEGSETMALIEDEHNLDNTIYIPFARSTPEKKSPLSKRLSPQPQIRAATTQLVSNSGLAVSGKENKLCTPVICSSSTKEAEDAPEKLSRASDMKDTQLLKKIKEAIGKIPAATKEPEEQTACHGPSGCLSNSLQVKGNTVCDGSVFTSDLMSDWSISSFSTFTSRDEQDFRNGLAALDANIARLQKSLRTGLLEK

SEQ ID NO: 8299 - protein, 560 aa, Homo sapiens; identical to SEQ ID NO: 7400

SEQ ID NO: 8300 - protein, 50 aa, Homo sapiens
MPEDQVGKLEATENTISAMAAAAAEQQQFYLLLGNLLSPDNVVRKQAEVT

SEQ ID NO: 8301 - protein, 95 aa, Homo sapiens
MAIGKRLATLPTKEQKTQRLISELSLLNHKLPARVWLPTAGFDHHVVRVPHTQAVVLNSKDKAPYLIYVEVLECENFDTTSVPARIPENRIRSTR

SEQ ID NO: 8302 - protein, 419 aa, Homo sapiens
MAGSGCAWGAEPPRFLEAFGRLWQVQSRLGSGSSASVYRVRCCGNPGSPPGALKQFLPPGTTGAAASAAEYGFRKERAALEQLQGHRNIVTLYGVFTIHFSPNVPSRCLLLELLDVSVSELLLYSSHQGCSMWMIQHCARDVLEALAFLHHEGYVHADLKPRNILWSAENECFKLIDFGLSFKEGNQDVKYIQTDGYRAPEAELQNCLAQAGLQSDTECTSAVDLWSLGIILLEMFSGMKLKHTVRSQEWKANSSAIIDHIFASKAVVNAAIPAYHLRDLIKSMLHDDPSRRIPAEMALCSPFFSIPFAPHIEDLVMLPTPVLRLLNVLDDDYLENEEEYEDVVEDVKEECQKYGPVVSLLVPKENPGRGQVFVEYANAGDSKAAQKLLTGRMFDGKFVVATFYPLSAYKRGYLYQTLL

SEQ ID NO: 8303 - protein, 423 aa, Homo sapiens
MPRKGTQPSTARRREEGPPPPSPDGASSDAEPEPPSGRTESPATAAETASEELDNRSLEEILNSIPPPPPPAMTNEAGAPRLMITHIVNQNFKSYAGEKILGPFHKRFSCIIGPNGSGKSNVIDSMLFVFGYRAQKIRSKKLSVLIHNSDEHKDIQSCTVEVHFQKIIDKEGDDYEVIPNSNFYVSRTACRDNTSVYHISGKKKTFKDVGNLLRSHGIDLDHNRFLILQGEVEQIAMMKPKGQTEHDEGMLEYLEDIIGCGRLNEPIKVLCRRVEILNEHRGEKLNRVKMVEKEKDALEGEKNIAIEFLTLENEIFRKKNHVCQYYIYELQKRIAEMETQKEKIHEDTKEINEKSNILSNEMKAKNKDVKDTEKKLNKITKFIEENKEKFTQLDLEDVQVREKLKHATSKAKKLEKQLQKDKE

SEQ ID NO: 8304 - protein, 370 aa, Homo sapiens
MEEGVPCPAPAAKLTPPVKKSQDMHDERSKLVNEYACRVLELLGMGHRLFVPRLLATSKEDLLQADFEGALKFFRVQLPKRYRAEENARRLMEQACNIKVPTKKLKKYEKEYQTMRESQLQQEDPMDRYKRENRRLQEASMRLEQENDDLAHELVTSKIALRNDLDQAEDKADVLNKELLLTKQRLVETEEEKRKQEEETAQLKEVFRKQLEKAEYEIKKTTAIIAEYKQICSQLSTRLEKQQAASKEELEVVKGKMMACKHCSDIFSKEGALKLAATGREDQGIETDDEKDSLKKQLREMELELAQTKLQLVEAKCKIQELEHQRGALMNEIQAAKNSWFSKTLNSIKTATGTQPLQPAPVTQPPKEST

SEQ ID NO: 8305 - protein, 753 aa, Homo sapiens; identical to SEQ ID NO: 8294

SEQ ID NO: 8306 - protein, 688 aa, Homo sapiens; identical to SEQ ID NO: 5926

SEQ ID NO: 8307 - protein, 180 aa, Homo sapiens
MPRKGTQPSTARRREEGPPPPSPDGASSDAEPEPPSGRTESPATAAETASEELDNRSLEEILNSIPPPPPPAMTNEAGAPRLMITHIVNQNFKSYAGEKILGPFHKRFSCIIGPNGSGKSNVIDSMLFVFGYRAQKIRSKKLSVLIHNSDEHKDIQSCTVEVHFQKIIDKEGDDYEVIPN

SEQ ID NO: 8308 - protein, 1561 aa, Homo sapiens
MPGEAARAELLLPEADRPGAADLSCDAAAATTILGGDRREPCALTPGPSHLALTFLPSKPGARPQPEGASWDAGPGGAPSAWADPGEGGPSPMLLPEGLSSQALSTEAPLPATLEPRIVMGEETCQALLSPRAARTALRDQEGGHASPDPPPELCSQGDLSVPSPPPDPDSFFTPPSTPTKTTYALLPACGPHGDARDSEAELRDELLDSPPASPSGSYITADGDSWASSPSCSLSLLAPAEGLDFPSGWGLSPQGSMVDERELHPAGTPEPPSSESSLSADSSSSWGQEGHFFDLDFLANDPMIPAALLPFQGSLIFQVEAVEVTPLSPEEEEEEAVADPDPGGDLAGEGEEDSTSASFLQSLSDLSITEGMDEAFAFRDDTSAASSDSDSASYAEADDERLYSGEPHAQATLLQDSVQKTEEESGGGAKGLQAQDGTVSWAVEAAPQTSDRGAYLSQRQELISEVTEEGLALGQESTATVTPHTLQVAPGLQVEVATRVTPQAGEEETDSTAGQESAAMAMPQPSQEGISEILGQESVTAEKLPTPQEETSLTLCPDSPQNLKEEGGLDLPSGRKPVAAATIVPRQAKEDLTLPQDSAMTPPLPLQDTDLSSAPKPVAAATIVSQQAEEGLTLPQDSVMTPPLPLQDTELSSAPKPVAAATLVSQQAEEGLTLPQDSAMTPPLPLQDTDLSSAPKPVAAATLVSQQAEEGLTLPQDSAMTPPLPLQDTDLSSAPKPVAAATLVSQQAEEGLTLPQDSAMTPPLPLQDTDLSSAPKPVAAATIVSQQAEEGLTLPQDSAMTPPLPLQDTDLSSAPKPVAAATIVSQQAEEGLTLPQDSAMTPPLPLQDTDLSSAPKPVAAATPVSQQAEEGLTLPQDSAMTPPLPLQDTDLSSAPKPVAAATPVSQQAEEGLTLPQDSAMTAPLPLQDTGPTSGPEPLAVATPQTLQAEAGCAPGTEPVATMAQQEVGEALGPRPAPEEKNAALPTVPEPAALDQVQQDDPQPAAEAGTPWAAQEDADSTLGMEALSLPEPASGAGEEIAEALSRPGREACLEARAHTGDGAKPDSPQKETLEVENQQEGGLKPLAQEHGPRSALGGAREVPDAPPAACPEVSQARLLSPAREERGLSGKSTPEPTLPSAVATEASLDSCPESSVGAVSSLDRGCPDAPAPTSAPTSQQPEPVLGLGSVEQPHEVPSVLGTPLLQPPENLAKGQPSTPVDRPLGPDPSAPGTLAGAALPPLEPPAPCLCQDPQEDSVEDEEPPGSLGLPPPQAGVQPAAAAVSGTTQPLGTGPRVSLSPHSPLLSPKVASMDAKDLALQILPPCQVPPPSGPQSPAGPQGLSAPEQQEDEDSLEEDSPRALGSGQHSDSHGESSAELDEQDILAPQTVQCPAQAPAGGSEETIAKAKQSRSEKKARKAMSKLGLRQIQGVTRITIQKSKNILFVIAKPDVFKSPASDTYVVFGEAKIEDLSQQVHKAAAEKFKVPSEPSALVPESAPRPRVRLECKEEEEEEEEEVDEAGLELRDIELVMAQANVSRAKAVRALRDNHSDIVNAIMELTM

SEQ ID NO: 8309 - protein, 1097 aa, Homo sapiens; identical to SEQ ID NO: 5938

SEQ ID NO: 8310 - protein, 336 aa, Homo sapiens
MKATAMTSAWLAQGGAHVTINARAEEDVEPECIMEKVAKASGANYSFHKESGRFQDVGPQAPVGSVYQKTNAVSEIKRVGKDSFWAKAEKEEENRRLEEKRRAEEAQRQLEQERRERELREAARREQRYQEQGGEASPQSRTWEQQQEVVSRNRNEQESAVHPREIFKQKERAMSTTSISSPQPGKLRSPFLQKQLTQPETHFGREPAAAISRPRADLPAEEPAPSTPPCLVQAEEEAVYEEPPEQETFYEQPPLVQQQGAGSEHIDHHIQGQGLSGQGLCARALYDYQAADDTEISFDPENLITGIEVIDEGWWRGYGPDGHFGMFPANYVELIE

SEQ ID NO: 8311 - protein, 25 aa, Homo sapiens
MWMHVAKVHPKGGEMVGAIRNAAFL

SEQ ID NO: 8312 - protein, 103 aa, Homo sapiens; identical to SEQ ID NO: 8224

SEQ ID NO: 8313 - protein, 1365 aa, Homo sapiens
MADTDLFMECEEEELEPWQKISDVIEDSVVEDYNSVDKTTTAGNPLVQQGGQPLILTQNPAPGLGTMVTQPVLRPVQVMQNANHVTSSPVASQPIFITTQGFPVRNVRPVQNAMNQVGIVLNVQQGQTVRPITLVPAPGTQFVKPTVGVPQVFSQMTPVRPGSTMPVRPTTNTFTTVIPATLTIRSTVPQSQSQQTKSTPSTSTTPTATQPTSLGQLAVQSPGQSNQTTNPKLAPSFPSPPAVSIASFVTVKRPGVTGENSNEVAKLVNTLNTIPSLGQSPGPVVVSNNSSAHGSQRTSGPESSMKVTSSIPVFDLQDGGRKICPRCNAQFRVTEALRGHMCYCCPEMVEYQKKGKSLDSEPSVPSAAKPPSPEKTAPVASTPSSTPIPALSPPTKVPEPNENVGDAVQTKLIMLVDDFYYGRDGGKVAQLTNFPKVATSFRCPHCTKRLKNNIRFMNHMKHHVELDQQNGEVDGHTICQHCYRQFSTPFQLQCHLENVHSPYESTTKCKICEWAFESEPLFLQHMKDTHKPGEMPYVCQPYFPSYVTQVCQYRSSLYSEVDVHFRMIHEDTRHLLCPYCLKVFKNGNAFQQHYMRHQKRNVYHCNKCRLQFLFAKDKIEHKLQHHKTFRKPKQLEGLKPGTKVTIRASRGQAAVPVSSNDTPPSALQEAAPLTSSMDPLPVFLYPPVQRSIQKRAVRKMSVMGRQTCLECSFEIPDFPNHFPTYVHCSLCRYSTCCSRAYANHMINNHVPRKSPKYLALFKNSVSGIKLACTSCTFVTSVGDAMAKHLVFNPSHRSSSILPRGLTWIAHSRHGQTRDRVHDRNVKNMYPPPSFPTNKAATVKSAGATPAEPEELLTPLAPALPSPASTATPPPTPTHPQALALPPLATEGAECLNVDDQDEGSPVTQEPELASGGGGSGGVGKKEQLSVKKLRVVLFALCCNTEQAAEHFRNPQRRIRRWLRRFQASQGENLEGKYLSFEAEEKLAEWVLTQREQQLPVNEETLFQKATKIGRSLEGGFKISYEWAVRFMLRHHLTPHARRAVAHTLPKDVAENAGLFIDFVQRQIHNQDLPLSMIVAIDEISLFLDTEVLSSDDRKENALQTVGTGEPWCDVVLAILADGTVLPTLVFYRGQMDQPANMPDSILLEAKESGYSDDEIMELWSTRVWQKHTACQRSKGMLVMDCHRTHLSEEVLAMLSASSTLPAVVPAGCSSKIQPLDVCIKRTVKNFLHKKWKEQAREMADTACDSDVLLQLVLVWLGEVLGVIGDCPELVQRSFLVASVLPGPDGNINSPTRNADMQEELIASLEEQLKLSGEHSESSTPRPRSSPEETIEPESLHQLFEGESETESFYGFEEADLDLMEI

SEQ ID NO: 8314 - protein, 187 aa, Homo sapiens
MDISKGLPGMQGGLHIWISENRKMVPVPEGAYGNFFEEHCYVILHVPQSPKATQGASSDLHYWVGKQAGAEAQGAAEAFQQRLQDELGGQTVLHREAQGHESDCFCSYFRPGIIYRKGGLASDLKHVETNLFNIQRLLHIKGRKHVSATEVELSWNSFNKGDIFLLDLGKMMIQWNGPKTSISEKAR

SEQ ID NO: 8315 - protein, 442 aa, Homo sapiens
MPLENLEEEGLPKNPDLRIAQLRFLLSLPEHRGDAAVRDELMAAVRDNNFWNRIRQEQTEDCPPSSPSRGWHCQDWPSRKPPTSIRLCFAKPIIKRHRMPSYMAPYYEALCKSLDWQIDVDLLNKMKKANEDELKRLDEELEDAEKNLGESEIRDAMMAKAEYLCRIGDKEGALTAFRKTYDKTVALGHRLDIVFYLLRIGLFYMDNDLITRNTEKAKSLIEEGGDWDRRNRLKVYQGLYCVAIRDFKQAAELFLDTVSTFTSYELMDYKTFVTYTVYVSMIALERPDLREKVIKGAEILEVLHSLPAVRQYLFSLYECRYSVFFQSLAVVEQEMKKDWLFAPHYRYYVREMRIHAYSQLLESYRSLTLGYMAEAFGVGVEFIDQELSRFIAAGRLHCKIDKVNEIVETNRPDSKNWQYQETIKKGDLLLNRVQKLSRVINM

SEQ ID NO: 8316 - protein, 110 aa, Homo sapiens
MLCWGNASFGQLGLGGIDEEIVLEPRKSDFFINKRVRDVGCGLRHTVFVLDDGTVYTCGCNDLGQLGHEKSRKKPEFRSCFPGRSAMAPSRLTATSASQVQAILLPQPPE

SEQ ID NO: 8317 - protein, 309 aa, Homo sapiens
MVCWQSVSVWSVAGRVEMTVSKFMAIQKALQPDWFQCLSDGEVSCKEATSIKRVRKSVDRSLLFLDNCLRLQEESEVLQKSVIIGVIEGGDVMEERLRSARETAKRPVGGFLLDGFQGNPTTLEARLRLLSSVTAELPEDKPRLISGVSRPDEVLECIERGVDLFESFFPYQVTERGCALTFSFDYQPNPEETLLQQNGTQEEIKCMDQIKKIETTGCNQEITSFEINLKEKKYQEDFNPLVRGCSCYCCKNHTRAYIHHLLVTNELLAGVLLMMHNFEHYFGFFHYIREALKSDKLAQLKELIHRQAS

SEQ ID NO: 8318 - protein, 127 aa, Homo sapiens
MVLILGRRLNREDLGVRDSPATKRKVFEMDPKSLTGHEFFDFSSGSSHAENILQIFNEFRDSRLFTDVIICVEGKEFPCHRAVLSACSSYFRAMFCNDHRESREMLVEINGILAEAMECFLQYVYTG

SEQ ID NO: 8319 - protein, 526 aa, Homo sapiens; identical to SEQ ID NO: 7502

SEQ ID NO: 8320 - protein, 64 aa, Homo sapiens
MPEDQVGKLEATENTISAMAAAAAEQQQFYLLLGNLLSPDNVVRKQAEETYENIPGQSKITFLL

SEQ ID NO: 8321 - protein, 246 aa, Homo sapiens; identical to SEQ ID NO: 5244

SEQ ID NO: 8322 - protein, 431 aa, Homo sapiens
MAANLSRNGPALQEAYVRVVTEKSPTDWALFTYEGNSNDIRVAGTGEGGLEEMVEELNSGKVMYAFCRVKDPNSGLPKFVLINWTGEGVNDVRKGACASHVSTMASFLKGAHVTINARAEEDVEPECIMEKVAKASGANYSFHKESGRFQDVGPQAPVGSVYQKTNAVSEIKRVGKDSFWAKAEKEEENRRLEEKRRAEEAQRQLEQERRERELREAARREQRYQEQGGEASPQSRTWEQQQEVVSRNRNEQESAVHPREIFKQKERAMSTTSISSPQPGKLRSPFLQKQLTQPETHFGREPAAAISRPRADLPAEEPAPSTPPCLVQAEEEAVYEEPPEQETFYEQPPLVQQQGAGSEHIDHHIQGQGLSGQGLCARALYDYQAADDTEISFDPENLITGIEVIDEGWWRGYGPDGHFGMFPANYVELIE

SEQ ID NO: 8323 - protein, 617 aa, Homo sapiens
MIEKMQGSRMDEQRCSFPPPLKTEEDYIPYPSVHEVLGREGPFPLILLPQFGGYWIEGTNHEITSIPETEPLQSPTTKVKLECNPTARIYRKHFLGKEHFNYYSLDAALGHLVFSLKYDVIGDQEHLRLLLRTKCRTYHDVIPISCLTEFPNVVQMAKLVCEDVNVDRFYPVLYPKASRLIVTFDEHVISNNFKFGVIYQKLGQTSEEELFSTNEESPAFVEFLEFLGQKVKLQDFKGFRGGLDVTHGQTGTESVYCNFRNKEIMFHVSTKLPYTEGDAQQLQRKRHIGNDIVAVVFQDENTPFVPDMIASNFLHAYVVVQAEGGGPDGPLYKVSVTARDDVPFFGPPLPDPAVFRKGPEFQEFLLTKLINAEYACYKAEKFAKLEERTRAALLETLYEELHIHSQSMMGLGGDEDKMENGSGGGGFFESFKRVIRSRSQSMDAMGLSNKKPNTVSTSHSGSFAPNNPDLAKAAGISLLIPGKSASRFGRRGSAIGIGTVEEVVVRGAAGSGGCLHALFSARSQDGGHIGDVAPLPPGQAPGRAGWSGGSSDGTQHLLWGLVPVPEPVPLTRGFWPCLGPWDPGPVPARIRYPKALHPAARPPISPVCMERHPSPLP

SEQ ID NO: 8324 - protein, 407 aa, Homo sapiens
MGNTSFNEVMEAQLPSHGGPKPSAESDMGTRRDYIMAKYVEHRFARRCTPEPQRLWTAICNRDLLSVLEAFANGQDFGQPLPGPDAQAPEELVLHLAVKVANQASLPLVDFIIQNGGHLDAKAADGNTALHYAALYNQPDCLKLLLKGRALVGTVNEAGETALDIARKKHHKECEELLEQAQAGTFAFPLHVDYSWVISTEPGSDSEEDEEEKRCLLKLPAQAHWASGRLDISNKTYETVASLGAATPQGESEDCPPPLPVKNSSRTLVQGCARHASGDRSEVSSLSSEAPETPESLGSPASSSSLMSPLEPGDPSQAPPNSEEGLREPPGTSRPSLTSGTTPSEMYLPVRFSSESTRSYRRGARSPEDGPSARQPLPRRNVPVGITEGDGSRTGSLPASSVQLLQD

SEQ ID NO: 8325 - protein, 270 aa, Homo sapiens
MAMEMRLPVARKPLSERLGRDTKKHLVVPGDTITTDTGFMRGHGTYMGEEKLIASVAGSVERVNKLICVKALKTRYIGEVGDIVVGRITEVQQKRWKVETNSRLDSVLLLSSMNLPGGELRRRSAEDELAMRGFLQEGDLISLGQGVLVQVSPSLVKRQKTHFHDLPCGASVILGNNGFIWIYPTPEHKEEEAGGFIANLEPVSLADREVISRLRNCIISLVTQRMMLYDTSILYCYEASLPHQIKDILKPEIMEEIVMETRQRLLEQEG

SEQ ID NO: 8326 - protein, 98 aa, Homo sapiens
MPEDQVGKLEATENTISAMAAAAAEQQQFYLLLGNLLSPDNVVRKQAEETYENIPGQSKITFLLQAIRNTTAAEEARQMAAVLLRRLLSSAFDEVYPA

SEQ ID NO: 8327 - protein, 101 aa, Homo sapiens
MDEVEQDQHEARLKELFDSFDTTGTGSLGQEELTDLCHMLSLEEVAPVLQQTLLQDNLLGRVHFDQFKEALILILSRTLSNEEHFQEPDCSLEAQPKYVRG

SEQ ID NO: 8328 - protein, 354 aa, Homo sapiens
MAHSPVAVQVPGMQNNIADPEELFTKLERIGKGSFGEVFKGIDNRTQQVVAIKIIDLEEAEDEIEDIQQEITVLSQCDSSYVTKYYGSYLKGSKLWIIMEYLGGGSALDLLRAGPFDEFQIATMLKEILKGLDYLHSEKKIHRDIKAANVLLSEQGDVKLADFGVAGQLTDTQIKRNTFVGTPFWMAPEVIQQSAYDSKRPTAKELLKHKFIVKNSKKTSYLTELIDRFKRWKAEGHSDDESDSEGSDSESTSRENNTHPEWSFTTVRKKPDPKKVQNGAEQDLVQTLSCLSMIITPAFAELKQQDENNASRNQAIEELEKSIAVAEAACPGITDKMVKKLIEKFQKCSADESP

SEQ ID NO: 8329 - protein, 173 aa, Homo sapiens; identical to SEQ ID NO: 8293

SEQ ID NO: 8330 - protein, 266 aa, Homo sapiens
  VARIANT 1: note = X can be any amino acid
XPRAAARVRAAGEALERRRRWLGRLSPSAPRPRRARPSLRRASAWVRDRVAGRPGALPGFQASGVAGEAQKAPGHPAAPAPAASCLTEADGRVFLHAFRLALIQLQISSIKSDNVTRACSFIREAATQGAKIVSLPECFNSPYGAKYFPEYAEKIPGESTQKLSEVAKECSIYLIGGSIPEEDAGKLYNTCAVFGPDGTLLAKYRKIHLFDIDVPGKITFQESKTLSPGDSFSTFDTPYCRVGLGICYDMRFAELAQIYAQRGEAV

SEQ ID NO: 8331 - protein, 71 aa, Homo sapiens
MDSLPDEFFVRHPAVEDQRKEETENKLEKSSGQLNKQENDIPTDLVPVNLLLEVKKLLNAINTLPKGVVPH

SEQ ID NO: 8332 - protein, 708 aa, Homo sapiens
MSVESEQLTGVPLDDSAITPMCEVTGGRSYSVCSPRMLNQCLESLVQKVQSGVVINFEKAGPDPSPVEDGQPDISRPFGSQPWHSCHKLIYVRPNPKTGVPIGHWPVPESFWPDQNSPTLPAASHPVVKFSCTDCEPMVIDKLPFDKYELEPSPLTQFILERKSPQTCWQVYVSNSAKYSELGHPFGYLKASTALNCVNLFVMPYNYPVLLPLLDDLFKVHKAKPTLKWRQSFESYLKTMPPYYLGPLKKAVRMMGAPNLIADSMEYGLSYSVISYLKKLSQQAKIESDRVIGSVGKKVVQETGIKVRSRSHGLSMAYRKDFQQLLQGISEDVPHRLLDLNMKEYTGFQVALLNKDLKPQTFRNAYDIPRRNLLDHLTRMRSNLLKSTRRFLKGQDEDQVHSVPIAQMGNYQEYLKQVPSPLRELDPDQPRRLHTFGNPFKLDKKGMMIDEADEFVAGPQNKHKRPGEPNMQGIPKRRRCMSPLLRGRQQNPVVNNHIGGKGPPAPTTQAQPDLIKPLPLHKISETTNDSIIHDVVENHVADQLSSDITPNAMDTEFSASSPASLLERPTNHMEALGHDHLGTNDLTVGGFLENHEEPRDKEQCAEENIPASSLNKGKKLMHCRSHEEVNTELKAQIMKEIRKPGRKYERIFTLLKHVQGSLQTRLIFLQNVIKEASRFKKRMLIEQLENFLDEIHRRANQINHINSN

SEQ ID NO: 8333 - protein, 128 aa, Homo sapiens
MASSNTVLMRLVASAYSIAQKAGMIVRRVIAEGDLGIVEKTCATDLQTKADRLAQMSICSSLARKFPKLTIIGEEDLPSEEVDQELIEDSQWEEILKQPCPSQYSAIKEEDLVVWVDPLDGTKEYTEG

SEQ ID NO: 8334 - protein, 78 aa, Homo sapiens; identical to SEQ ID NO: 5107

SEQ ID NO: 8335 - protein, 56 aa, Homo sapiens
MVMEKPSPLLVGREFVRQYYTLLNKAPEYLHRFYGRNSSYVHGGVDASGKPQEAVY

SEQ ID NO: 8336 - protein, 118 aa, Homo sapiens
MKIFVGNVDGADTTPEELAALFAPYGTVMSCAVMKQFAFVHMRENAGALRAIEALHGHELRPGRALVVEMSRPRPLNTWKIFVGNVSAACTSQELRSLFERRGRVIECDVVKGGMCVG

SEQ ID NO: 8337 - protein, 145 aa, Homo sapiens
MSSPRDFRAEPVNDYEGNDSEAEDLNFRETLPSSSQENTPRSKVFENKVNSEKVKLSLRNFPHNDYEDVFEEPSESGSDPSMWTARGPFRRDRWSSEDEEAAGPSQALSPLLSVQHHGYSGPNERTTFWHGSNEGAVSLLLRYCA

SEQ ID NO: 8338 - protein, 145 aa, Homo sapiens; identical to SEQ ID NO: 6912

SEQ ID NO: 8339 - protein, 147 aa, Homo sapiens; identical to SEQ ID NO: 5687

SEQ ID NO: 8340 - protein, 99 aa, Homo sapiens
MDESALLDLLECPVCLERLDASAKVLPCQHTFCKRCLLGIVGSRNELRCPECRTLVGSGVEELPSNILLVRLLDGIKQRPWKPGPGGGSGTNCTNALRS

SEQ ID NO: 8341 - protein, 1224 aa, Homo sapiens
MALRPGAGSGGGGAAGAGAGSAGGGGFMFPVAGGIRPPQAGLMPMQQQGFPMVSVMQPNMQGIMGMNYSSQMSQGPIAMQAGIPMGPMPAAGMPYLGQAPFLGMRPPGPQYTPDMQKQFAEEQQKRFEQQQKLLEEERKRRQFEEQKQKLRLLSSVKPKTGEKSRDDALEAIKGNLDGFSRDAKMHPTPASHPKKPGVGVFPSQDPAQPRMPPWIYNESLVPDAYKKILETTMTPTGIDTAKLYPILMSSGLPRETLGQIWALANRTTPGKLTKEELYTVLAMIAVTQRGVPAMSPDALNQFPAAPIPTLSGFSMTLPTPVSQPTVIPSGPAGSMPLSLGQPVMGINLVGPVGGAAAQASSGFIPTYPANQVVKPEEDDFQDFQDASKSGSLDDSFSDFQELPASSKTSNSQHGNSAPSLLMPLPGTKALPSMDKYAVFKGIAADKSSENTVPPGDPGDKYSAFRELEQTAENKPLGESFAEFRSAGTDDGFTDFKTADSVSPLEPPTKDKTFPPSFPSGTIQQKQQTQVKNPLNLADLDMFSSVNCSSEKPLSFSAVFSTSKSVSTPQSTGSAATMTALAATKTSSLADDFGEFSLFGEYSGLAPVGEQDDFADFMAFSNSSISSEQKPDDKYDALKEEASPVPLTSNVGSTVKGGQNSTAASTKYDVFRQLSLEGSGLGVEDLKDNTPSGKSDDDFADFHSSKFSSINSDKSLGEKAVAFRHTKEDSASVKSLDLPSIGGSSVGKEDSEDALSVQFDMKLADVGGDLKHVMSDSSLDLPTVSGQHPPAADIEDLKYAAFGSYSSNFAVSTLTSYDWSDRDDATQGRKLSPFVLSAGSGSPSATSILQKKETSFGSSENITMTSLSKVTTFVSEDALPETTFPALASFKDTIPQTSEQKEYENRDYKDFTKQDLPTAERSQEATCPSPASSGASQETPNECSDDFGEFQSEKPKISKFDFLVATSQSKMKSSEEMIKSELATFDLSVQGSHKRSLSLGDKEISRSSPSPALEQPFRDRSNTLNEKPALPVIRDKYKDLTGEVEENERYAYEWQRCLGSALNVIKKANDTLNGISSSSVCTEVIQSAQGMEYLLGVVEVYRVTKRVELGIKATAVCSEKLQQLLKDIDKVWNNLIGFMSLATLTPDENSLDFSSCMLRPGIKNAQELACGVCLLNVDSRSRAFNSETDSFKLAYGGHQYHASCANFWINCVEPKPPGLVLPDLL

SEQ ID NO: 8342 - protein, 117 aa, Homo sapiens [sequence omitted]

SEQ ID NO: 8343 - protein, 206 aa, Homo sapiens; identical to SEQ ID NO: 6911

SEQ ID NO: 8344 - protein, 193 aa, Homo sapiens
MEETIKDPPTSAVLLDHCHFSQVIFNSVEKFYIPGGDVTCHYTFTQHFIPRRKDWIGIFRVGWKTTREYYTFMWVTLPIDLNNKSAKQQEVQFKAYYLPKDDEYYQFCYVDEDGVVRGASIPFQFRPENEEDILVVTTQGEVEEIEQHNKELCKENQELKDSCISLQKQNSDMQAELQKKQEELETLQSINKK

SEQ ID NO: 8345 - protein, 51 aa, Homo sapiens
MDFFSSHLLADSSSPATNSSHTDAHEILVSDFLVSDENLQKMENVLDLWSS

SEQ ID NO: 8346 - protein, 170 aa, Homo sapiens
MSSNECFKCGRSGHWARECPTGGGRGRGMRSRGRGFQFVSSSLPDICYRCGESGHLAKDCDLQEDACYNCGRGGHIAKDCKEPKREREQCCYNCGKPGHLARDCDHADEQKCYSCGEFGHIQKDCTKVKCYRCGETGHVAINCSKTSEVNCYRCGESGHLARECTIEATA

SEQ ID NO: 8347 - protein, 132 aa, Homo sapiens
MNQEDLDPDSTTDVGDVTNTEEELIRECEEMWKDMEECQNKLSLIGTETLTDSNAQLSLLIMQVKCLTAELSQWQKKTPETIPLTEDVLITLGKEEFQKLRQDLEMVLSTKESKNEKLKEDLEREQRWLDEQ

SEQ ID NO: 8348 - protein, 364 aa, Homo sapiens
MVKLFIGNLPREATEQEIRSLFEQYGKVLECDIIKNYGFVHIEDKTAAEDAIRNLHHYKLHGVNINVEASKNKSKTSTKLHVGNISPTCTNKELRAKFEEYGPVIECDIVKDYAFVHMERAEDAVEAIRGLDNTEFQGKRMHVQLSTSRLRTAPGMGDQSGCYRCGKEGHWSKECPIDRSGRVADLTEQYNEQYGAVRTPYTMSYGDSLYYNNAYGALDAYYKRCRAARSYEAVAAAAASVYNYAEQTLSQLPQVQNTAMASHLTSTSLDPYDRHLLPTSGAAATAAAAAAAAAAVTAASTSYYGRDRSPLRRATAPVPTVGEGYGYGHESELSQASAAARNSLYDMARYEREQYADRARYSAF

SEQ ID NO: 8349 - protein, 139 aa, Homo sapiens
MATGDLKRSLRNLEQVLRLLNYPEEVDCVGLIKGDPAASLPIISYSFTSYSPYVTELIMESNVELIAKNDLRFIDAVYKLLRDQFNYKPILTKKQFIQCGFAEWKIQIVCDILNCVMKKHKELSSLQKIPSQQRKKISS

SEQ ID NO: 8350 - protein, 149 aa, Homo sapiens
MANIAVQRIKREFKEVLKSEEVRFITKIWHPNISSVTGAICLDILKDQWAAAMTLRTVLLSLQALLAAAEPDDPQDAVVANQYKQNPEMFKQTARLWAHVYAGAPVSSPEYTKKIENLCAMGFDRNAVIVALSSKSWDVETATELLLSN

SEQ ID NO: 8351 - protein, 198 aa, Homo sapiens
MVMEKPSPLLVGREFVRQYYTLLNKAPEYLHRFYGRNSSYVHGGVDASGKPQEAVYGQNDIHHKVLSLNFSECHTKIRHVDAHATLSDGVVVQVMGLLSNSGQPERKFMQTFVLAPEGSVPNKFYVHNDMFRYEDEVFGDSEPELDEESEDEVEEEQEERQPSPEPVQENANSGYYEAHPVTNGIEEPLEESSHEPEP

SEQ ID NO: 8352 - protein, 49 aa, Homo sapiens
MMLGTEGGEGFVVKVRGLPWSCSADEVQRFFSDCKIQNGAQGIRFIYTR

SEQ ID NO: 8353 - protein, 421 aa, Homo sapiens; identical to SEQ ID NO: 7438

SEQ ID NO: 8354 - protein, 390 aa, Homo sapiens; identical to SEQ ID NO: 5166

SEQ ID NO: 8355 - protein, 129 aa, Homo sapiens
MKRGRLPSSSEDSDDNGSLSTTWSQNSRSQHRRSSCSRHEDRKPSEVFRTDLITAMKLHDSYQLNPDEYYVLADPWRQEWEKGVQVPVSPGTIPQPVARVVSEEKSLMFIRPKKYIVSSGSEPPELGYV

SEQ ID NO: 8356 - protein, 162 aa, Homo sapiens
MDFFSSHLLADSSSPATNSSHTDAHEILVSDFLVSDENLQKMENVLDLWSSGLKTNIISELSKWRLNFIDWHRMEMRKEKEKHAAHLKQLCNQINELKELQKTFEISIGRKDEVISSLSHAIGKQKEKIELMRTFFHWRIGHVRARQDVYEGKLADQYYQRT

SEQ ID NO: 8357 - protein, 136 aa, Homo sapiens
MIVNDYEGNDSEAEDLNFRETLPSSSQENTPRSKVFENKVNSEKVKLSLRNFPHNDYEDVFEEPSESGSDPSMWTARGPFRRDRWSSEDEEAAGPSQALSPLLSVQHHGYSGPNERTTFWHGSNEGAVSLLLRYCA

SEQ ID NO: 8358 - protein, 106 aa, Homo sapiens
MASQLQVFSPPSVSSSAFCSAKKLKIEPSGWDVSGQSSNDKYYTHSKTLPATQGQANSSHQVANFNIPAYDQGLLLPAPAVEHIVVTAADSSGSAATSTFQSSQTL

SEQ ID NO: 8359 - protein, 136 aa, Homo sapiens
MKRGRLPSSSEDSDDNGSLSTTWSQNSRSQHRRSSCSRHEDRKPSEVFRTDLITAMKLHDSYQLNPDEYYVLADPWRQEWEKGVQVPVSPGTIPQPVARVVSEEKSLMFIRPKKYIVSSGSEPPELGYVDIRTLAD

SEQ ID NO: 8360 - protein, 131 aa, Homo sapiens
MEDGTPKHIIQMTGFKMEEKEALVKLLLKLDCTFIKSEKYKNCTHLIAERLCKSEKFLAACAAGKWILTKDYIIHSAKSGRWLDETTYEWGYKIEKDSRYSPQMQSAPKRWREELKRTGAPGAFHRWKVVL

SEQ ID NO: 8361 - protein, 555 aa, Homo sapiens; identical to SEQ ID NO: 4960

SEQ ID NO: 8362 - protein, 544 aa, Homo sapiens; identical to SEQ ID NO: 5904

SEQ ID NO: 8363 - protein, 130 aa, Homo sapiens
MGRLDGKVIILTAAAQGIGQAAALAFAREGAKVIATDINESKLQELEKYPGIQTRVLDVTKKKQIDQFANEVERLDVLFNVAGFVHHGTVLDCEEKDWDFSMNLNVRSMYLMIKAFLPKMLAQKSGNIIN

SEQ ID NO: 8364 - protein, 372 aa, Homo sapiens
MQGPAGNASRGLPGGPPSTVASGAGRCESGALMHSFGIFLQGLLGVVAFSTLMLKRFREPKHERRPWRIWFLDTSKQAIGMLFIHFANVYLADLTEEDPCSLYLINFLLDATVGMLLIYVGVRAVSVLVEWQQWESLRFGEYGDPLQCGAWVGQCALYIVIMIFEKSVVFIVLLILQWKKVALLNPIENPDLKLAIVMLIVPFFVNALMFWVVDNFLMRKGKTKAKLEERGANQDSRNGSKVRYRRAASHEESESEILISADDEMEESDVEEDLRRLTPLKPVKKKKHRFGLPAGAQEAPIKKKRPPVKDEDLKGARGNLTKNQEIKSKTYQVMRECEQAGSAAPSVFSRTRTGTETVFEKPKAGPTKSVFG

SEQ ID NO: 8365 - protein, 168 aa, Homo sapiens
MMLGTEGGEGFVVKVRGLPWSCSADEVQRFFSDCKIQNGAQGIRFIYTREGRPSGEAFVELESEDEVKLALKKDRETMGHRYVEVFKSNNVEMDWVLKHTGPNSPDTANDGFVRLRGLPFGCSKEEIVQFFSGLEIVPNGITLPVDFQGRSTGEAFVQFASQEIAEKA

SEQ ID NO: 8366 - skipped

SEQ ID NO: 8367 - protein, 376 aa, Homo sapiens
MTTVVVHVDSKAELTTLLEQWEKEHGSGQDMVPILTRMSQLIEKETEEYRKGDPDPFDDRHPGRADPECMLGHLLRILFKNDDFMNALVNAYVMTSREPPLNTAACRLLLDIMPGLETAVVFQEKEGIVENLFKWAREADQPLRTYSTGLLGGAMENQDIAANYRDENSQLVAIVLRRLRELQLQEVALRQENKRPSPRKLSSEPLLPLDEEAVDMDYGDMAVDVVDGDQEEASGDMEISFHLDSGHKTSSRVNSTTKPEDGGLKKNKSAKQGDRENFRKAKQKLGFSSSDPDRMFVELSNSSWSEMSPWVIGTNYTLYPMTPAIEQRLILQYLTPLGEYQELLPIFMQLGSRELMMFYIDLKQTNDVLLTFEALK

SEQ ID NO: 8368 - protein, 167 aa, Homo sapiens
MSSNECFKCGRSGHWARECPTGGGRGRGMRSRGRGGFTSDRDICYRCGESGHLAKDCDLQEDACYNCGRGGHIAKDCKEPKREREQCCYNCGKPGHLARDCDHADEQKCYSCGEFGHIQKDCTKVKCYRCGETGHVAINCSKTSEVNCYRCGESGHLARECTIEATA

SEQ ID NO: 8369 - protein, 332 aa, Homo sapiens; identical to SEQ ID NO: 5952

SEQ ID NO: 8370 - protein, 204 aa, Homo sapiens
MSDLRITEAFLYMDYLCFRALCCKGPPPARPEYDLVCIGLTGSGKTSLLSKLCSESPDNVVSTTGFSIKAVPFQNAILNVKELGGADNIRKYWSRYYQGSQGVIFVLDSASSEDDLEAARNELHSALQHPQLCTLPFLILANHQDKPAARSVQEIKKYFELEPLARGKRWILQPCSLDDMDALKDSFSQLINLLEEKDHEAVRM

SEQ ID NO: 8371 - protein, 2111 aa, Homo sapiens
MESQEFIVLYTHQKMKKSKVWQDGILKITHLGNKAILYDDKGACLESLFLKCLEVKPGDDLESDRYLITVEEVKVAGAIGIVKQNVNKEAPELNSRTFISSGRSLGCQPSGLKRKFTGFQGPRQVPKKMVIMESGESAASHEAKKTGPTIFSPFCSMPPLFPTVGKKDVNNILADPENIVTYKNRERNAMDFSSVFSPSFQINPEVLCEENYFCSPVNSGNKLSDSLLTNEPVKRDSLASHYSGVSQNIRSKAQILALLKSESSSSCEELNSEMTEHFPQKQPQGSLKIATKPKYLIQQEECAEMKSTENLYYQHQSENTMRNKSRWAMYLSSQSSPIHSSTVDGNDTERKPKAQEDDVNSNLKDLSLQKIIQFVETYAEERKKYNVDQSVGNNDPSWNQEVKLEIPSFNESSSLQVTCSSAENDGILSESDIQEDNKIPFNQNDKGCIKGSVLIKENAQEVNTCGTLEKEYEQSESSLPELKHLQIESSNNSRISDDITDMISESKMDNESLNSIHESLSNVTQPFLEVTFNLNNFETSDTEEESQESNKISQDSESWVKDILVNDGNSCFQKRSENTNCEEIEGEHLPFLTSVSDKPTVTFPVKETLPSQFCDKTYVGFDMGICKTENTGKEIEEYSDTLSNFESFKWTDAVYGDNKEDANKPIQEVRINYDFALPPNKSKGINMNLHIPHIQNQIAENSNLFSEDAQPQPFILGSDLDKNDEHVLPSTSSSDNSVQLLNTNQNHYECIALDKSNTHISNSLFYPLGKKHLISKDTEAHISEPEDLGKIRSPPPDHVEVETAREGKQYWNPRNSSELSGLVNTISILKSLCEHSTALDSLEILKKKNTVFQQGTQQTYEPDSPPEVRKPFITVVSPKSPHLHKDSQQILKEDEVELSEPLQSVQFSSSGSKEETAFQAVIPKQIERKTCDPKPVEFQGHQVKGSATSGVMVRGHSSQLGCSQFPDSTEYENFMTETPELPSTCMQIDFLQVTSPEENISTLSPVSTFSLNSRDEDFMVEFSETSLKARTLPDDLHFLNLEGMKKSRSLENENLQRLSLLSRTQVPLITLAADGPPDLDSHSYMINSNTYESSGSPMLNLCEKSAVLSFSIEPEDQNETFFSEESREVNPGDVSLNNISTQSKWLKYQNTSQCNVATPNRVDKRITDGFFAEAVSGMHFRDTSERQSDAVNESSLDSVHLQMIKGMLYQQRQDFSSQDSVSRKKVLSLNLKQTSKTEEIKNVLGGSTCYNYSVKDLQEISGSELCFPSGQKIKSAYLPQRQIHIPAVFQSPAHYKQTFTSCLIEHLNILLFGLAQNLQKALSKVDISFYTSLKGEKLKNAENNVPSCHHSQPAKLVMVKKEGPNKGRLFYTCDGPKADRCKFFKWLEDVTPGYSTQEGARPGMVLSDIKSIGLYLRSQKIPLYEECQLLVRKGFDFQARGSQYGKLKKFTTVNPEFYNEPKTKLYLKLSARGSERSSAYSKNDLWVVSKTLDFELDTFIACSAFFGPSSINEIEILPLKGYFPSNWPTNMVVHALLVCNASTELTTLKNIQDYFNPATLPLTQYLLTTSSPTIVSNKRVSKARGSFIPPAFTNVSTKFELLSLGATLKLASELIQVHKLNKDQATALIQIAQMMASHESIEEVKELQTHTFPITIIHGVFGAGKSYLLAVVILFFVQLFEKSEAPTIGNARPWKLLISSSTNVAVDRVLLGLLSLGFENFIRVGSVRKIAKPILPYSLHAGSENESEQLKELHALMKEDLTPTERVYVARGSSIEQHKLGTNRTLLKQVRVVGVTCAACPFPCMNDLKFPVVVLDECSQITEPASLLPIARFECEKLILVGDPKQLPPTIQGSDAAHENGLEQTLFDRLCLMGHKPILLRTQYRCHPAISAIANDLFYKGALMNGVTEIERSPLLEWLPTLCFYNVKGLEQIERDNSFHNVAEATFTLKLIQSLIASGIAGSMIGVITLYKSQMYKLCHLLSAVDFHHPDIKTVQVSTVDAFQGAEKEIIILSCVRTRQVGFIDSEKRMNVALTRGKRHLLIVGNLACLRKNQLWGRVIQHCEGREDGLQHANQYEPQLNHLLKDYFEKQVEEKQKKKSEKEKSKDKSHS

SEQ ID NO: 8372 - protein, 188 aa, Homo sapiens
MAATAREDGASGQERGQRGCEHYDRGCLLKAPCCDKLYTCRLCHDNNEDHQLDRFKVKEVQCINCEKIQHAQQTCEECSTLFGEYYCDICHLFDKDKKQYHCENCGICRIGPKEDFFHCLKCNLCLAMNLQGRHKCIENVSRQNCPICLEDIHTSRVVAHVLPCGHLLHRTCYEEMLKEYDQVLETAG

SEQ ID NO: 8373 - protein, 112 aa, Homo sapiens
MATGDLKRSLRNLEQVLRLLNYPEEVDCVGLIKGDPAASLPIISYSFTSYSPYVTELIMESNVELIAKNDLRFIDAVYKLLRDQFNYKPILTKKQFIQCGFAEWKIQIVCDI

SEQ ID NO: 8374 - protein, 120 aa, Homo sapiens
MWKVVNLPTDLFNSVMNVGRFTEEIEWLKFLALACSALGVTITKTLKIVCEVLSCDHNGGLPRIPFSTFQFLYTYIAEVDGEICASHVSRMLNYIEQEVIGPDGLITVNDFTQNPRVWLE

SEQ ID NO: 8375 - protein, 829 aa, Homo sapiens
MAKYNTGGNPTEDVSVNSRPFRVTGPNSSSGIQARKNLFNNQGNASPPAGPSNVPKFGSPKPPVAVKPSSEEKPDKEPKPPFLKPTGAGQRFGTPASLTTRDPEAKVGFLKPVGPKPINLPKEDSKPTFPWPPGNKPSLHSVNQDHDLKPLGPKSGPTPPTSENEQKQAFPKLTGVKGKFMSASQDLEPKPLFPKPAFGQKPPLSTENSHEDESPMKNVSSSKGSPAPLGVRSKSGPLKPAREDSENKDHAGEISSLPFPGVVLKPAASRGGPGLSKNGEEKKEDRKIDAAKNTFQSKINQEELASGTPPARFPKAPSKLTVGGPWGQSQEKEKGDKNSATPKQKPLPPLFTLGPPPPKPNRPPNVDLTKFHKTSSGNSTSKGQTSYSTTSLPPPPPSHPASQPPLPASHPSQPPVPSLPPRNIKPPFDLKSPVNEDNQDGVTHSDGAGNLDEEQDSEGETYEDIEASKEREKKREKEEKKRLELEKKEQKEKEKKEQEIKKKFKLTGPIQVIHLAKACCDVKGGKNELSFKQGEQIEIIRITDNPEGKWLGRTARGSYGYIKTTAVEIDYDSLKLKKDSLGAPSRPIEDDQEVYDDVAEQDDISSHSQSGSGGIFPPPPDDDIYDGIEEEDADDGSTLQVQEKSNTWSWGILKMLKGKDDRKKSIREKPKVSDSDNNEGSSFPAPPKQLDMGDEVYDDVDTSDFPVSSAEMSQGTNVGKAKTEEKDLKKLKKQEKEEKDFRKKFKYDGEIRVLYSTKVTTSITSKKWGTRDLQVKPGESLEVIQTTDDTKVLCRNEEGKYGYVLRSYLADNDGEIYDDIADGCIYDND

SEQ ID NO: 8376 - protein, 264 aa, Homo sapiens
MPDSAPAMADKMDMSLDDIIKLNRSQRGGRGGGRGRGRAGSQGGRGGGAQAAARVNRGGGPIRNRPAIARGAAGGGGRNRPAPYSRPKQLPDKWQHDLFDSGFGGGAGVETGGKLLVSNLDFGVSDADIQELFAEFGTLKKAAVHYDRSGRSLGTADVHFERKADALKAMKQYNGVPLDGRPMNIQLVTSQIDAQRRPAQSVNRGGMTRNRGAGGFGGGGGTRRGTRGGARGRGRGAGRNSKQQLSAEELDAQLDAYNARMDTS

SEQ ID NO: 8377 - protein, 103 aa, Homo sapiens
MAKHGADEPSSRSGSPDREGRASEDRSLLHQRLAVRELIDTEVSYLHMLQLCASDIRSRLQQLPQGDLDVLFSNIDDIIKVNSRFLHDLQETASKEEEQVQLV

SEQ ID NO: 8378 - protein, 212 aa, Homo sapiens
MMLGTEGGEGFVVKVRGLPWSCSADEVQRFFSDCKIQNGAQGIRFIYTREGRPSGEAFVELESEDEVKLALKKDRETMGHRYVEVFKSNNVEMDWVLKHTGPNSPDTANDGFVRLRGLPFGCSKEEIVQFFSGLEIVPNGITLPVDFQGRSTGEAFVQFASQEIAEKALKKHKERIGHRYIEIFKSSRAEVRTHYDPPRKLMAMQRPGPYDR

SEQ ID NO: 8379 - protein, 339 aa, Homo sapiens; identical to SEQ ID NO: 5550

SEQ ID NO: 8380 - protein, 1070 aa, Homo sapiens
MAGALRRGRALGSRPSGPTVSSRRSPQCPVAQEGLGARSRPRVAPRSLARCGPSSRLMGWKPSEARGQSQSFQASGLQPRSLKAARRATGRPDRSRAARPTMDPSAHRSRAAPPNMDPDPQAGVQVGMRVVRGVDWKWGQQDGGEGGVGTVVELGRHGSPSTPDRTVVVQWDQGTRTNYRAGYQGAHDLLLYDNAQIGVRHPNIICDCCKKHGLRGMRWKCRVCLDYDLCTQCYMHNKHELAHAFDRYETAHSRPVTLSPRQGLPRIPLRGIFQGAKVVRGPDWEWGSQDGGEGKPGRVVDIRGWDVETGRSVASVTWADGTTNVYRVGHKGKVDLKCVGEAAGGFYYKDHLPRLGKPAELQRRVSADSQPFQHGDKVKCLLDTDVLREMQEGHGGWNPRMAEFIGQTGTVHRITDRGDVRVQFNHETRWTFHPGALTKHHSFWVGDVVRVIGDLDTVKRLQAGHGEWTDDMAPALGRVGKVVKVFGDGNLRVAVAGQRWTFSPSCLVAYRPEEDANLDVAERARENKSSLSVALDKLRAQKSDPEHPGRLVVEVALGNAARALDLLRRRPEQVDTKNQGRTALQVAAYLGQVELIRLLLQARAGVDLPDDEGNTALHYAALGNQPEATRVLLSAGCRADAINSTQSTALHVAVQRGFLEVVRALCERGCDVNLPDAHSDTPLHSAISAGTGASGIVEVLTEVPNIDVTATNSQGFTLLHHASLKGHALAVRKILARARQLVDAKKEDGFTALHLAALNNHREVAQILIREGRCDVNVRNRKLQSPLHLAVQQAHVGLVPLLVDAGCSVNAEDEEGDTALHVALQRHQLLPLVADGAGGDPGPLQLLSRLQASGLPGSAELTVGAAVACFLALEGADVSYTNHRGRSPLDLAAEGRVLKALQGCAQRFRERQAGGGAAPGPRQTLGTPNTVTNLHVGAAPGPEAAECLVCSELALLVLFSPCQHRTVCEECARRMKKCIRCQVVVSKKLRPDGSEVASAAPAPGPPRQLVEELQSRYRQMEERITCPICIDSHIRLVFQCGHGACAPCGSALSACPICRQPIRDRIQIFV

SEQ ID NO: 8381 - protein, 318 aa, Homo sapiens; identical to SEQ ID NO: 8117

SEQ ID NO: 8382 - protein, 347 aa, Homo sapiens; identical to SEQ ID NO: 5517

SEQ ID NO: 8383 - protein, 35 aa, Homo sapiens
MPQTFSGGRGFELDSGSDDMDPGRPRPPRDPDELH

SEQ ID NO: 8384 - protein, 392 aa, Homo sapiens; identical to SEQ ID NO: 6910

SEQ ID NO: 8385 - protein, 683 aa, Homo sapiens; identical to SEQ ID NO: 5305

SEQ ID NO: 8386 - protein, 32 aa, Homo sapiens
MDFFSSHLLADSSSPATNSSHTDAHEILVSDF

SEQ ID NO: 8387 - protein, 285 aa, Homo sapiens; identical to SEQ ID NO: 5885

SEQ ID NO: 8388 - protein, 117 aa, Homo sapiens [sequence omitted]

SEQ ID NO: 8389 - protein, 2539 aa, Homo sapiens
MEDFRGIAEESFPSFLTNSLFGNSGILENVTLSSNLGLPVAVSTLARDRSSTDNRYPDIQASYLVEGRFSVPSGSSPGSQSDAEPRERLQLSFQDDDSISRKKSYVESQRLSNALSKQSALQMETAGPEEEPAGATESLQGQDLFNRASPLEQAQDSPIDFHLQSWMNNKEPKIVVLDAGKHFEDKTLKSDLSHTSLLENEKLILPTSLEDSSDDDIDDEMFYDDHLEAYFEQLAIPGMIYEDLEGPEPPEKGFKLPTNGLRQANENGSLNCKFQSENNSSLISLDSHSSETTHKESEESQVICLPGTSNSIGTGDSRRYTDGMLPFSSGTWGTEKEIENLKGIVPDLNSECASKDVLVKTLRAIDVKLNSDNFHDANANRGGFDLTDPVKQGAECPHQNKTVLHMDGCLDTETPTVSIQENVDVASLKPISDSGINFTDAIWSPTCERRTCECHESIEKNKDKTDLPQSVVYQNEEGRWVTDLAYYTSFNSKQNLNVSLSDEMNEDFRSGSEAFDLIAQDEEEFNKEHQFIQEENIDAHNTSVALGDTSWGATINYSLLRKSRSTSDLDKDDASYLRLSLGEFFAQRSEALGCLGGGNNVKRPSFGYFIRSPEKREPIALIRKSDVSRGNLEKEMAHLNHDLYSGDLNEQSQAQLSEGSITLQVEAVESTSQVDENDVTLTADKGKTEDTFFMSNKPQRYKDKLPDSGDSMLRISTIASAIAEASVNTDPSQLAAMIKALSNKTRDKTFQEDEKQKDYSHVRHFLPNDLEKSNGSNALDMEKYLKKTEVSRYESALENFSRASMSDTWDLSLPKEQTTQDIHPVDLSATSVSVRAPEENTAAIVYVENGESENQESFRTINSSNSVTNRENNSAVVDVKTCSIDNKLQDVGNDEKATSISTPSDSYSSVRNPRITSLCLLKDCEEIRDNRENQRQNECVSEISNSEKHVTFENHRIVSPKNSDLKNTSPEHGGRGSEDEQESFRPSTSPLSHSSPSEISGTSSSGCALESFGSAAQQQQPPCEQELSPLVCSPAGVSRLTYVSEPESSYPTTATDDALEDRKSDITSELSTTIIQGSPAALEERAMEKLREKVPFQNRGKGTLSSIIQNNSDTARGSATETTSLSSKPEYVKPDFRWSKDPSSKSGNLLETSEVGWTSNPEELDPIRLALLGKSGLSCQVGSATSHPVSCQEPIDEDQRISPKDKSTAGREFSGQVSHQTTSENQCTPIPSSTVHSSVADMQNMPAAVHALLTQPSLSAAPFAQRYLGTLPSTGSTTLPQCHAGNATVCGFSGGLPYPAVAGEPVQNSVAVGICLGSNIGSGWMGTSSLCNPYSNTLNQNLLSTTKPFPVPSVGTNCGIEPWDSGVTSGLGSVRVPEELKLPHACCVGIASQTLLSVLNPTDRWLQVSIGVLSISVNGEKVDLSTYRCLVFKNKAIIRPHATEEIKVLFIPSSPGVFRCTFSVASWPCSTDAETIVQAEALASTVTLTAIAESPVIEVETEKKDVLDFGDLTYGGWKALPLKLINRTHATVPIRLIINANAVAWRCFTFSKESVRAPVEVAPCADVVTRLAGPSVVNHMMPASYDGQDPEFLMIWVLFHSPKKQISSSDILDSAEEFSAKVDIEVDSPNPTPVLRSVSLRARAGIARIHAPRDLQTMHFLAKVASSRKQHLPLKNAGNIEVYLDIKVPEQGSHFSVDPKNLLLKPGEEHEVIVSFTPKDPEACEERILKIFVQPFGPQYEVVLKGEVISSGSKPLSPGPCLDIPSILSNKQFLAWGGVPLGRTQLQKLALRNNSASTTQHLRLLIRGQDQDCFQLQNTFGSEQRLTSNCEIRIHPKEDIFISVLFAPTRLSCMLARLEIKQLGNRSQPGIKFTIPLSGYGGTSNLILEGVKKLSDSYMVTVNGLVPGKESKIVFSVRNTGSRAAFVKAVGFKDSQKKVLLDPKVLRIFPDKFVLKERTQENVTLIYNPSDRGINNKTATELSTVYLFGGDEISRQQYRRALLHKPEMIKQILPEHSVLQNINFVEAFQDELLVTEVYDLPQRPNDVQLFYGSMCKIILSVIGEFRDCISSREFLQPSSKASLESTSDLGASGKHGGNVSLDVLPVKGPQGSPLLSRAARPPLDQLASEEPWTVLPEHLILVAPSPCDMAKTGRFQIVNNSVRLLRFELCWPAHCLTVTPQHGCVAPESKLQILVSPNSSLSTKQSMFPWSGLIYIHCDDGQKKIVKVQIREDLTQVELLTRLTSKPFGILSPVSEPSVSHLVKPMTKPPSTKVEIRNKSITFPTTEPGETSESCLELENHGTTDVKWHLSSLAPPYVKGVDESGDVFRATYAAFRCSPISGLLESHGIQKVSITFLPRGRGDYAQFWDVECHPLKEPHMKHTLRFQLSGQSIEAENEPENACLSTDSLIKIDHLVKPRRQAVSEASARIPEQLDVTARGVYAPEDVYRFRPTSVGESRTLKVNLRNNSFITHSLKFLSPREPFYVKHSKYSLRAQHYINMPVQFKPKSAGKFEALLVIQTDEGKSIAIRLIGEALGKN

SEQ ID NO: 8390 - protein, 29 aa, Homo sapiens
MLCWGNASFGQLGLGGIDEEIVLEPRKSD

SEQ ID NO: 8391 - protein, 21 aa, Homo sapiens
MAKYNTGGNPTEDVSVNSRPF

SEQ ID NO: 8392 - protein, 86 aa, Homo sapiens
MEADIITNLRCRLKEAEEERLKAAQYGLQLVESQNELQNQLDKCRNEMMTMTESYEQEKYTLQREVELKSRMLESLSCECEAIKQQ

SEQ ID NO: 8393 - protein, 660 aa, Homo sapiens
MVTSLNEDNESVTVEWIENGDTKGKEIDLESIFSLNPDLVPDEEIEPSPETPPPPASSAKVNKIVKNRRTVASIKNDPPSRDNRVVGSARARPSQFPEQSSSAQQNARRKSNCVKEVEKLQEKREKRRLQQQELREKRAQDVDATNPNYEIMCMIRDFRGSLDYRPLTTADPIDEHRICVCVRKRPLNKKETQMKDLDVITIPSKDVVMVHEPKQKVDLTRYLENQTFRFDYAFDDSAPNEMVYRFTARPLVETIFERGMATCFAYGQTGSGKTHTMGGDFSGKNQDCSKGIYALAARDVFLMLKKPNYKKLELQVYATFFEIYSGKVFDLLNRKTKLRVLEDGKQQVQVVGLQEREVKCVEDVLKLIDIGNSCRTSGQTSANAHSSRSHAVFQIILRRKGKLHGKFSLIDLAGNERGADTSSADRQTRLEGAEINKSLLALKECIRALGRNKPHTPFRASKLTQVLRDSFIGENSRTCMIATISPGMASCENTLNTLRYANRVKELTVDPTAAGDVRPIMHHPPNQIDDLETQWGVGSSPQRDDLKLLCEQNEEEVSPQLFTFHEAVSQMVEMEEQVVEDHRAVFQESIRWLEDEKALLEMTEEVDYDVDSYATQLEAILEQKIDILTELRDKVKSFRAALQEEEQASKQINPKRPRAL

SEQ ID NO: 8394 - protein, 68 aa, Homo sapiens
MSSPRDFRAEPVNDYEGNDSEAEDLNFRETLPSSSQENTPRSKVFENKVNSEKVKLSLRNFPHNDYED

SEQ ID NO: 8395 - protein, 97 aa, Homo sapiens
MNGRADFREPNAEVPRPIPHIGPDYIPTEEERRVFAECNDESFWFRSVPLAATSMLITQGLISKGILSSHPKYGSIPKLILACIMGYFAGKLSYVKT

SEQ ID NO: 8396 - protein, 102 aa, Homo sapiens
MVMEKPSPLLVGREFVRQYYTLLNKAPEYLHRFYGRNSSYVHGGVDASGKPQEAVYGQNDIHHKVLSLNFSECHTKIRHVDAHATLSDGVVVQVMGLLSNSG

SEQ ID NO: 8397 - protein, 198 aa, Homo sapiens
MGTTCLHLGTLEQSLVFENKVNSEKVKLSLRNFPHNDYEDVFEEPSESGSDPSMWTARGPFRRDRWSSEDEEAAGPSQALSPLLSDTRKIVSEGELDQLAQIRPLIFNFHEQTAIKDCLKILEEKTAAYDIMQEFMALELKNLPGEFNSGNQPSNREKNRYRDILPFQHHGYSGPNERTTFWHGSNEGAVSLLLRYCA

SEQ ID NO: 8398 - protein, 127 aa, Homo sapiens; identical to SEQ ID NO: 5428

SEQ ID NO: 8399 - protein, 141 aa, Homo sapiens
MVMEKPSPLLVGREFVRQYYTLLNKAPEYLHRFYGRNSSYVHGGVDASGKPQEAVYGQNDIHHKVLSLNFSECHTKIRHVDAHATLSDGVVVQVMGLLSNSGQPERKFMQTFVLAPEGSVPNKFYVHNDMFRYEDEVFGDS

SEQ ID NO: 8400 - protein, 44 aa, Homo sapiens
MLLLDCNPEVDGLKHLLETGASVNAPPDPCKQSPVHLAAGSGLA

SEQ ID NO: 8401 - protein, 132 aa, Homo sapiens
MKRGRLPSSSEDSDDNGSLSTTWSQNSRSQHRRSSCSRHEDRKPSEVFRTDLITAMKLHDSYQLNPDEYYVLADPWRQEWEKGVQVPVSPGTIPQPVARVVSEEKSLMFIRPKKYIVSSGSEPPELGYVDIR

SEQ ID NO: 8402 - protein, 323 aa, Homo sapiens; identical to SEQ ID NO: 7049

SEQ ID NO: 8403 - protein, 103 aa, Homo sapiens
MAQTDKPTCIPPELPKMLKEFAKAAIRAQPQDLIQWGADYFEALSRGETPPVRERSERVALCNWAELTPELLKILHSQVAGRLIIRAEELAQMWKVVNLPTDL

SEQ ID NO: 8404 - protein, 179 aa, Homo sapiens
MEDGTPKHIIQMTGFKMEEKEALVKLLLKLDCTFIKSEKYKNCTHLIAERLCKSEKFLAACAAGKWILTKDYIIHSAKSGRWLDETTYEWGYKIEKDSRYSPQMQSAPKRWREELKRTGAPGAFHRWKVVLLVRTDKRSDSLIRKKFRMMKIPKPILFGLNIAMKKQTKISGKMQDFLK

SEQ ID NO: 8405 - protein, 150 aa, Homo sapiens
MEADIITNLRCRLKEAEEERLKAAQYGLQLVESQNELQNQLDKCRNEMMTMTESYEQEKYTLQREVELKSRMLESLSCECEAIKQQQKMHLEKLEEQLSRSHGQEVNELKTKIEKLKVELDEARLSEKQLKHQVDHQKELLSCKSEELRV

SEQ ID NO: 8406 - protein, 245 aa, Homo sapiens; identical to SEQ ID NO: 4951

SEQ ID NO: 8407 - protein, 59 aa, Homo sapiens
MVMEKPSPLLVGREFVRQYYTLLNKAPEYLHRFYGRNSSYVHGGVDASGKPQEAVYGQN

SEQ ID NO: 8408 - protein, 198 aa, Homo sapiens; identical to SEQ ID NO: 8397

SEQ ID NO: 8409 - protein, 154 aa, Homo sapiens
MASASARGNQDKDAHFPPPSKQSLLFCPKSKLHIHRAEISKIMRECQEESFWKRALPFSLVSMLVTQGLVYQGYLAANSRFGSLPKVALAGLLGFGLGKVSYIGVCQSKFHFFEDQLRGAGFGPQHNRHCLLTCEECKIKHGLSEKGDSQPSAS

SEQ ID NO: 8410 - protein, 839 aa, Homo sapiens; identical to SEQ ID NO: 5164

SEQ ID NO: 8411 - protein, 17 aa, Homo sapiens
MDEGMEISSEGNSLIKA

SEQ ID NO: 8412 - protein, 797 aa, Homo sapiens
MGVSRLMDLLADSREVIRNDGVLLLQALTRSNGAIQKIVAFENAFERLLDIISEEGNSDGGIVVEDCLILLQNLLKNNNSNQNFFKEGSYIQRMKPWFEVGDENSGWSAQKVTNLHLMLQLVRVLVSPTNPPGATSSCQKAMFQCGLLQQLCTILMATGVPADILTETINTVSEVIRGCQVNQDYFASVNAPSNPPRPAIVVLLMSMVNERQPFVLRCAVLYCFQCFLYKNQKGQGEIVSTLLPSTIDATGNSVSAGQLLCGGLFSTDSLSNWCAAVALAHALQENATQKEQLLRVQLATSIGNPPVSLLQQCTNILSQGSKIQTRVGLLMLLCTWLSNCPIAVTHFLHNSANVPFLTGQIAENLGEEEQLVQGLCALLLGISIYFNDNSLESYMKEKLKQLIEKRIGKENFIEKLGFISKHELYSRASQKPQPNFPSPEYMIFDHEFTKLVKELEGVITKAIYKSSEEDKKEEEVKKTLEQHDNIVTHYKNMIREQDLQLEELRQQVSTLKCQNEQLQTAVTQQVSQIQQHKDQYNLLKIQLGKDNQHQGSYSEGAQMNGIQPEEIGRLREEIEELKRNQELLQSQLTEKDSMIENMKSSQTSGTNEQSSAIVSARDSEQVAELKQELATLKSQLNSQSVEITKLQTEKQELLQKTEAFAKSVEVQGETETIIATKTTDVEGRLSALLQETKELKNEIKALSEERTAIKEQLDSSNSTIAILQTEKDKLELEITDSKKEQDDLLVLLADQDQKILSLKNKLKDLGHPVEEEDELESGDQEDEDDESEDPGKDLDHI

SEQ ID NO: 8413 - protein, 146 aa, Homo sapiens
  VARIANT 1: note = X can be any amino acid
XRHLRATPNTRGSARLLCAEMPKKAGATTKGKSQSKEPERPLPPLGPVAVDPKGCVTIAIHAKPGSKQNAVTDLTAEAVNVAIAAPPSEGEANAELCRYLSKVLELRKSDVVLDKKLRDLLKIVPCKLATRTQILGLLVECSFSRL

SEQ ID NO: 8414 - protein, 80 aa, Homo sapiens
MNGRADFREPNAEVPRPIPHIGPDYIPTEEERRVFAECNDESFWFRSVPLAATSMLITQGLISKGILSSHPKYGSIPKLI

SEQ ID NO: 8415 - protein, 119 aa, Homo sapiens
MKRGRLPSSSEDSDDNGSLSTTWSQNSRSQHRRSSCSRHEDRKPSEVFRTDLITAMKLHDSYQLNPDEYYVLADPWRQEWEKGVQVPVSPGTIPQPVARVVSEEKSLMFIRPKKYIVSS

SEQ ID NO: 8416 - protein, 22 aa, Homo sapiens
MAKYNTGGNPTEDVSVNSRPFR

SEQ ID NO: 8417 - protein, 352 aa, Homo sapiens
MAAAVRQDLAQLMNSSGSHKDLAGKYRQILEKAIQLSGAEQLEALKAFVEAMVNENVSLVISRQLLTDFCTHLPNLPDSTAKEIYHFTLEKIQPRVISFEEQVASIRQHLASIYEKEEDWRNAAQVLVGIPLETGQKQYNVDYKLETYLKIARLYLEDDDPVQAEAYINRASLLQNESTNEQLQIHYKVCYARVLDYRRKFIEAAQRYNELSYKTIVHESERLEALKHALHCTILASAGQQRSRMLATLFKDERCQQLAAYGILEKMYLDRIIRGNQLQEFAAMLMPHQKATTADGSSILDRAVIEHNLLSASKLYNNITFEELGALLEIPAAKHEKPCQRGISRSNHFVSK

SEQ ID NO: 8418 - protein, 125 aa, Homo sapiens
MVMEKPSPLLVGREFVRQYYTLLNKAPEYLHRFYGRNSSYVHGGVDASGKPQEAVYGQNDIHHKVLSLNFSECHTKIRHVDAHATLSDGVVVQVMGLLSNSGQPERKFMQTFVLAPEGSVPNKFY

SEQ ID NO: 8419 - protein, 218 aa, Homo sapiens
MNGRADFREPNAEVPRPIPPVPLAATSMLITQGLISKGILSSHPKYGSIPKLILACIMGYFAGKLSYVKTCQEKFKKLENSPLGEALRSGQARRSSPPGHYYQKSKYDSSVSGQSSFVTSPAADNIEMLPHYEPIPFSSSMNESAPTGITDHIVQGPDPNLEESPKRKNITYEELRNKNRESYEVSLTQKTDPSVRPMHERVPKKEVKVNKYGDTWDE

SEQ ID NO: 8420 - protein, 80 aa, Homo sapiens; identical to SEQ ID NO: 8414

SEQ ID NO: 8421 - protein, 217 aa, Homo sapiens
MIVNDYEGNDSEAEDLNFRETLPSSSQENTPRSKVFENKVNSEKVKLSLRNFPHNDYEDVFEEPSESGSDPSMWTARGPFRRDRWSSEDEEAAGPSQALSPLLSDTRKIVSEGELDQLAQIRPLIFNFHEQTAIKDCLKILEEKTAAYDIMQEFMALELKNLPGEFNSGNQPSNREKNRYRDILPFQHHGYSGPNERTTFWHGSNEGAVSLLLRYCA

SEQ ID NO: 8422 - protein, 116 aa, Homo sapiens
MGRLDGKVIILTAAAQGIGQAAALAFAREGAKVIATDINESKLQELEKYPGIQTRVLDVTKKKQIDQFANEVERLDVLFNVAGFVHHGTVLDCEEKDWDFSMNLNVRSMYLMIKAF

SEQ ID NO: 8423 - protein, 167 aa, Homo sapiens
MKAIKKSLTEEEYLYLDFSHQTEGCIFPLHTSVTLFLLSYCDCKIFKICLVVTKEVSRDSSLLRDDLIQDVEIQIISRQELPPIVQNCCLPAVVERSDNFCRAGLAVVLRHIIQKSYEADPLKKELLELLGFKKTCLKACAEVSQWTRLCELTIPLAIENFLRESSD

SEQ ID NO: 8424 - protein, 310 aa, Homo sapiens; identical to SEQ ID NO: 5495

SEQ ID NO: 8425 - protein, 78 aa, Homo sapiens
MVMEKPSPLLVGREFVRQYYTLLNKAPEYLHRFYGRNSSYVHGGVDASGKPQEAVYGQNDIHHKVLSLNFSECHTKIR

SEQ ID NO: 8426 - protein, 226 aa, Homo sapiens; identical to SEQ ID NO: 6419

SEQ ID NO: 8427 - protein, 339 aa, Homo sapiens; identical to SEQ ID NO: 5550

SEQ ID NO: 8428 - protein, 392 aa, Homo sapiens; identical to SEQ ID NO: 6910

SEQ ID NO: 8429 - protein, 217 aa, Homo sapiens; identical to SEQ ID NO: 8421

SEQ ID NO: 8430 - protein, 145 aa, Homo sapiens; identical to SEQ ID NO: 6912

SEQ ID NO: 8431 - protein, 68 aa, Homo sapiens; identical to SEQ ID NO: 8394

SEQ ID NO: 8432 - protein, 174 aa, Homo sapiens
MAKYNTGGNPTEDVSVNSRPFRVTGPNSSSGIQARKNLFNNQGNASPPAGPSNVPKFGSPKPPVAVKPSSEEKPDKEPKPPFLKPTGAGQRFGTPASLTTRDPEAKVGFLKPVGPKPINLPKEDSKPTFPWPPGNKPSLHSVNQDHDLKPLGPKSGPTPPTSENEQKQAFPKLT

SEQ ID NO: 8433 - protein, 134 aa, Homo sapiens
MSDDAGDTLATGDKAEVTEMPNSDSLPEDAEVHCDSAAVSHEPTPADPRGEGHENAAVQGAGAAAIGPPVQPQDANALEPPLNGDVTEDTLAECIDSVSLEAEPRSEIPLQEQNYLAVDSPPSGGGWAGWGSWG

SEQ ID NO: 8434 - protein, 143 aa, Homo sapiens
MKRGRLPSSSEDSDDNGSLSTTWSQNSRSQHRRSSCSRHEDRKPSEVFRTDLITAMKLHDSYQLNPDEYYVLADPWRQEWEKGVQVPVSPGTIPQPVARVVSEEKSLMFIRPKKYIVSSGSEPPELGYVDIRTLADSVCRYDL

SEQ ID NO: 8435 - protein, 398 aa, Homo sapiens; identical to SEQ ID NO: 6631

SEQ ID NO: 8436 - protein, 79 aa, Homo sapiens
MDESALLDLLECPVCLERLDASAKVLPCQHTFCKRCLLGIVGSRNELRCPECRTLVGSGVEELPSNILLVRLLDGIKQR

SEQ ID NO: 8437 - protein, 206 aa, Homo sapiens; identical to SEQ ID NO: 6911

SEQ ID NO: 8438 - protein, 166 aa, Homo sapiens
MKAIKKSLTEEEYLYLDFSHQTEGCIFPLHTSVTLFLLSYCDCKIFKICLVVTKEVSRDSSLLRDDLIQDVEIQIISRQELPPIVQNCCLPAVVERSDNFCRAGLAVVLRHIIQKSYEADPLKKELLELLGFKKTCLKACAEVSQWTRLCELTIPLAIENFLRESS

SEQ ID NO: 8439 - protein, 120 aa, Homo sapiens; identical to SEQ ID NO: 8374

SEQ ID NO: 8440 - protein, 116 aa, Homo sapiens
MVMEKPSPLLVGREFVRQYYTLLNKAPEYLHRFYGRNSSYVHGGVDASGKPQEAVYGQNDIHHKVLSLNFSECHTKIRHVDAHATLSDGVVVQVMGLLSNSGQPERKFMQTFVLAP

SEQ ID NO: 8441 - protein, 159 aa, Homo sapiens
MSDHRYGDGGSTFQSTTGHCVHMRGLPYRATENDIYNFFSPLNPVRVHIEIGPDGRVTGEADVEFATHEDAVAAMSKDKANMQHRYVELFLNSTAGASGGAYGSQMLGGMGLSNQSSYGGPASQQLSGGYGGGYGGQSSMSGYDQVLQENSSDFQSNIA

SEQ ID NO: 8442 - protein, 136 aa, Homo sapiens; identical to SEQ ID NO: 8357

SEQ ID NO: 8443 - protein, 153 aa, Homo sapiens
MKLTSEKLPKNPFYASVSQYAAKNQKFFQWKKEKTDYTHANLVDKALQLLKERILKGDTLAYFLRGQLYFEEGWYEEALEQFEEIKEKDHQATYQLGVMYYDGLGTTLDAEKGVDYMKKILDSPCPKARHLKFAAAYNLGRAYYEGKGVKRSN

SEQ ID NO: 8444 - protein, 162 aa, Homo sapiens
MEALLEGIQNRGHGGGFLTSCEAELQELMKQIDIMVAHKKSEWEGRTHALETCLKIREQELKSLRSQLDVTHKEVGMLHQQVEEHEKIKQEMTMEYKQELKKLHEELCILKRSYEKLQKKQMREFRGNTKNHREDRSEIERLTAKIEEFRQKSLDWEKQRLI

SEQ ID NO: 8445 - protein, 509 aa, Homo sapiens; identical to SEQ ID NO: 7262

SEQ ID NO: 8446 - protein, 29 aa, Homo sapiens
MNGRADFREPNAEVPRPIPHIGPDYIPTE

SEQ ID NO: 8447 - protein, 411 aa, Homo sapiens
MIVNDYEGNDSEAEDLNFRETLPSSSQENTPRSKVFENKVNSEKVKLSLRNFPHNDYEDVFEEPSESGSDPSMWTARGPFRRDRWSSEDEEAAGPSQALSPLLSDTRKIVSEGELDQLAQIRPLIFNFHEQTAIKDCLKILEEKTAAYDIMQEFMALELKNLPGEFNSGNQPSNREKNRYRDILPYDSTRVPLGKSKDYINASYIRIVNCGEEYFYIATQGPLLSTIDDFWQMVLENNSNVIAMITREIEGGIIKCYHYWPISLKKPLELKHFRVFLENYQILQYFIIRMFQVVEKSTGTSHSVKQLQFTKWPDHGTPASADSFIKYIRYARKSHLTGPMVVHCSAGIGRTGVFLCVDVVFCAIVKNCSFNIMDIVAQMREQRSGMVQTKEQYHFCYDIVLEVLRKLLTLD

SEQ ID NO: 8448 - protein, 99 aa, Homo sapiens
MVMEKPSPLLVGREFVRQYYTLLNKAPEYLHRFYGRNSSYVHGGVDASGKPQEAVYGQNDIHHKVLSLNFSECHTKIRHVDAHATLSDGVVVQVMGLLS

SEQ ID NO: 8449 - protein, 234 aa, Homo sapiens
MASSAKSAEMPTISKTVNPTPDPHQEYLDPRITIALFEIGSHSPSSWGSLPFLKNSSHQVTEQQTAQKFNNLLKEIKDILKNMAGFEEKITEAKELFEETNITEDVSAHKENIRGLDKINEMLSTNLPVSLAPEKEDNEKKQEMILETNITEDVSAHKENIRGLDKINEMLSTNLPVSLAPEKEDNEKKQQMIMENQNSENTAQVFARDLVNRLEEKKVLNETQQSQEKAKNRL

SEQ ID NO: 8450 - protein, 364 aa, Homo sapiens
MYFCWGADSRELQRRRTAGSPGAELLQAASGERHSLLLLTNHRVLSCGDNSRGQLGRRGAQRGELPEPIQALETLIVDLVSCGKEHSLAVCHKGRVFAWGAGSEGQLGIGEFKEISFTPKKIMTLNDIKIIQVSCGHYHSLALSKDSQVFSWGKNSHGQLGLGKEFPSQASPQRVRSLEGIPLAQVAAGGAHSFALSLCGTSFGWGSNSAGQLALSGRNVPVQSNKPLSVGALKNLGVVYISCGDAHTAVLTQDGKVFTFGDNRSGQLGYSPTPEKRGPQLVERIDGLVSQIDCGSYHTLAYVHTTGQVVSFGHGPSDTSKPTHPEALTENFDISCLISAEDFVDVQVKHIFAGTYANFVTTHQ

SEQ ID NO: 8451 - protein, 115 aa, Homo sapiens
MAKYNTGGNPTEDVSVNSRPFRVTGPNSSSGIQARKNLFNNQGNASPPAGPSNVPKFGSPKPPVAVKPSSEEKPDKEPKPPFLKPTGAGQRFGTPASLTTRDPEAKVGFLKPVGP

SEQ ID NO: 8452 - protein, 161 aa, Homo sapiens
MAGILRLVVQWPPGRLQTVTKGVESLICTDWIRHKFTRSRIPEKVFQASPEDHEKYGGDPQNPHKLHIVTRIKSTRRRPYWEKDIIKMLGLEKAHTPQVHKNIPSVNAKLKVVKHLIRIKPLKLPQGLPAEENMSNTCLKSTGELVVQWHLKPVEQKAHES

SEQ ID NO: 8453 - protein, 171 aa, Homo sapiens
MNGRADFREPNAEVPRPIPHIGPDYIPTEEERRVFAECNDESFWFRSVPLAATSMLITQGLISKGILSSHPKYGSIPKLILACIMGYFAGKLSYVKTCQEKFKKLENSPLGEALRSGQARRSSPPGHYYQKSKYDSSVSGQSSFVTSPAADNIEMLPHYEPIPFSSSMNES

SEQ ID NO: 8454 - protein, 145 aa, Homo sapiens; identical to SEQ ID NO: 8337

SEQ ID NO: 8455 - protein, 80 aa, Homo sapiens
MVTSLNEDNESVTVEWIENGDTKGKEIDLESIFSLNPDLVPDEEIEPSPETPPPPASSAKVNKIVKNRRTVASIKNDPPS

SEQ ID NO: 8456 - protein, 40 aa, Homo sapiens
MKAIKKSLTEEEYLYLDFSHQTEGCIFPLHTSVTLFLLSY

SEQ ID NO: 8457 - protein, 63 aa, Homo sapiens
MEALLEGIQNRGHGGGFLTSCEAELQELMKQIDIMVAHKKSEWEGRTHALETCLKIREQELKS

SEQ ID NO: 8458 - protein, 197 aa, Homo sapiens
MWTARGPFRRDRWSSEDEEAAGPSQALSPLLSDTRKIVSEGELDQLAQIRPLIFNFHEQTAIKDCLKILEEKTAAYDIMQEFMTGTSHSVKQLQFTKWPDHGTPASADSFIKYIRYARKSHLTGPMVVHCSAGIGRTGVFLCVDVVFCAIVKNCSFNIMDIVAQMREQRSGMVQTKEQYHFCYDIVLEVLRKLLTLD

SEQ ID NO: 8459 - protein, 842 aa, Homo sapiens; identical to SEQ ID NO: 4738

SEQ ID NO: 8460 - protein, 829 aa, Homo sapiens; identical to SEQ ID NO: 8375

SEQ ID NO: 8461 - protein, 269 aa, Homo sapiens
MIVNDYEGNDSEAEDLNFRETLPSSSQENTPRSKVFENKVNSEKVKLSLRNFPHNDYEDVFEEPSESGSDPSMWTARGPFRRDRWSSEDEEAAGPSQALSPLLSDTRKIVSEGELDQLAQIRPLIFNFHEQTAIKDCLKILEEKTAAYDIMQEFMTGTSHSVKQLQFTKWPDHGTPASADSFIKYIRYARKSHLTGPMVVHCSAGIGRTGVFLCVDVVFCAIVKNCSFNIMDIVAQMREQRSGMVQTKEQYHFCYDIVLEVLRKLLTLD

SEQ ID NO: 8462 - protein, 163 aa, Homo sapiens
MMLGTEGGEGFVVKVRGLPWSCSADEVQRFFSDCKIQNGAQGIRFIYTREGRPSGEAFVELESEDEVKLALKKDRETMGHRYVEVFKSNNVEMDWVLKHTGPNSPDTANDGFVRLRGLPFGCSKEEIVQFFSGLEIVPNGITLPVDFQGRSTGEAFVQFASQE

SEQ ID NO: 8463 - protein, 252 aa, Homo sapiens
MAATAREDGASGQERGQRGCEHYDRGCLLKAPCCDKLYTCRLCHDNNEDHQLDRFKVKEVQCINCEKIQHAQQTCEECSTLFGEYYCDICHLFDKDKKQYHCENCGICRIGPKEDFFHCLKCNLCLAMNLQGRHKCIENVSRQNCPICLEDIHTSRVVAHVLPCGHLLHRGYRCPLCMHSALDMTRYWRQLDDEVAQTPMPSEYQNMTVDILCNDCNGRSTVQFHILGMKCKICESYNTAQAGGRRISLDQQ

SEQ ID NO: 8464 - protein, 197 aa, Homo sapiens; identical to SEQ ID NO: 8458

SEQ ID NO: 8465 - protein, 1400 aa, Homo sapiens
  VARIANT 1: note = X can be any amino acid
XPPPPPPPMWNPMIPAFDLFQGNHGFVAPVVTTAAHWRSVNYTFPPSVISHTSPTKVWRNKDGTSAYQVQETPVSQVVRKKTSYVGLVLVLLRGLPGSGKSFLARTLQEDNPSGVILSTDDYFYINGQYQFDVKYLGEAHEWNQNRAKEAFEKKISPIIIDNTNLQAWEMKPYVALSQKHKYKVLFREPDTWWKFKPKELARRNIHGVSKEKITRMLEHYQRFVSVPIIMSSSVPEKIERIELCAYSCEDRSTSPRDDEDIISEKEENILSLSLKHLEFTEEKNLDVTKETMLPENVAYLSNADLNKRRKEISDMNPSIQSALILETPHMYFSDSESKLQATDKSENEQIEMVAVKGYSKTDTDSSMERVSPSTCCSENNQEDCDLANSGPLQNEKSSPGEIVEERATVTKKAFGKQKSKSTLEKFPRHELSNFVGDWPVDKTIGQRTKRNRKTEKTSSVQSDKKYNYPQSHKLVNSVSVNTDCVQQRGSPHESVEDGRKSQCDDASEPLNSYKYDAYKNIDKNSFNIMGDWPSSDSLAQREHRSRMPKTGLSEPNLEIGTNDKMNEISLSTAHEACWGTSSQKLKTLGSSNLGSSEMLLSEMTCESQTCLSKKSHGQHTSLPLTFTNSAPTVSGVVEPQTLAECQEQMPKRDPGKEVGMCTQTEPQDFALLWKIEKNKISISDSIKVLTGRLDGFKPKVFNINTKSDVQEAIPYRVMYDKSTFVEESELTSADESENLNILCKLFGSFSLEALKDLYERCNKDIIWATSLLLDSETKLCEDTEFENFQKSCDGSQIGPFSLGLNLKEIISQRGTLENSNSPVPEFSHGIGISNADSQSTCDAERGNSEQAEMRAVTPENHESMTSIFPSAAVGLKNNNDILPNSQEELLYSSKQSFPGILKATTPKDMSETEKNLVVTETGDNIHSPSHFSDIFNFVSSTSNLELNEEIYFTDSLEIKRNENFPKDYVKFSDEEEFMNEDEKEMKEILMAGSSLSAGVSGEDKTEILNPTPAMAKSLTIDCLELALPPELAFQLNELFGPVGIDSGSLTVEDCVVHIDLNLAKVIHEKWKESVMERQRQEEVSCGKFMQDPSLVGHTGLDNPEQKSSQRTGKKLLKTLTASEMLPLLDHWNTQTKKVSLREIMSEEIALQEKHNLKRETLMFEKDCATKLKEKQLFKIFPAINQNFLVDIFKDHNYSLEHTVQFLNCVLEGDPVKTVVAQEFVHQNENVTSHTGQKSKEKKDFEYPDYDDYRAEAFLHQQKRMECYSKAKEAYRIGKKNVATFYAQQGTLHEQKMKEANHLAAIEIFEKVNASLLPQNVLDLHGLHVDEALEHLMRVLEKKTEEFKQNGGKPYLSVITGRGNHSQGGVARIKPAVIKYLISHSFRFSEIKPGCLKVMLK

SEQ ID NO: 8466 - protein, 78 aa, Homo sapiens
MLCWGYWSLGQPGISTNLQGIVAEPQVCGFISDRSVKEVACGGNHSVFLLEDGEVYTCGLNTKGQLGHEREGNKPEQI

SEQ ID NO: 8467 - protein, 245 aa, Homo sapiens; identical to SEQ ID NO: 4951

SEQ ID NO: 8468 - protein, 703 aa, Homo sapiens; identical to SEQ ID NO: 5656

SEQ ID NO: 8469 - protein, 190 aa, Homo sapiens
MAGTARHDREMAIQAKKKLTTATDPIERLRLQCLARGSAGIKGLGRVFRIMDDDNNRTLDFKEFMKGLNDYAVVMEKEEVEELFRRFDKDGNGTIDFNEFLLTLRPPMSRARKEVIMQAFRKLDKTGDGVITIEDLREVYNAKHHPKYQNGEWSEEQVFRKFLDNFDSPYDKDGLVTPEEFMNYYAGVSA

SEQ ID NO: 8470 - protein, 76 aa, Homo sapiens
MTPPQQPPPLRSEPGTLGSAASSYSPLGLNGVPGSIWDFVSGSFSPSPSPILSAGPPSSSSASPNGAELARVRRQL

SEQ ID NO: 8471 - protein, 35 aa, Homo sapiens
MATLVVNKLGAGVDSGRQGSRGTAVVKVLECGVCE

SEQ ID NO: 8472 - protein, 158 aa, Homo sapiens
MEADIITNLRCRLKEAEEERLKAAQYGLQLVESQNELQNQLDKCRNEMMTMTESYEQEKYTLQREVELKSRMLESLSCECEAIKQQQKMHLEKLEEQLSRSHGQEVNELKTKIEKLKVELDEARLSEKQLKHQVDHQKELLSCKSEELRVMSERVQES

SEQ ID NO: 8473 - protein, 130 aa, Homo sapiens
MAQTDKPTCIPPELPKMLKEFAKAAIRAQPQDLIQWGADYFEALSRGETPPVRERSERVALCNWAELTPELLKILHSQVAGRLIIRAEELAQMWKVVNLPTDLFNSVMNVGRFTEEIEWLKFLALACSAL

SEQ ID NO: 8474 - protein, 230 aa, Homo sapiens
MEADIITNLRCRLKEAEEERLKAAQYGLQLVESQNELQNQLDKCRNEMMTMTESYEQEKYTLQREVELKSRMLESLSCECEAIKQQQKMHLEKLEEQLSRSHGQEVNELKTKIEKLKVELDEARLSEKQLKHQVDHQKELLSCKSEELRVMSERVQESMSSEMLALQIELTEMESMKTTLKEEVNELQYRQEQLELLITNLMRQVDRLKEEKEEREKEAVSYYNALEKAR

SEQ ID NO: 8475 - protein, 212 aa, Homo sapiens; identical to SEQ ID NO: 4821

SEQ ID NO: 8476 - protein, 947 aa, Homo sapiens
MNFLRGVMGGQSAGPQHTEAETVRGAADPKVTSSCGLKFRHSFRLVKHILYHVTINVYSDSEIIGYALDTLYNIISNEEEEEVEENSTRQSEDLGSQFTEIFIKQQENVTLLLSLLEEFDFHVRWPGVKLLTSLLKQLGPQVQQIILVSPMGVSRLMDLLADSREVIRNDGVLLLQALTRSNGAIQKIVAFENAFERLLDIISEEGNSDGGIVVEDCLILLQNLLKNNNSNQNFFKEGSYIQRMKPWFEVGDENSGWSAQKVTNLHLMLQLVRVLVSPTNPPGATSSCQKAMFQCGLLQQLCTILMATGVPADILTETINTVSEVIRGCQVNQDYFASVNAPSNPPRPAIVVLLMSMVNERQPFVLRCAVLYCFQCFLYKNQKGQGEIVSTLLPSTIDATGNSVSAGQLLCGGLFSTDSLSNWCAAVALAHALQENATQKEQLLRVQLATSIGNPPVSLLQQCTNILSQGSKIQTRVGLLMLLCTWLSNCPIAVTHFLHNSANVPFLTGQIAENLGEEEQLVQGLCALLLGISIYFNDNSLESYMKEKLKQLIEKRIGKENFIEKLGFISKHELYSRASQKPQPNFPSPEYMIFDHEFTKLVKELEGVITKAIYKSSEEDKKEEEVKKTLEQHDNIVTHYKNMIREQDLQLEELRQQVSTLKCQNEQLQTAVTQQVSQIQQHKDQYNLLKIQLGKDNQHQGSYSEGAQMNGIQPEEIGRLREEIEELKRNQELLQSQLTEKDSMIENMKSSQTSGTNEQSSAIVSARDSEQVAELKQELATLKSQLNSQSVEITKLQTEKQELLQKTEAFAKSVEVQGETETIIATKTTDVEGRLSALLQETKELKNEIKALSEERTAIKEQLDSSNSTIAILQTEKDKLELEITDSKKEQDDLLVLLADQDQKILSLKNKLKDLGHPVEEEDELESGDQEDEDDESEDPGKDLDHI

SEQ ID NO: 8477 - protein, 364 aa, Homo sapiens; identical to SEQ ID NO: 8348

SEQ ID NO: 8478 - protein, 411 aa, Homo sapiens; identical to SEQ ID NO: 8447

SEQ ID NO: 8479 - protein, 269 aa, Homo sapiens; identical to SEQ ID NO: 8461

SEQ ID NO: 8480 - protein, 119 aa, Homo sapiens
MASQLQVFSPPSVSSSAFCSAKKLKIEPSGWDVSGQSSNDKYYTHSKTLPATQGQANSSHQVANFNIPAYDQGLLLPAPAVEHIVVTAADSSGSAATSTFQSSQTLTHRSNVSLLEPYQ

SEQ ID NO: 8481 - protein, 112 aa, Homo sapiens; identical to SEQ ID NO: 8373

SEQ ID NO: 8482 - protein, 17 aa, Homo sapiens
MKRGRLPSSSEDSDDNG

SEQ ID NO: 8483 - protein, 269 aa, Homo sapiens; identical to SEQ ID NO: 4783

SEQ ID NO: 8484 - protein, 112 aa, Homo sapiens
MNGRADFREPNAEVPRPIPHIGPDYIPTEEERRVFAECNDESFWFRSVPLAATSMLITQGLISKGILSSHPKYGSIPKLILACIMGYFAGKLSYVKTCQEKFKKLENSPLGE

SEQ ID NO: 8485 - protein, 228 aa, Homo sapiens
MEEQPQMQDADEPADSGGEGRAGGPPQVAGAQAACSEDRMTLLLRLRAQTKQQLLEYKSMVDASEEKTPEQIMQEKQIEAKIEDLENEIEEVKVAFEIKKLALDSVLMDNMKHLLELNKLIMKSQQESWDLEEKLLDIRKKRLQLKQASESKLLEIQTEKNKQKIDLDSMENSERIKIIRQNLQMEIKITTVIQHVFQNLILGSKVNWAEDPALKEIVLQLEKNVDMM

SEQ ID NO: 8486 - protein, 783 aa, Homo sapiens; identical to SEQ ID NO: 5830

SEQ ID NO: 8487 - protein, 130 aa, Homo sapiens
MMLGTEGGEGFVVKVRGLPWSCSADEVQRFFSDCKIQNGAQGIRFIYTREGRPSGEAFVELESEDEVKLALKKDRETMGHRYVEVFKSNNVEMDWVLKHTGPNSPDTANDGFVRLRGLPFGCSKEEIVQF

SEQ ID NO: 8488 - protein, 88 aa, Homo sapiens
MEADIITNLRCRLKEAEEERLKAAQYGLQLVESQNELQNQLDKCRNEMMTMTESYEQEKYTLQREVELKSRMLESLSCECEAIKQQQK

SEQ ID NO: 8489 - protein, 633 aa, Homo sapiens; identical to SEQ ID NO: 6010

SEQ ID NO: 8490 - protein, 198 aa, Homo sapiens
MATGDLKRSLRNLEQVLRLLNYPEEVDCVGLIKGDPAASLPIISYSFTSYSPYVTELIMESNVELIAKNDLRFIDAVYKLLRDQFNYKPILTKKQFIQCGFAEWKIQIVCDILNCVMKKHKELSSLQKIPSQQRKKISSGKSEPPLGNEKISAEAVGVDISGRFMTSGKKKAVVIRHLYNEDNVDISEDTLSPITDVN

SEQ ID NO: 8491 - protein, 111 aa, Homo sapiens
MVMEKPSPLLVGREFVRQYYTLLNKAPEYLHRFYGRNSSYVHGGVDASGKPQEAVYGQNDIHHKVLSLNFSECHTKIRHVDAHATLSDGVVVQVMGLLSNSGQPERKFMQT

SEQ ID NO: 8492 - protein, 226 aa, Homo sapiens; identical to SEQ ID NO: 6419

SEQ ID NO: 8493 - protein, 623 aa, Homo sapiens
MSDEVFSTTLAYTKSPKVTKRTTFQDELIRAITARSARQRSSEYSDDFDSDEIVSLGDFSDTSADENSVNKKMNDFHISDDEEKNPSKLLFLKTNKSNGNITKDEPVCAIKNEEEMAPDGCEDIVVKSFSESQNKDEEFEKDKIKMKPKPRILSIKSTSSAENNSLDTDDHFKPSPRPRSMLKKKSHMEEKDGLEDKETALSEELELHSAPSSLPTPNGIQLEAEKKAFSENLDPEDSCLTSLASSSLKQILGDSFSPGSEGNASGKADHVTTAVEKSKESQVTADDLEEEKAKAELIMDDDRTVDPLLSKSQSILISTSATASSKKTIEDRNIKNKKSTNNRASSASARLMTSEFLKKSSSKRRTPSTTTSSHYLGTLKVLDQKPSQKQSIEPDRADNIRAAVYQEWLEKKNVYLHEMHRIKRIESENLRIQNEQKKAAKREEALASFEAWKAMKEKEAKKIAAKKRLEEKNKKKTEEENAARKGEALQAFEKWKEKKMEYLKEKNRKEREYERAKKQKEEETVAEKKKDNLTAVEKWNEKKEAFFKQKEKEKINEKRKEELKRAEKKDKDKQAINEYEKWLENKEKQERIERKQKKRHSFLESEALPPWSPPSRTVFAKVF

SEQ ID NO: 8494 - protein, 84 aa, Homo sapiens
MMLGTEGGEGFVVKVRGLPWSCSADEVQRFFSDCKIQNGAQGIRFIYTREGRPSGEAFVELESEDEVKLALKKDRETMGHRYVE

SEQ ID NO: 8495 - protein, 330 aa, Homo sapiens
MDQGDTPTLEEDLKKLQLSEFFDIFEKEKVDKEALALCTDRDLQEIGIPLGPRKKILNYFSTRKNSMGIKRPAPQPASGANIPKESEFCSSSNTRNGDYLDVGIGQVSVKYPRLIYKPEIFFAFGSPIGMFLTVRGLKRIDPNYRFPTCKGFFNIYHPFDPVAYRIEPMVVPGVEFEPMLIPHHKGRKRMHLELREGLTRMSMDLKNNLLGSLRMAWKSFTRAPYPALQASETPEETEAEPESTSEKPSDVNTEETSVAVKEEVLPINVGMLNGGQRIDYVLQEKPIESFNEYLFALQSHLCYWESEDTVLLVLKEIYQTQGIFLDQPLQ

SEQ ID NO: 8496 - protein, 460 aa, Homo sapiens; identical to SEQ ID NO: 5990

SEQ ID NO: 8497 - protein, 355 aa, Homo sapiens
MTGSAADTHRCPHPKGAKGTRSRSSHARPVSLATSGGSEEEDKDGGVLFHVNKSGFPIDSHTWERMWMHVAKVHPKGGEMVGAIRNAAFLAKPSIPQVPNYRLSMTIPDWLQAIQNYMKTLQYNHTGTQFFEIRKMRPLSGLMETAKEMTRESLPIKCLEAVILGIYLTNGQPSIERFPISFKTYFSGNYFHHVVLGIYCNGRYGSLGMSRRAELMDKPLTFRTLSDLIFDFEDSYKKYLHTVKKVKIGLYVPHEPHSFQPIEWKQLVLNVSKMLRADIRKELEKYARDMRMKILKPASAHSPTQVRSRGKSLSPRRRQASPPRRLGRREKSPALPEKKVADLSTLNEVGYQIRI

SEQ ID NO: 8498 - protein, 127 aa, Homo sapiens
MASNHKSSAARPVSRGGVGLTGRPPSGIRPLSGNIRVATAMPPGTARPGSRGCPIGTGGVLSSQIKVAHRPVTQQGLTGMKTGTKGPQRQILDKSYYLGLLRSKISELTTEVNKLQKGIEMYNQENS

SEQ ID NO: 8499 - protein, 169 aa, Homo sapiens
MHKLQSGIGRLILKEEMKARSSSYADPWTPPRSSTSSREALHTAGYEMSLNGSPRSHYLADSDPLISKSASLPAYRRNGLHRTPSADLFHYDSMNAVNWGMREYKIYPYELLLVTTRGRNRLPKDVDRTRLERHLSQEEFYQVFGMTISEFDRLALWKRNELKKQARLF

SEQ ID NO: 8500 - protein, 47 aa, Homo sapiens
MASVLSRRLGKRSLLGARVLGPSASEGPSAAPPSEPLLEGAAPQPFT

SEQ ID NO: 8501 - protein, 185 aa, Homo sapiens
MDDSINNRFSYVTHEDICNCFNGDTLLAIQAPSGTQLEVPIPEMGQNGQKKYQINLKSHSGPIHVLLINKESSSSKPVVFPVPPPDDLTQPSSQSLTPVTPQKSSMATQNLPEQHVSERSQALQQTSATDISSAGSISGDIIDELMSSDVFPLLRLSPTPADDYNFNLDDNEGVCDLFDVQILNY

SEQ ID NO: 8502 - protein, 163 aa, Homo sapiens; identical to SEQ ID NO: 5841

SEQ ID NO: 8503 - protein, 304 aa, Homo sapiens
MSKRRRLKQGEPIMTGKTQTSNVTNKNDPKSINSRVFIGNLNTAIVKKVDIEAIFSKYGKIVGCSVHKGYAFVQYMSERHARAAVAGENARVIAGQPLDINMAGEPKPYRPKPGNKRPLSALYRLESKEPFLSVGGYVFDYDYYRDDFYNRLFDYHGRVPPPPRAVIPLKRPRVAVTTTRRGKGVFSMKGGSRSTASGSTGSKLKSDELQTIKKELTQIKTKIDSLLGRLEKIEKQQKAEAEAQKKQLEESLVLIQEECVSEIADHSTEEPAEGGPDADGEEMTDGIEEDFDEDGGHELFLQIK

SEQ ID NO: 8504 - protein, 134 aa, Homo sapiens
MPSAEAKLKKNRCANCFDCPGCMHTLSTRATSISTQLPDDPAKTTMKKAYYLACGFCRWTSRDVGMADKSVASGGWQEPENPHTQRMNKLIEYYQQLAQKEKVERDRKKLARRRNYMPLAFSDKYGLGTRLQRP

SEQ ID NO: 8505 - protein, 409 aa, Homo sapiens
MWRVIEPPCPGAPSTENGKSVHWKLGADKEVWVWVMGEHHLDKPYDVLCNEIIAERARLKAEQEAEEPRKTHSEEFTNSLKTKSQYHDLQAPDNQQTKDIWKKVAEKEELEQGSRPAPTLEEEKIRSLSSSSRNIQQMLADSINRMKAYAFHQKKESMKKKQDEEINQIEEERTKQICKSWKEDSEWQASLRKSKAADEKRRSLAKQAREDYKRLSLGAQKGRGGERLQSPLRVPQKPERPPLPPKPQFLNSGAYPQKPLRNQGVVRTLSSSAQEDIIRWFKEEQLPLRAGYQKTSDTIAPWFHGILTLKKANELLLSTGMPGSFLIRVSERIKGYALSYLSEDGCKHFLIDASADAYSFLGVDQLQHATLADLVEYHKEEPITSLGKELLLYPCGQQDQLPDYLELFE

SEQ ID NO: 8506 - protein, 129 aa, Homo sapiens [sequence omitted]

SEQ ID NO: 8507 - protein, 259 aa, Homo sapiens
MVGREKELSIHFVPGSCRLVEEEVNIPNRRVLVTGATGLLGRAVHKEFQQNNWHAVGCGFRRARPKFEQVNLLDSNAVHHIIHDFQPHVIVHCAAERRPDVVENQPDAASQLNVDASGNLAKEAAAVGAFLIYISSDYVFDGTNPPYREEDIPAPLNLYGKTKLDGEKAVLENNLGAAVLRIPILYGEVEKLEESAVTVMFDKVQFSNKSANMDHWQQRFPTHVKDVATVCRQLAEKRMLVRRIPESCLSEGPLCLFHA

SEQ ID NO: 8508 - protein, 182 aa, Homo sapiens
SYDSTFSYVTHEDICNCFNGDTLLAIQAPSGTQLEVPIPEMGQNGQKKYQINLKSHSGPIHVLLINKESSSSKPVVFPVPPPDDLTQPSSQSLTPVTPQKSSMATQNLPEQHVSERSQALQQTSATDISSAGSISGDIIDELMSSDVFPLLRLSPTPADDYNFNLDDNEGVCDLFDVQILNY

SEQ ID NO: 8509 - protein, 53 aa, Homo sapiens
MDSELMHSIVGSYHKPPERVFVPSFTQNEPSQNCHPANLEVTSPKILHSPNSQ

SEQ ID NO: 8510 - protein, 1005 aa, Homo sapiens
MAGALRRGRALGSRPSGPTVSSRRSPQCPVAQEGLGARSRPRVAPRSLARCGPSSRLMGWKPSEARGQSQSFQASGLQPRSLKAARRATGRPDRSRAARPTMDPSAHRSRAAPPNMDPDPQAGVQVGMRVVRGVDWKWGQQDGGEGGVGTVVELGRHGSPSTPDRTVVVQWDQGTRTNYRAGYQGAHDLLLYDNAQIGVRHPNIICDCCKKHGLRGMRWKCRVCLDYDLCTQCYMHNKHELAHAFDRYETAHSRPVTLSPRQGLPRIPLRGIFQGAKVVRGPDWEWGSQDGKPAELQRRVSADSQPFQHGDKVKCLLDTDVLREMQEGHGGWNPRMAEFIGQTGTVHRITDRGDVRVQFNHETRWTFHPGALTKHHSFWVGDVVRVIGDLDTVKRLQAGHGEWTDDMAPALGRVGKVVKVFGDGNLRVAVAGQRWTFSPSCLVAYRPEEDANLDVAERARENKSSLSVALDKLRAQKSDPEHPGRLVVEVALGNAARALDLLRRRPEQVDTKNQGRTALQVAAYLGQVELIRLLLQARAGVDLPDDEGNTALHYAALGNQPEATRVLLSAGCRADAINSTQSTALHVAVQRGFLEVVRALCERGCDVNLPDAHSDTPLHSAISAGTGASGIVEVLTEVPNIDVTATNSQGFTLLHHASLKGHALAVRKILARARQLVDAKKEDGFTALHLAALNNHREVAQILIREGRCDVNVRNRKLQSPLHLAVQQAHVGLVPLLVDAGCSVNAEDEEGDTALHVALQRHQLLPLVADGAGGDPGPLQLLSRLQASGLPGSAELTVGAAVACFLALEGADVSYTNHRGRSPLDLAAEGRVLKALQGCAQRFRERQAGGGAAPGPRQTLGTPNTVTNLHVGAAPGPEAAECLVCSELALLVLFSPCQHRTVCEECARRMKKCIRCQVVVSKKLRPDGSEVASAAPAPGPPRQLVEELQSRYRQMEERITCPICIDSHIRLVFQCGHGACAPCGSALSACPICRQPIRDRIQIFV

SEQ ID NO: 8511 - protein, 97 aa, Homo sapiens
MASSAELDFNLQALLEQLSQDELSKFKSLIRTISLGKELQTVPQTEVDKANGKQLVEIFTSHSCSYWAGMAAIQVFEKMNQTHLSGRADEHCVMPPP

SEQ ID NO: 8512 - protein, 230 aa, Homo sapiens
MDSELMHSIVGSYHKPPERVFVPSFTQNEPSQNCHPANLEVTSPKILHSPNSQALILALKTLQEKIHRLELERTQAEDNLNILSREAAQYKKALENETNERNLAHQELIKQKKDISIQLSSAQSRCTLLEKQLEYTKRMVLNVEREKNMILEQQAQLQREKEQDQMKLYAKLEKLDVLEKECFRLTTTQKTAEDKIKHLEEKLKEEEHQRKLFQDKASELQTGLEISKII

SEQ ID NO: 8513 - protein, 207 aa, Homo sapiens
MDRGEQGLLRTDPVPEEGEDVAATISATETLSEEEQEELRRELAKVEEEIQTLSQVLAAKEKHLAEIKRKLGINSLQELKQNIAKGWQDVTATSAYKKTSETLSQAGQKASAAFSSVGSVITKKLEDVKLQAFSHSFSIRSIQHSISMPAMRNSPTFKSFEEKVENLKSKVGGTKPAGGDFGEVLNSAANASATTTEPLPEKTQESL

SEQ ID NO: 8514 - protein, 128 aa, Homo sapiens
MKFNPFVTSDRSKNRKRHFNAPSHVRRKIMSSPLSKELRQKYNVRSMPIRKDDEVQVVRGHYKGQQIGKVVQVYRKKYVIYIERVQREKANGTTVHVGIHPSKVVITRLKLDKDRKKILERKAKSRQV

SEQ ID NO: 8515 - protein, 41 aa, Homo sapiens
GLTKQLLDDTIGIHPTCGEVFTTLEITKSSGLDITQKGCUG

SEQ ID NO: 8516 - protein, 454 aa, Homo sapiens; identical to SEQ ID NO: 4978

SEQ ID NO: 8517 - protein, 145 aa, Homo sapiens; identical to SEQ ID NO: 4967

SEQ ID NO: 8518 - protein, 206 aa, Homo sapiens
MDSELMHSIVGSYHKPPERVFVPSFTQNEPSQNCHPANLEVTSPKILHSPNSQALILALKTLQEKIHRLELERTQAEDNLNILSREAAQYKKALENETNERNLAHQELIKQKKDISIQLSSAQSRCTLLEKQLEYTKRMVLNVEREKNMILEQQAQLQREKEQDQMKLYAKLEKLDVLEKECFRLTTTQKTAEDKIKHLEEKLKEE

SEQ ID NO: 8519 - protein, 349 aa, Homo sapiens; identical to SEQ ID NO: 4816

SEQ ID NO: 8520 - protein, 142 aa, Homo sapiens
MPSIKLQSSDGEIFEVDVEIAKQSVTIKTMLEDLGMDDEGDDDPVPLPNVNAAILKKVIQWCTHHKDDPPPPEDDENKEKRTDDIPVWDQEFLKVDQGTLFELILAANYLDIKGLLDVTCKTVANMIKGKTPEEIRKTFNIK

SEQ ID NO: 8521 - protein, 124 aa, Homo sapiens
MSATVVDAVNAAPLSGSKEMSLEEPKKMTREDWRKKKELEEQRKLGNAPAEVDEEGKDINPHIPQYISSVPWYIDPSKRPTLKHQRPQPEKQKQFSSSGEWYKRGVKENSIITKYRKGACENCG

SEQ ID NO: 8522 - protein, 249 aa, Homo sapiens; identical to SEQ ID NO: 5365

SEQ ID NO: 8523 - protein, 39 aa, Homo sapiens
MKFNPFVTSDRSKNRKRHFNAPSHVRRKIMSSPLSKELR

SEQ ID NO: 8524 - protein, 465 aa, Homo sapiens; identical to SEQ ID NO: 4815

SEQ ID NO: 8525 - protein, 175 aa, Homo sapiens
MASNHKSSAARPVSRGGVGLTGRPPSGIRPLSGNIRVATAMPPGTARPGSRGCPIGTGGVLSSQIKVAHRPVTQQGLTGMKTGTKGPQRQILDKSYYLGLLRSKISELTTEVNKLQKGIEMYNQENSVYLSYEKRAETLAVEIKELQGQLADYNMLVDKLNTNTEMEEVMNDYNM

SEQ ID NO: 8526 - protein, 145 aa, Homo sapiens; identical to SEQ ID NO: 4967

SEQ ID NO: 8527 - protein, 710 aa, Homo sapiens; identical to SEQ ID NO: 6976

SEQ ID NO: 8528 - protein, 156 aa, Homo sapiens
MASVLSRRLGKRSLLGARVLGPSASEGPSAAPPSEPLLEGAAPQPFTTSDDTPCQEQPKEVLKAPSTSGLQQVAFQPGQKVYVWYGGQECTGLVEQHSWMEGQVTVWLLEQKLQVCCRVEEVWLAELQGPCPQAPPLEPGAQALAYRPVSRNIDVP

SEQ ID NO: 8529 - protein, 102 aa, Homo sapiens
MPSIKLQSSDGEIFEVDVEIAKQSVTIKTMLEDLGMDDEGDDDPVPLPNVNAAILKKVIQWCTHHKDDPPPPEDDENKEKRTDDIPVWDQEFLKVDQGTLFE

SEQ ID NO: 8530 - protein, 154 aa, Homo sapiens
MADDLDFETGDAGASATFPMQCSALRKNGFVVLKGWPCKIVEMSASKTGKHGHAKVHLVGIDIFTGKKYEDICPSTHNMDVPNIKRNDFQLIGIQDGYLSLLQDSGEVPEDLRLPEGDLGKEIEQKYDCGEEILITVLSAMTEEAAVAIKAMAK

SEQ ID NO: 8531 - protein, 101 aa, Homo sapiens
MSATVVDAVNAAPLSGSKEMSLEEPKKMTREDWRKKKELEEQRKLGNAPAEVDEEGKDINPHIPQYISSVPWYIDPSKRPTLKHQRPQPEKQKQFSSSGEW

SEQ ID NO: 8532 - protein, 1066 aa, Homo sapiens
MAGALRRGRALGSRPSGPTVSSRRSPQCPVAQEGLGARSRPRVAPRSLARCGPSSRLMGWKPSEARGQSQSFQASGLQPRSLKAARRATGRPDRSRAARPTMDPSAHRSRAAPPNMDPDPQAGVQVGMRVVRGVDWKWGQQDGGEGGVGTVVELGRHGSPSTPDRTVVVQWDQGTRTNYRAGYQGAHDLLLYDNAQIGVRHPNIICDCCKKHGLRGMRWKCRVCLDYDLCTQCYMHNKHELAHAFDRYETAHSRPVTLSPRQGLPRIPLRGIFQGAKVVRGPDWEWGSQDGGEGKPGRVVDIRGWDVETGRSVASVTWADGTTNVYRVGHKGKVDLKCVGEAAGGFYYKDHLPRLGKPAELQRRVSADSQPFQHGDKVKCLLDTDVLREMQEGHGGWNPRMAETGTVHRITDRGDVRVQFNHETRWTFHPGALTKHHSFWVGDVVRVIGDLDTVKRLQAGHGEWTDDMAPALGRVGKVVKVFGDGNLRVAVAGQRWTFSPSCLVAYRPEEDANLDVAERARENKSSLSVALDKLRAQKSDPEHPGRLVVEVALGNAARALDLLRRRPEQVDTKNQGRTALQVAAYLGQVELIRLLLQARAGVDLPDDEGNTALHYAALGNQPEATRVLLSAGCRADAINSTQSTALHVAVQRGFLEVVRALCERGCDVNLPDAHSDTPLHSAISAGTGASGIVEVLTEVPNIDVTATNSQGFTLLHHASLKGHALAVRKILARARQLVDAKKEDGFTALHLAALNNHREVAQILIREGRCDVNVRNRKLQSPLHLAVQQAHVGLVPLLVDAGCSVNAEDEEGDTALHVALQRHQLLPLVADGAGGDPGPLQLLSRLQASGLPGSAELTVGAAVACFLALEGADVSYTNHRGRSPLDLAAEGRVLKALQGCAQRFRERQAGGGAAPGPRQTLGTPNTVTNLHVGAAPGPEAAECLVCSELALLVLFSPCQHRTVCEECARRMKKCIRCQVVVSKKLRPDGSEVASAAPAPGPPRQLVEELQSRYRQMEERITCPICIDSHIRLVFQCGHGACAPCGSALSACPICRQPIRDRIQIFV

SEQ ID NO: 8533 - protein, 115 aa, Homo sapiens
MMLGTEGGEGFVVKVRGLPWSCSADEVQRFFSDCKIQNGAQGIRFIYTREGRPSGEAFVELESEDEVKLALKKDRETMGHRYVEVFKSNNVEMDWVLKHTGPNSPDTANDGFVRL

SEQ ID NO: 8534 - protein, 124 aa, Homo sapiens
MASVLSRRLGKRSLLGARVLGPSASEGPSAAPPSEPLLEGAAPQPFTTSDDTPCQEQPKEVLKAPSTSGLQQVAFQPGQKVYVWYGGQECTGLVEQHSWMEGQVTVWLLEQKLQVCCRVEEVWL

SEQ ID NO: 8535 - protein, 145 aa, Homo sapiens; identical to SEQ ID NO: 4967

SEQ ID NO: 8536 - protein, 112 aa, Homo sapiens
MDSELMHSIVGSYHKPPERVFVPSFTQNEPSQNCHPANLEVTSPKILHSPNSQALILALKTLQEKIHRLELERTQAEDNLNILSREAAQYKKALENETNERNLAHQELIKQK

SEQ ID NO: 8537 - protein, 114 aa, Homo sapiens
MPSAEAKLKKNRCANCFDCPGCMHTLSTRATSISTQLPDDPAKTTMKKAYYLACGFCRWTSRDVGMADKSVASGGWQEPENPHTQRMNKLIEYYQQLAQKEKVERDRKKLARRR

SEQ ID NO: 8538 - protein, 215 aa, Homo sapiens
MPGEATETVPATEQELPQSQAETGSGTASDSGESVPGIEEQDSTQTTTQKAWLVAAAEIDEEPVGKAKQSRSEKRARKAMSKLGLLQVTGVTRVTIWKSKNILFVITKLDVYKSPASDAYIVFGEAKIQDLSQQAQLAAAEKFRVQGEAVGNIQENTQTPTVQEESEEEEVDETGVEVKDVKLVMSQANVSRAKAVRALKNNSNDIVNAIMELTV

SEQ ID NO: 8539 - protein, 143 aa, Homo sapiens
MSATVVDAVNAAPLSGSKEMSLEEPKKMTREDWRKKKELEEQRKLGNAPAEVDEEGKDINPHIPQYISSVPWYIDPSKRPTLKHQRPQPEKQKQFSSSGEWYKRGVKENSIITKYRKGACENCGAMTHKKKDCFERPRRVGAK

SEQ ID NO: 8540 - protein, 188 aa, Homo sapiens
MASVLSRRLGKRSLLGARVLGPSASEGPSAAPPSEPLLEGAAPQPFTTSDDTPCQEQPKEVLKAPSTSGLQQVAFQPGQKVYVWYGGQECTGLVEQHSWMEGQVTVWLLEQKLQVCCRVEEVWLAELQGPCPQAPPLEPGAQALAYRPVSRNIDVPKRKSDAVEMDEMMAAMVLTSLSCSPVVQSPPG

SEQ ID NO: 8541 - protein, 28 aa, Homo sapiens
MMLGTEGGEGFVVKVRGLPWSCSADEVQ

SEQ ID NO: 8542 - protein, 28 aa, Homo sapiens
MDSELMHSIVGSYHKPPERVFVPSFTQN

SEQ ID NO: 8543 - protein, 357 aa, Homo sapiens; identical to SEQ ID NO: 6013

SEQ ID NO: 8544 - protein, 160 aa, Homo sapiens
MPSIKLQSSDGEIFEVDVEIAKQSVTIKTMLEDLGMDDEGDDDPVPLPNVNAAILKKVIQWCTHHKDDPPPPEDDENKEKRTDDIPVWDQEFLKVDQGTLFELILAANYLDIKGLLDVTCKTVANMIKGKTPEEIRKTFNIKNDFTEEEEAQVGSTQFCL

SEQ ID NO: 8545 - protein, 113 aa, Homo sapiens
MDSELMHSIVGSYHKPPERVFVPSFTQNEPSQNCHPANLEVTSPKILHSPNSQALILALKTLQEKIHRLELERTQAEDNLNILSREAAQYKKALENETNERNLAHQELIKQKK

SEQ ID NO: 8546 - protein, 102 aa, Homo sapiens
MASVLSRRLGKRSLLGARVLGPSASEGPSAAPPSEPLLEGAAPQPFTTSDDTPCQEQPKEVLKAPSTSGLQQVAFQPGQKVYVWYGGQECTGLVEQHSWMEG

SEQ ID NO: 8547 - protein, 163 aa, Homo sapiens; identical to SEQ ID NO: 5841

SEQ ID NO: 8548 - protein, 146 aa, Homo sapiens
MCPGNWLWASMTFMARFSRSSSRSPVRTRGTLEEMPTVQHPFLNVFELERLLYTGKTACNHADEVWPGLYLGDQDMANNRRELRRLGITHVLNASHSRWRGTPEAYEGLGIRYLGVEAHDSPAFDMSIHFQTAADFIHRALSQPGG

SEQ ID NO: 8549 - protein, 513 aa, Homo sapiens; identical to SEQ ID NO: 5771

SEQ ID NO: 8550 - protein, 144 aa, Homo sapiens
MAVSTGVKVPRNFRLLEELEEGQKGVGDGTVSWGLEDDEDMTLTRWTGMIIGPAANYENRIYSLKVECGPKYPEAPPSVRFVTKINMNGINNSSGMVDARSIPVLAKWQNSYSIKVVLQELRRLMMSKENMKLPQPPEGQTYNN

SEQ ID NO: 8551 - protein, 513 aa, Homo sapiens; identical to SEQ ID NO: 5771

SEQ ID NO: 8552 - protein, 18 aa, Homo sapiens
MPSIKLQSSDGEIFEVDV

SEQ ID NO: 8553 - protein, 644 aa, Homo sapiens
VASEGSVRRPSGPVPAPQPPAFRFVSRPGRARSESETLERSPPQSPGPGKAGDAPNRRSGHVRGARVLSPPGRRARLSSPGPSRSSEAREELRRHLVGLIERSRVVIFSKSYCPHSTRVKELFSSLGVECNVLELDQVDDGARVQEVLSEITNQKTVPNIFVNKVHVGGCDQTFQAYQSGLLQKLLQEDLAYDYDLIIIGGGSGGLSCAKEAAILGKKVMVLDFVVPSPQGTSWGLGGTCVNVGCIPKKLMHQAALLGQALCDSRKFGWEYNQQVRHNWETMTKAIQNHISSLNWGYRLSLREKAVAYVNSYGEFVEHHKIKATNKKGQETYYTAAQFVIATGERPRYLGIQGDKEYCITSDDLFSLPYCPGKTLVVGASYVALECAGFLAGFGLDVTVMVRSILLRGFDQEMAEKVGSYMEQHGVKFLRKFIPVMVQQLEKGSPGKLKVLAKSTEGTETIEGVYNTVLLAIGRDSCTRKIGLEKIGVKINEKSGKIPVNDVEQTNVPYVYAVGDILEDKPELTPVAIQSGKLLAQRLFGASLEKIYHTLFWPLEWTVAGRENNTCYAKIICNKFDHDRVIGFHILGPNAGEVTQGFAAAMKCGLTKQLLDDTIGIHPTCGEVFTTLEITKSSGLDITQKGCUG

SEQ ID NO: 8554 - protein, 445 aa, Homo sapiens
MNKGISSIPINLRVYSPHVLNLTLIDLPGITKVPVGDQPPDIEYQIREMIMQFITRENCLILAVTPANTDLANSDALKLAKEVDPQGLRTIGVITKLDLMDEGTDARDVLENKLLPLRRGYVGVVNRSQKDIDGKKDIKAAMLAERKFFLSHPAYRHIADRMGTPHLQKVLNQQLTNHIRDTLPNFRNKLQGQLLSIEHEVEAYKNFKPEDPTRKTKALLQMVQQFAVDFEKRIEGSGDQVDTLELSGGAKINRIFHERFPFEIVKMEFNEKELRREISYAIKNIHGIRTGLFTPDMAFEAIVKKQIVKLKGPSLKSVDLVIQELINTVKKCTKKLANFPRLCEETERIVANHIREREGKTKDQVLLLIDIQVSYINTNHEDFIGFANAQQRSSQVHKKTTVGNQVIRKGWLTISNIGIMKGGSKGYWFVLTAESLSWYKDDEEK

SEQ ID NO: 8555 - protein, 519 aa, Homo sapiens
MLQLMDSGITICLRNGAASVFKKKEWSTQGEENKQDSKLKKLSEDSLTKQPEEVFDVLEKLGEGSYGSVFKAIHKESGQVVAIKQVPVESDLQEIIKEISIMQQCDSPYVVKYYGSYFKNTDLWIVMEYCGAGSVSDIIRLRNKTLIEDEIATILKSTLKGLEYLHFMRKIHRDIKAGNILLNTEGHAKLADFGVAGQLTDTMAKRNTVIGTPFWMAPEVIQEIGYNCVADIWSLGITSIEMAEGKPPYADIHPMRAIFMIPTNPPPTFRKPELWSDDFTDFVKKCLVKNPEQRATATQLLQHPFIKNAKPVSILRDLITEAMEIKAKRHEEQQRELEEEEENSDEDELDSHTMVKTSVESVGTMRATSTMSEGAQTMIEHNSTMLESDLGTMVINSEDEEEEDGTMKRNATSPQVQRPSFMDYFDKQDFKNKSHENCNQNMHEPFPMSKNVFPDNWKVPQDGDFDFLKNLSLEELQMRLKALDPMMEREIEELRQRYTAKRQPILDAMDAKKRRQQNF

SEQ ID NO: 8556 - protein, 463 aa, Homo sapiens
MKIMDSELMHSIVGSYHKPPERVFVPSFTQNEPSQNCHPANLEVTSPKILHSPNSQALILALKTLQEKIHRLELERTQAEDNLNILSREAAQYKKALENETNERNLAHQELIKQKKDISIQLSSAQSRCTLLEKQLEYTKRMVLNVEREKNMILEQQAQLQREKEQDQMKLYAKLEKLDVLEKECFRLTTTQKTAEDKIKHLEEKLKEEEHQRKLFQDKASELQTGLEISKIIMSSVSNLKHSKEKKKSSKKTKCIKRRPPWQICSKFGALPFVAEKMRQHRDPHILQKPFNVTETRCLPKPSRTTSWCKAIPPDSEKSISICDNLSELLMAMQDELDQMSMEHQELLKQMKETESHSVCDDIECELECLLKKMEIKGEQISKLKKHQDSVCKLQQKVQNSKMSEASGIQQEDSYPKGSKNIKNSPRKCLTDTNLFQKNSSFHPIRVHNLQMKLRRDDIMWEQ

SEQ ID NO: 8557 - protein, 349 aa, Homo sapiens; identical to SEQ ID NO: 4816

SEQ ID NO: 8558 - protein, 211 aa, Homo sapiens; identical to SEQ ID NO: 4845

SEQ ID NO: 8559 - protein, 145 aa, Homo sapiens
MIPIWKQQARPGDGPVIWDYHVVLLHVSSGGQNFIYDLDTVLPFPCLFDTYVEDAFKSDDDIHPQFRRKFRVIRADSYLKNFASDRSHMKDSSGNWREPPPPYPCIETGDSKMNLNDFISMDPKVGWGAVYTLSEFTHRFGSKNC

SEQ ID NO: 8560 - protein, 85 aa, Homo sapiens
MSDKSDLKAELERKKQRLAQIREEKKRKEEERKKKEADMQQKKEPVQDDSDLDRKRRETEALLQSIGISPEPPLVPTPMSPSSKS

SEQ ID NO: 8561 - protein, 195 aa, Homo sapiens
MDSELMHSIVGSYHKPPERVFVPSFTQNEPSQNCHPANLEVTSPKILHSPNSQALILALKTLQEKIHRLELERTQAEDNLNILSREAAQYKKALENETNERNLAHQELIKQKKDISIQLSSAQSRCTLLEKQLEYTKRMVLNVEREKNMILEQQAQLQREKEQDQMKLYAKLEKLDVLEKECFRLTTTQKTAEDK

SEQ ID NO: 8562 - protein, 423 aa, Homo sapiens; identical to SEQ ID NO: 6251

SEQ ID NO: 8563 - protein, 698 aa, Homo sapiens
GVGGRGERLPRGFARVVRVASEGSVRRPSGPVPAPQPPAFRFVSRPGRARSESETLERSPPQSPGPGKAGDAPNRRSGHVRGARVLSPPGRRARLSSPGPSRSSEAREELRRHLVGLIERSRVVIFSKSYCPHSTRVKELFSSLGVECNVLELDQVDDGARVQEVLSEITNQKTVPNIFVNKVHVGGCDQTFQAYQSGLLQKLLQEDLAYDYDLIIIGGGSGGLSCAKEAAILGKKVMVLDFVVPSPQGTSWGLGGTCVNVGCIPKKLMHQAALLGQALCDSRKFGWEYNQQVRHNWETMTKAIQNHISSLNWGYRLSLREKAVAYVNSYGEFVEHHKIKATNKKGQETYYTAAQFVIATGERPRYLGIQGDKEYCITSDDLFSLPYCPGKTLVVGASYVALECAGFLAGFGLDVTVMVRSILLRGFDQEMAEKVGSYMEQHGVKFLRKFIPVMVQQLEKGSPGKLKVLAKSTEGTETIEGVYNTVLLAIGRDSCTRKIGLEKIGVKINEKSGKIPVNDVEQTNVPYVYAVGDILEDKPELTPVAIQSGKLLAQRLFGASLEKCDYINVPTTVFTPLEYGCCGLSEEKAIEVYKKENLEIYHTLFWPLEWTVAGRENNTCYAKIICNKFDHDRVIGFHILGPNAGEVTQGFAAAMKCGLTKQLLDDTIGIHPTCGEVFTTLEITKSSGLDITQKGCUG

SEQ ID NO: 8564 - protein, 202 aa, Homo sapiens
MTGSNSHITILTLKVLPHFESLGKQEKIPNKMSAFRNHCPHLDSVGEITKEDLIQKSLGTCQDCKVQGPNLWACLENRCSYVGCGESQVDHSTIHSQETKHYLTVNLTTLRVWCYACSKEVFLDRKLGTQPSLPHVRQPHQIQENSVQDFKIPSNTTLKTPLVAVFDDLDIEADEEDELRARGLTGLKNIGNTCYMNAALQA

SEQ ID NO: 8565 - protein, 480 aa, Homo sapiens; identical to SEQ ID NO: 8061

SEQ ID NO: 8566 - protein, 102 aa, Homo sapiens; identical to SEQ ID NO: 6784

SEQ ID NO: 8567 - protein, 105 aa, Homo sapiens
MSQSGAVSCCPGATNGSLGRSDGVAKMSPKDLFEQRKKYSNSNVIMHETSQYHVQHLATFIMDKSEAITSVDDAIRKLVQLSSKEKIWTQEMLLQVNDQSLRLLD

SEQ ID NO: 8568 - protein, 73 aa, Homo sapiens
MSAFRNHCPHLDSVGEITKEDLIQKSLGTCQDCKVQGPNLWACLENRCSYVGCGESQVDHSTIHSQETKHYLT

SEQ ID NO: 8569 - protein, 91 aa, Homo sapiens
MAMTVVTKEKNKKVPTIFLSKKPREKEVDSKSQVIEGISRLICSAKQQQTMLRVSIDGVEWSDIKFFQLAAQWPTHVKHFPVGLFSGSKAT

SEQ ID NO: 8570 - protein, 844 aa, Homo sapiens
MFWKFDLHSSSHIDTLLEREDVTLKELMDEEDVLQECKAQNRKLIEFLLKAECLEDLVSFIIEEPPQDMDEKIRYKYPNISCELLTSDVSQMNDRLGEDESLLMKLYSFLLNDSPLNPLLASFFSKVLSILISRKPEQIVDFLKKKHDFVDLIIKHIGTSAIMDLLLRLLTCIEPPQPRQDVLNWLNEEKIIQRLVEIVHPSQEEDRHSNASQSLCEIVRLSRDQMLQIQNSTEPDPLLATLEKQEIIEQLLSNIFHKEKNESAIVSAIQILLTLLETRRPTFEGHIEICPPGMSHSACSVNKSVLEAIRGRLGSFHELLLEPPKKSVMKTTWGVLDPPVGNTRLNVIRLISSLLQTNTSSINGDLMELNSIGVILNMFFKYTWNNFLHTQVEICIALILASPFENTENATITDQDSTGDNLLLKHLFQKCQLIERILEAWEMNEKKQAEGGRRHGYMGHLTRIANCIVHSTDKGPNSALVQQLIKDLPDEVRERWETFCTSSLGETNKRNTVDLAFSDYQMQQMTSNFIDQFGFNDEKFADQDDIGNVSFDRVSDINFTLNTNESGNIALFEACCKERIQQFDDGGSDEEDIWEEKHIAFTPESQRRSSSGSTDSEESTDSEEEDGAKQDLFEPSSANTEDKMEVDLSEPPNWSANFDVPMETTHGAPLDSVGSDVWSTEEPMPTKETGWASFSEFTSSLSTKDSLRSNSPVEMETSTEPMDPLTPSAAALAVQPEAAGSVAMEASSDGEEDAESTDKVTETVMNGGMKETLSLTVDAKTETAVFKSEEGKLSTSQDAACKDAEECPETAEAKCAAPRPPSSSPEQRTGQPSAPGDTSVNGPV

SEQ ID NO: 8571 - protein, 867 aa, Homo sapiens
MFWKFDLHSSSHIDTLLEREDVTLKELMDEEDVLQECKAQNRKLIEFLLKAECLEDLVSFIIEEPPQDMDEKIRYKYPNISCELLTSDVSQMNDRLGEDESLLMKLYSFLLNDSPLNPLLASFFSKVLSILISRKPEQIVDFLKKKHDFVDLIIKHIGTSAIMDLLLRLLTCIEPPQPRQDVLNWLNEEKIIQRLVEIVHPSQEEDRHSNASQSLCEIVRLSRDQMLQIQNSTEPDPLLATLEKQEIIEQLLSNIFHKEKNESAIVSAIQILLTLLETRRPTFEGHIEICPPGMSHSACSVNKSVLEAIRGRLGSFHELLLEPPKKSVMKTTWGVLDPPVGNTRLNVIRLISSLLQTNTSSINGDLMELNSIGVILNMFFKYTWNNFLHTQVEICIALILASPFENTENATITDQDSTGDNLLLKHLFQKCQLIERILEAWEMNEKKQAEGGRRHGYMGHLTRIANCIVHSTDKGPNSALVQQLIKDLPDEVRERWETFCTSSLGETNKRNTVDLVTTCHIHSSSDDEIDFKETGFSQDSSLQQMQQMTSNFIDQFGFNDEKFADQDDIGNVSFDRVSDINFTLNTNESGNIALFEACCKERIQQFDDGGSDEEDIWEEKHIAFTPESQRRSSSGSTDSEESTDSEEEDGAKQDLFEPSSANTEDKMEVDLSEPPNWSANFDVPMETTHGAPLDSVGSDVWSTEEPMPTKETGWASFSEFTSSLSTKDSLRSNSPVEMETSTEPMDPLTPSAAALAVQPEAAGSVAMEASSDGEEDAESTDKVTETVMNGGMKETLSLTVDAKTETAVFKSEEGKLSTSQDAACKDAEECPETAEAKCAAPRPPSSSPEQRTGQPSAPGDTSVNGPV

SEQ ID NO: 8572 - protein, 57 aa, Homo sapiens
MTSKKLVNSVAGCADDALAGLVACNPNLQLLQGHRVALRSDLDSLKGRVALLSGGGS

SEQ ID NO: 8573 - protein, 902 aa, Homo sapiens; identical to SEQ ID NO: 5184

SEQ ID NO: 8574 - protein, 178 aa, Homo sapiens
MNRRRKFLLASVLALQNSSFIYPSCQKCFSRIILVSKRSNCPKCGSTGESGNANYRYKLSLKVAESNKLFVITVFGSCLDTFFGLTATGLHRYIQDPNKIPETLDNDTTQNLLTKAVETCFVGQSFIFGVTNFENQPGQGSDASNFLQQCSDHKRKAKALVACQIVLPDPATQDAKTK

SEQ ID NO: 8575 - protein, 146 aa, Homo sapiens
MVAMAEAEAGVAVEVRGLPPAVPDELLTLYFENRRRSGGGPVLSWQRLGCGGVLTFREPADAERVLAQADHELHGAQLSLRPAPPRAPARLLLQGLPPGTTPQRLEQHVQALLRASGLPVQPCCALASPRPDRALVQLPKPLSEAG

SEQ ID NO: 8576 - protein, 115 aa, Homo sapiens
MAGRPLRIGDQLVLEEDYDETYIPSEQEILEFAREIGIDPIKEPELMWLAREGIVAPLPGEWKPCQDITGDIYYFNFANGQSMWDHPCDEHYRSLVIQERAKLSTSGAIKKKKKK

SEQ ID NO: 8577 - protein, 396 aa, Homo sapiens
MRTSYTVTLPEDPPAAPFPALAKELRPRSPLSPSLLLSTFVGLLLNKAKNSKSAQGLAGLRNLGNTCFMNSILQCLSNTRELRDYCLQRLYMRDLHHGSNAHTALVEEFAKLIQTIWTSSPNDVVSPSEFKTQIQRYAPRFVGYNQQDAQEFLRFLLDGLHNEVNRVTLRPKSNPENLDHLPDDEKGRQMWRKYLEREDSRIGDLFVGQLKSSLTCTDCGYCSTVFDPFWDLSLPIAKRGYPEVTLMDCMRLFTKEDVLDGDEKPTCCRCRGRKRCIKKFSIQRFPKILVLHLKRFSESRIRTSKLTTFVNFPLRDLDLREFASENTNHAVYNLYAVSNHSGTTMGGHYTAYCRSPGTGEWHTFNDSSVTPMSSSQVRTSDAYLLFYELASPPSRM

SEQ ID NO: 8578 - protein, 210 aa, Homo sapiens; identical to SEQ ID NO: 6033

SEQ ID NO: 8579 - protein, 475 aa, Homo sapiens
MELWQAALSTLNPNPTDSCPLYLNYATVAALPCRVSRHNSPSAAHFITRLVRTCLPPGAHRCIVMVCEQPEVFASACALARAFPLFTHRSGASRRLEKKTVTVEFFLVGQDNGPVEVSTLQCLANATDGVRLAARIVDTPCNEMNTDTFLEEINKVGKELGIIPTIIRDEELKTRGFGGIYGVGKAALHPPALAVLSHTPDGATQTIAWVGKGIVYDTGGLSIKGKTTMPGMKRDCGGAAAVLGAFRAAIKQGFKDNLHAVFCLAENSVGPNATRPDDIHLLYSGKTVEINNTDAEGRLVLADGVSYACKDLGADIILDMATLTGAQGIATGKYHAAVLTNSAEWEAACVKAGRKCGDLVHPLVYCPELHFSEFTSAVADMKNSVADRDNSPSSCAGLFIASHIGFDWPGVWVHLDIAAPVHAGERATGFGVALLLALFGRASEDPLLNLVSPLGCEVDVEEGDLGRDSKRRRLV

SEQ ID NO: 8580 - protein, 178 aa, Homo sapiens
MVAMAEAEAGVAVEVRGLPPAVPDELLTLYFENRRRSGGGPVLSWQRLGCGGVLTFREPADAERVLAQADHELHGAQLSLRPAPPRAPARLLLQGLPPGTTPQRLEQHVQALLRASGLPVQPCCALASPRPDRALVQLPKPLSEADVRVLEEQAQNLGLEGTLVSLARVPQARAVRVV

SEQ ID NO: 8581 - protein, 630 aa, Homo sapiens
MEKVLGCELLKGLNVLDLGLNMEILEEQMLHEILCREYPELETRWQDLKIRALDTCKAVEAAEERLLTMLLFQNPKRQKPAKFLRNIVRAQGKLCQLRAHCEELEGQKLQEMVLWAPYRPVVWHGMAMVKALSQLQNLLPLFCMSPENWLAVTKQALDSMKPREINHGEDLASHLLQLRAHLTRQLLGSTVTALGLTQVPLVGALGALALLQATGKASELERLALWPGLAASPSTVHSKPVSDVARPAWLGPKAWHECEMLELLPPFVGLCASLAGHSSAWQAYLSLSSTVLGPAPGPGPEPLSLLQKLILWRVLRPECLAGALADFTTSLLGRPLDENTYAPTMPFKHSQATQPMLILLPPPGHPSATLHPLTVIQKLAAKYQQGQKQLQVIALGSEAWDPVSVVVSTLSQAMYEGHWLVLDNCHLMPHWPKELLQLLLELLGRAKVVADLESEQLLDQPESRNVSTVHRDFRLWLIVPAESSASLPAVLTQHSMPVFWNQSLELGHVLIDSVELAQQVLYMQPPTQALPLLLLHGLLLHRQLYGTRLQAHRGRWSQVTLTQVLQTQDQLWASLSNPRAAMQELAGETLPLPLGVISPQESLEEGGGGIQFTALVLAVVETEGTGTERL

SEQ ID NO: 8582 - protein, 495 aa, Homo sapiens
MELHGGNRGGYQPKALEQSGCWLWQAALSTLNPNPTDSCPLYLNYATVAALPCRVSRHNSPSAAHFITRLVRTCLPPGAHRCIVMVCEQPEVFASACALARAFPLFTHRSGASRRLEKKTVTVEFFLVGQDNGPVEVSTLQCLANATDGVRLAARIVDTPCNEMNTDTFLEEINKVGKELGIIPTIIRDEELKTRGFGGIYGVGKAALHPPALAVLSHTPDGATQTIAWVGKGIVYDTGGLSIKGKTTMPGMKRDCGGAAAVLGAFRAAIKQGFKDNLHAVFCLAENSVGPNATRPDDIHLLYSGKTVEINNTDAEGRLVLADGVSYACKDLGADIILDMATLTGAQGIATGKYHAAVLTNSAEWEAACVKAGRKCGDLVHPLVYCPELHFSEFTSAVADMKNSVADRDNSPSSCAGLFIASHIGFDWPGVWVHLDIAAPVHAGERATGFGVALLLALFGRASEDPLLNLVSPLGCEVDVEEGDLGRDSKRRRLV

SEQ ID NO: 8583 - protein, 205 aa, Homo sapiens
METDLNSQDRKDLDKFIKFFALKTVQVIVQARLGEKICTRSSSSPTGSDWFNLAIKDIPEVTHEAKKALAGQLPAVGRSMCVEISLKTSEGDSMELEIWCLEMNEKCDKEIKVSYTVYNRLSLLLKSLLAITRVTPAYRLSRKQGHEYVILYRIYFGEVQLSGLGEGFQTVRVGTVGTPVGTITLSCAYRINLAFMSTRQFERTP

SEQ ID NO: 8584 - protein, 38 aa, Homo sapiens
MAAFKLDFLPEMMVDHCSLNSSPVSKKMNGTLDHPDQP

SEQ ID NO: 8585 - protein, 517 aa, Homo sapiens; identical to SEQ ID NO: 5333

SEQ ID NO: 8586 - protein, 255 aa, Homo sapiens
MERSGQRVTTWDCDQGKHSDSAQKNERESIRQKLALGSFFDDGPGIYTSCSKSGKPSLSSRLQSGMNLQICFVNDSGSDKDSDADDSKTETSLDTPLSPMSKQSSSYSDRDTTEEESESLDDMDFLTRQKKLQAEAKMALAMAKPMAKMQVEVEKQNRKKSPVADLLPHMPHISECLMKRSLKPTDLRDMTIGQLQVIVNDLHSQIESLNEELVQLLLIRDELHTEQDAMLVDIEDLTRHAESQQKHMAEKMPAK

SEQ ID NO: 8587 - protein, 25 aa, Homo sapiens
MSQSGAVSCCPGATNGSLGRSDGVA

SEQ ID NO: 8588 - protein, 118 aa, Homo sapiens
MVLEGNPEVGSAASDLQHRGNKGSCVLSSPGEDAQPGEEPIKYGELIVLGCCEEGGEETEAQRGEVTGPRAHSCYNGCLASGDKGRRRSRLALSRRSHANGVKPDVMHHISTPLVSKA

SEQ ID NO: 8589 - protein, 115 aa, Homo sapiens; identical to SEQ ID NO: 8576

SEQ ID NO: 8590 - protein, 156 aa, Homo sapiens
MSSVQSQQEQLSQSDPSPSPNSCSSFELIDMDAGSLYEPVSPHWFYCKIIDSKETWIPFNSEDSQQLEEAYSSGKGCNGRVVPTDGGRYDVHLGERMRYAVYWDELASEVRRCTWFYKGDKDNKYVPYSESFSQVLEETYMLAVTLDEWKKKLESP

SEQ ID NO: 8591 - protein, 4753 aa, Homo sapiens; identical to SEQ ID NO: 4835

SEQ ID NO: 8592 - protein, 129 aa, Homo sapiens
MVAMAEAEAGVAVEVRGLPPAVPDELLTLYFENRRRSGGGPVLSWQRLGCGGVLTFREPADAERVLAQADHELHGAQLSLRPAPPRAPARLLLQGLPPGTTPQRLEQHVQALLRASGLPVQPCCALASP

SEQ ID NO: 8593 - protein, 288 aa, Homo sapiens
MEREPSASEAAPAAAALFAWGANSYGQLGLGHKEDVLLPQQLNDFCKPRSVRRITGGGGHSAVVTDGGDLFVCGLNKDGQLGLGHTEDIPYFTPCKSLFGCPIQQVACGWDFTIMLTENGQVLSCGSNSFGQLGVPHGPRRCVVPQAIELHKEKVVCIAAGLRHAVAATASGIVFQWGTGLASCGRRLCPGQTLPLFFTAKEPSRVTGLENSKAMCVLAGSDHSASLTDAGEVYVWGSNKHGQLANEAAFLPVPQKIEAHCFQNEKVTAIWSGWTHLVAQTGLLWLRA

SEQ ID NO: 8594 - protein, 123 aa, Homo sapiens
MNRRRKFLLASVLALQNSSFIYPSCQKCFSRIILVSKRSNCPKCGSTGESGNANYRYKLSLKVAESNKLFVITVFGSCLDTFFGLTATGLHRYIQDPNKIPETLDNDTTQNLLTKAVETCFVG

SEQ ID NO: 8595 - protein, 107 aa, Homo sapiens
MLRLYPGPMVTEAEGKGGPEMASLSSSVVPVSFISTLRESVLDPGVGGEGASDKQRSKLSLSHSMIPAAKIHTELCLPAFFSPAGTQRRFQQPQHHLTLSIIHTAAR

SEQ ID NO: 8596 - protein, 550 aa, Homo sapiens
METDLNSQDRKDLDKFIKFFALKTVQVIVQARLGEKICTRSSSSPTGSDWFNLAIKDIPEVTHEAKKALAGQLPAVGRSMCVEISLKTSEGDSMELEIWCLEMNEKCDKEIKVSYTVYNRLSLLLKSLLAITRVTPAYRLSRKQGHEYVILYRIYFGEVQLSGLGEGFQTVRVGTVGTPVGTITLSCAYRINLAFMSTRQFERTPPIMGIIIDHFVDRPYPSSSPMHPCNYRTAGEDTGVIYPSVEDSQEVCTTSFSTSPPSQCVFTVTKAHFQTPTPVVTDTLRVPMAGLAFSHQLSSSRLSYQPAALGVGSADLAYPVVFAAGLNATHPHQLMVPGKEGGVPLAPNQPVHGTQADQERLATCTPSDRTHCAATPSSSEDTETVSNSSEGRASPHDVLETIFVRKVGAFVNKPINQVTLTSLDIPFAMFAPKNLELEDTDPMVNPPDSPETESPLQGSLHSDGSSGGSSGNTHDDFVMIDFKPAFSKDDILPMDLGTFYREFQNPPQLSSLSIDIGAQSMAEDLDSLPEKLAVHEKNVREFDAFVETLQ

SEQ ID NO: 8597 - protein, 1369 aa, Homo sapiens
MGNSDSQYTLQGSKNHSNTITGAKQIPCSLKIRGIHAKEEKSLHGWGHGSNGAGYKSRSLARSCLSHFKSNQPYASRLGGPTCKVSRGVAYSTHRTNAPGKDFQGISAAFSTENGFHSVGHELADNHITSRDCNGHLLNCYGRNESIASTPPGEDRKSPRVLIKTLGKLDGCLRVEFHNGGNPSKVPAEDCSEPVQLLRYSPTLASETSPVPEARRGSSADSLPSHRPSPTDSRLRSSKGSSLSSESSWYDSPWGNAGELSEAEGSFLAPGMPDPSLHASFPPGDAKKPFNQSSSLSSLRELYKDANLGSLSPSGIRLSDEYMGTHASLSNRVSFASDIDVPSRVAHGDPIQYSSFTLPCRKPKAFVEDTAKKDSLKARMRRISDWTGSLSRKKRKLQEPRSKEGSDYFDSRSDGLNTDVQGSSQASAFLWSGGSTQILSQRSESTHAIGSDPLRQNIYENFMRELEMSRTNTENIETSTETAESSSESLSSLEQLDLLFEKEQGVVRKAGWLFFKPLVTVQKERKLELVARRKWKQYWVTLKGCTLLFYETYGKNSMDQSSAPRCALFAEDSIVQSVPEHPKKENVFCLSNSFGDVYLFQATSQTDLENWVTAVHSACASLFAKKHGKEDTLRLLKNQTKNLLQKIDMDSKMKKMAELQLSVVSDPKNRKAIENQIQQWEQNLEKFHMDLFRMRCYLASLQGGELPNPKSLLAAASRPSKLALGRLGILSVSSFHALVCSRDDSALRKRTLSLTQRGRNKKGIFSSLKGLDTLARKGKEKRPSITQVDELLHIYGSTVDGVPRDNAWEIQTYVHFQDNHGVTVGIKPEHRVEDILTLACKMRQLEPSHYGLQLRKLVDDNVEYCIPAPYEYMQQQVYDEIEVFPLNVYDVQLTKTGSVCDFGFAVTAQVDERQHLSRIFISDVLPDGLAYGEGLRKGNEIMTLNGEAVSDLDLKQMEALFSEKSVGLTLIARPPDTKATLCTSWSDSDLFSRDQKSLLPPPNQSQLLEEFLDNFKKNTANDFSNVPDITTGLKRSQTDGTLDQVSHREKMEQTFRSAEQITALCRSFNDSQANGMEGPRENQDPPPRSLARHLSDADRLRKVIQELVDTEKSYVKDLSCLFELYLEPLQNETFLTQDEMESLFGSLPEMLEFQKVFLETLEDGISASSDFNTLETPSQFRKLLFSLGGSFLYYADHFKLYSGFCANHIKVQKVLERAKTDKAFKAFLDARNPTKQHSSTLESYLIKPVQRVLKYPLLLKELVSLTDQESEEHYHLTEALKAMEKVASHINEMQKIYEDYGTVFDQLVAEQSGTEKEVTELSMGELLMHSTVSWLNPFLSLGKAARGSDLELTVFVFKRAVILVYKENC

SEQ ID NO: 8598 - protein, 14 aa, Homo sapiens
MNGTLDHPDQPDLD

SEQ ID NO: 8599 - protein, 172 aa, Homo sapiens
MVAMAEAEAGVAVEVRGLPPAVPDELLTLYFENRRRSGGGPVLSWQRLGCGGVLTFREPADAERVLAQADHELHGAQLSLRPAPPRAPARLLLQGLPPGTTPQRLEQHVQALLRASGLPVQPCCALASPRPDRALVQLPKPLSEADVRVLEEQAQNLGLEGTLVSLARVPQA

SEQ ID NO: 8600 - protein, 8 aa, Homo sapiens
MFWKFDLH

SEQ ID NO: 8601 - protein, 136 aa, Homo sapiens
MVAMAEAEAGVAVEVRGLPPAVPDELLTLYFENRRRSGGGPVLSWQRLGCGGVLTFREPADAERVLAQADHELHGAQLSLRPAPPRAPARLLLQGLPPGTTPQRLEQHVQALLRASGLPVQPCCALASPRPDRALV

SEQ ID NO: 8602 - protein, 1947 aa, Homo sapiens
GRPIDPREGPGRPPLDGRDHFGRPPVDIRENLVRPGIDHLGRRDHFGFNPEKPWGHRGDFDEREHRVLPVYGGPKGLHEERGRFRSGNYRFDPRSGPWNRGFGQEVHRDFDDRRRPWERQRDRDDRDFDFCREMNGNRLGRDRIQNTWVPPPHARVFDYFEGATSQRKGDNVPQVNGENTERHAQPPPIPVQNDPELYEKLTSSNEINKEKSDTVADIESEPVVESTETEGTPLTSLTAETRRQVKMGNSDSQYTLQGSKNHSNTITGAKQIPCSLKIRGIHAKEEKSLHGWGHGSNGAGYKSRSLARSCLSHFKSNQPYASRLGGPTCKVSRGVAYSTHRTNAPGKDFQGISAAFSTENGFHSVGHELADNHITSRDCNGHLLNCYGRNESIASTPPGEDRKSPRVLIKTLGKLDGCLRVEFHNGGNPSKVPAEDCSEPVQLLRYSPTLASETSPVPEARRGSSADSLPSHRPSPTDSRLRSSKGSSLSSESSWYDSPWGNAGELSEAEGSFLAPGMPDPSLHASFPPGDAKKPFNQSSSLSSLRELYKDANLGSLSPSGIRLSDEYMGTHASLSNRVSFASDIDVPSRVAHGDPIQYSSFTLPCRKPKAFVEDTAKKDSLKARMRRISDWTGSLSRKKRKLQEPRSKEGSDYFDSRSDGLNTDVQGSSQASAFLWSGGSTQILSQRSESTHAIGSDPLRQNIYENFMRELEMSRTNTENIETSTETAESSSESLSSLEQLDLLFEKEQGVVRKAGWLFFKPLVTVQKERKLELVARRKWKQYWVTLKGCTLLFYETYGKNSMDQSSAPRCALFAEDSIVQSVPEHPKKENVFCLSNSFGDVYLFQATSQTDLENWVTAVHSACASLFAKKHGKEDTLRLLKNQTKNLLQKIDMDSKMKKMAELQLSVVSDPKNRKAIENQIQQWEQNLEKFHMDLFRMRCYLASLQGGELPNPKSLLAAASRPSKLALGRLGILSVSSFHALVCSRDDSALRKRTLSLTQRGRNKKGIFSSLKGLDTLARKGKEKRPSITQVDELLHIYGSTVDGVPRDNAWEIQTYVHFQDNHGVTVGIKPEHRVEDILTLACKMRQLEPSHYGLQLRKLVDDNVEYCIPAPYEYMQQQVYDEIEVFPLNVYDVQLTKTGSVCDFGFAVTAQVDERQHLSRIFISDVLPDGLAYGEGLRKGNEIMTLNGEAVSDLDLKQMEALFSEKSVGLTLIARPPDTKATLCTSWSDSDLFSRDQKSLLPPPNQSQLLEEFLDNFKKNTANDFSNVPDITTGLKRSQTDGTLDQVSHREKMEQTFRSAEQITALCRSFNDSQANGMEGPRENQDPPPRSLARHLSDADRLRKVIQELVDTEKSYVKDLSCLFELYLEPLQNETFLTQDEMESLFGSLPEMLEFQKVFLETLEDGISASSDFNTLETPSQFRKLLFSLGGSFLYYADHFKLYSGFCANHIKVQKVLERAKTDKAFKAFLDARNPTKQHSSTLESYLIKPVQRVLKYPLLLKELVSLTDQESEEHYHLTEALKAMEKVASHINEMQKIYEDYGTVFDQLVAEQSGTEKEVTELSMGELLMHSTVSWLNPFLSLGKARKDLELTVFVFKRAVILVYKENCKLKKKLPSNSRPAHNSTDLDPFKFRWLIPISALQVRLGNPAGTENNSIWELIHTKSEIEGRPETIFQLCCSDSESKTNIVKVIRSILRENFRRHIKCELPLEKTCKDRLVPLKNRVPVSAKLASSRSLKVLKNSSSNEWTGETGKGTLLDSDEGSLSSGTQSSGCPTAEGRQDSKSTSPGKYPHPGLADFADNLIKESDILSDEDDDHRQTVKQGSPTKDIEIQFQRLRISEDPDVHPEAEQQPGPESGEGQKGGEQPKLVRGHFCPIKRKANSTKRDRGTLLKAQIRHQSLDSQSENATIDLNSVLEREFSVQSLTSVVSEECFYETESHGKS

SEQ ID NO: 8603 - protein, 97 aa, Homo sapiens
MEAADASRSNGSSPEARDARSPSGPSGSLENGTKADGKDAKTTNGHGGEAAEGKSLGSALKPGEGRSALFAGNEWRRPIIQFVESGDDKNSNYFSMD

SEQ ID NO: 8604 - protein, 38 aa, Homo sapiens
MEAADASRSNGSSPEARDARSPSGPSGSLENGTKADGK

SEQ ID NO: 8605 - protein, 484 aa, Homo sapiens
MAIGKRLATLPTKEQKTQRLISELSLLNHKLPARVWLPTAGFDHHVVRVPHTQAVVLNSKDKAPYLIYVEVLECENFDTTSVPARIPENRIRSTRSVENLPECGITHEQRAGSFSTVPNYDNDDEAWSVDDIGELQVELPEVHTNSCDNISQFSVDSITSQESKEPVFIAAGDIRRRLSEQLAHTPTAFKRDPEDPSAVALKEPWQEKVRRIREGSPYGHLPNWRLLSVIVKCGDDLRQELLAFQVLKQLQSIWEQERVPLWIKPYKILVISADSGMIEPVVNAVSIHQVKKQSQLSLLDYFLQEHGSYTTEAFLSAQRNFVQSCAGYCLVCYLLQVKDRHNGNILLDAEGHIIHIDFGFILSSSPRNLGFETSAFKLTTEFVDVMGGLDGDMFNYYKMLMLQGLIAARKHMDKVVQIVEIMQQGSQLPCFHGSSTIRNLKERFHMSMTEEQLQLLVEQMVDGSMRSITTKLYDGFQYLTNGIM

SEQ ID NO: 8606 - protein, 75 aa, Homo sapiens
MAIPITVLDCDLLLYGRGHRTLDRFKLDDVTDEYLMSMYGFPRQFIYYLVELLGANLSRPTQRSRAISPETQVLA

SEQ ID NO: 8607 - protein, 917 aa, Homo sapiens
MDGAAGPGDGPAREALQSLSQRLRVQEQEMELVKAALAEALRLLRLQVPPSSLQGSGTPAPPGDSLAAPPGLPPTCTPSLVSRGTQTETEVELKSSPGPPGLSNGPPAPQGASEEPSGTQSEGGGSSSSGAGSPGPPGILRPLQPPQRADTPRRNSSSSSSPSERPRQKLSRKAISSANLLVRSGSTESRGGKDPLSSPGGPGSRRSNYNLEGISVKMFLRGRPITMYIPSGIRSLEELPSGPPPETLSLDWVYGYRGRDSRSNLFVLRSGEVVYFIACVVVLYRPGGGPGGPGGGGQRHYRGHTDCVRCLAVHPDGVRVASGQTAGVDKDGKPLQPVVHIWDSETLLKLQEIGLGAFERGVGALAFSAADQGAFLCVVDDSNEHMLSVWDCSRGMKLAEIKSTNDSVLAVGFNPRDSSCIVTSGKSHVHFWNWSGGVGVPGNGTLTRKQGVFGKYKKPKFIPCFVFLPDGDILTGDSEGNILTWGRSPSDSKTPGRGGAKETYGIVAQAHAHEGSIFALCLRRDGTVLSGGGRDRRLVQWGPGLVALQEAEIPEHFGAVRAIAEGLGSELLVGTTKNALLRGDLAQGFSPVIQGHTDELWGLCTHPSQNRFLTCGHDRQLCLWDGESHALAWSIDLKETGLCADFHPSGAVVAVGLNTGRWLVLDTETREIVSDVIDGNEQLSVVRYSPDGLYLAIGSHDNVIYIYSVSSDGAKSSRFGRCMGHSSFITHLDWSKDGNFIMSNSGDYEILYWDVAGGCKQLKNRYESRDREWATYTCVLGFHVYVPVRSCQGAEPHVRGPRQPRDQRPIHARRLAPRLAGRQGRQHLPVASAGRWGRGAGARHALSNPLPVPRLLPRRLIAAWRDRLARRRGPAPPCPSLAQSPTTRGRLFPGLTSRHSRSRIFLEGANGAPAHTV

SEQ ID NO: 8608 - protein, 106 aa, Homo sapiens
MVAMAEAEAGVAVEVRGLPPAVPDELLTLYFENRRRSGGGPVLSWQRLGCGGVLTFREPADAERVLAQADHELHGAQLSLRPAPPRAPARLLLQGLPPGTTPQRLE

SEQ ID NO: 8609 - protein, 75 aa, Homo sapiens
MFWKFDLHSSSHIDTLLEREDVTLKELMDEEDVLQECKAQNRKLIEFLLKAECLEDLVSFIIEEPPQDMDEKIRY

SEQ ID NO: 8610 - protein, 424 aa, Homo sapiens; identical to SEQ ID NO: 7427

SEQ ID NO: 8611 - protein, 95 aa, Homo sapiens
MEAADASRSNGSSPEARDARSPSGPSGSLENGTKADGKDAKTTNGHGGEAAEGKSLGSALKPGEGRSALFAGNEWRRPIIQFVESGDDKNSNYFS

SEQ ID NO: 8612 - protein, 1047 aa, Homo sapiens
MAPRLQLEKAAWRWAETVRPEEVSQEHIETAYRIWLEPCIRGVCRRNCKGNPNCLVGIGEHIWLGEIDENSFHNIDDPNCERRKKNSFVGLTNLGATCYVNTFLQVWFLNLELRQALYLCPSTCSDYMLGDGIQEEKDYEPQTICEHLQYLFALLQNSNRRYIDPSGFVKALGLDTGQQQDAQEFSKLFMSLLEDTLSKQKNPDVRNIVQQQFCGEYAYVTVCNQCGRESKLLSKFYELELNIQGHKQLTDCISEFLKEEKLEGDNRYFCENCQSKQNATRKIRLLSLPCTLNLQLMRFVFDRQTGHKKKLNTYIGFSEILDMEPYVEHKGGSYVYELSAVLIHRGVSAYSGHYIAHVKDPQSGEWYKFNDEDIEKMEGKKLQLGIEEDLEPSKSQTRKPKCGKGTHCSRNAYMLVYRLQTQEKPNTTVQVPAFLQELVDRDNSKFEEWCIEMAEMRKQSVDKGKAKHEEVKELYQRLPAGAEPYEFVSLEWLQKWLDESTPTKPIDNHACLCSHDKLHPDKISIMKRISEYAADIFYSRYGGGPRLTVKALCKECVVERCRILRLKNQLNEDYKTVNNLLKAAVKGSDGFWVGKSSLRSWRQLALEQLDEQDGDAEQSNGKMNGSTLNKDESKEERKEEEELNFNEDILCPHAVFFFSKYIFLNSGELCISENERRLVSKEAWSKLQQYFPKAPEFPSYKECCSQCKILEREGEENEALHKMIANEQKTSLPNLFQDKNRPCLSNWPEDTDVLYIVSQFFVEEWRKFVRKPTRCSPVSSVGNSALLCPHGGLMFTFASMTKEDSKLIALIWPSEWQMIQKLFVVDHVIKITRIEVGDVNPSETQYISEPKLCPECREGLLCQQQRDLREYTQATIYVHKVVDNKKVMKDSAPELNVSSSETEEDKEEAKPDGEKDPDFNQSNGGTKRQKISHQNYIAYQKQVIRRSMRHRKVRGEKALLVSANQTLKELKIQIMHAFSVAPFDQNLSIDGKILSDDCATLGTLGVIPESVILLKADEPIADYAAMDDVMQVCMPEEGFKGTGLLGH

SEQ ID NO: 8613 - protein, 480 aa, Homo sapiens; identical to SEQ ID NO: 8061

SEQ ID NO: 8614 - protein, 791 aa, Homo sapiens
MFWKFDLHSSSHIDTLLEREDVTLKELMDEEDVLQECKAQNRKLIEFLLKAECLEDLVSFIIEEPPQDMDEKIRYKYPNISCELLTSDVSQMNDRLGEDESLLMKLYSFLLNDSPLNPLLASFFSKVLSILISRKPEQIVDFLKKKHDFVDLIIKHIGTSAIMDLLLRLLTCIEPPQPRQDVLNWLNEEKIIQRLVEIVHPSQEEDRHSNASQSLCEIVRLSRDQMLQIQNSTEPDPLLATLEKQEIIEQLLSNIFHKEKNESAIVSAIQILLTLLETRRPTFEGHIEICPPGMSHSACSVNKSVLEAIRGRLGSFHELLLEPPKNMFFKYTWNNFLHTQVEICIALILASPFENTENATITDQDSTGDNLLLKHLFQKCQLIERILEAWEMNEKKQAEGGRRHGYMGHLTRIANCIVHSTDKGPNSALVQQLIKDLPDEVRERWETFCTSSLGETNKRNTVDLAFSDYQMQQMTSNFIDQFGFNDEKFADQDDIGNVSFDRVSDINFTLNTNESGNIALFEACCKERIQQFDDGGSDEEDIWEEKHIAFTPESQRRSSSGSTDSEESTDSEEEDGAKQDLFEPSSANTEDKMEVDLSEPPNWSANFDVPMETTHGAPLDSVGSDVWSTEEPMPTKETGWASFSEFTSSLSTKDSLRSNSPVEMETSTEPMDPLTPSAAALAVQPEAAGSVAMEASSDGEEDAESTDKVTETVMNGGMKETLSLTVDAKTETAVFKSEEGKLSTSQDAACKDAEECPETAEAKCAAPRPPSSSPEQSGVEIPALPGQWSQQ

SEQ ID NO: 8615 - protein, 499 aa, Homo sapiens
MFGDASTSLVVPEKVKTPMKSSKTDLQGSASPSKVEGVHTPRQKRSTPLKERQLSKPLSERTNSSDSERSPDLGHSTQIPRKVVYDQLNQILVSDAALPENVILVNTTDWQGQYVAELLQDQRKPVVCTCSTVEVQAVLSALLTRIQRYCNCNSSMPRPVKVAAVGGQSYLSSILRFFVKSLANKTSDWLGYMRFLIIPLGSHPVAKYLGSVDSKYSSSFLDSGWRDLFSRSEPPVSEQLDVAGRVMQYVNGAATTHQLPVAEAMLTCRHKFPDEDSYQKFIPFIGVVKVGLVEDSPSTAGDGDDSPVVSLTVPSTSPPSSSGLSRDATATPPSSPSMSSALAIVGSPNSPYGDVIGLQVDYWLGHPGERRREGDKRDASSKNTLKSVFRSVQVSRLPHSGEAQLSGTMAMTVVTKEKNKKVPTIFLSKKPREKEVDSKSQVIEGISRLICSAKQQQTMLRVSIDGVEWSDIKFFQLAAQWPTHVKHFPVGLFSGSKAT

SEQ ID NO: 8616 - protein, 144 aa, Homo sapiens
MVAMAEAEAGVAVEVRGLPPAVPDELLTLYFENRRRSGGGPVLSWQRLGCGGVLTFREPADAERVLAQADHELHGAQLSLRPAPPRAPARLLLQGLPPGTTPQRLEQHVQALLRASGLPVQPCCALASPRPDRALVQLPKPLSE

SEQ ID NO: 8617 - protein, 170 aa, Homo sapiens; identical to SEQ ID NO: 5442

SEQ ID NO: 8618 - protein, 89 aa, Homo sapiens
MVAMAEAEAGVAVEVRGLPPAVPDELLTLYFENRRRSGGGPVLSWQRLGCGGVLTFREPADAERVLAQADHELHGAQLSLRPAPPRAPA

SEQ ID NO: 8619 - protein, 401 aa, Homo sapiens
MCVEISLKTSEGDSMELEIWCLEMNEKCDKEIKVSYTVYNRLSLLLKSLLAITRVTPAYRLSRKQGHEYVILYRIYFGEVQLSGLGEGFQTVRVGTVGTPVGTITLSCAYRINLAFMSTRQFERTPPIMGIIIDHFVDRPYPSSSPMHPCNYRTAGEDTGVIYPSVEDSQEVCTTSFSTSPPSQLMVPGKEGGVPLAPNQPVHGTQADQERLATCTPSDRTHCAATPSSSEDTETVSNSSEGRASPHDVLETIFVRKVGAFVNKPINQVTLTSLDIPFAMFAPKNLELEDTDPMVNPPDSPETESPLQGSLHSDGSSGGSSGNTHDDFVMIDFKPAFSKDDILPMDLGTFYREFQNPPQLSSLSIDIGAQSMAEDLDSLPEKLAVHEKNVREFDAFVETLQ

SEQ ID NO: 8620 - protein, 715 aa, Homo sapiens; identical to SEQ ID NO: 5405

SEQ ID NO: 8621 - protein, 111 aa, Homo sapiens
MTGSNSHITILTLKVLPHFESLGKQEKIPNKMSAFRNHCPHLDSVGEITKEDLIQKSLGTCQDCKVQGPNLWACLENRCSYVGCGESQVDHSTIHSQETKHYLTVNLTTLR

SEQ ID NO: 8622 - protein, 75 aa, Homo sapiens
MAGQEDPVQREIHQDWANREYIEIITSSIKKIADFLNSFDMSCRSRLATLNEKLTALERRIEYIEARVTKGETLT

SEQ ID NO: 8623 - protein, 115 aa, Homo sapiens; identical to SEQ ID NO: 5430

SEQ ID NO: 8624 - protein, 358 aa, Homo sapiens; identical to SEQ ID NO: 7035

SEQ ID NO: 8625 - protein, 1349 aa, Homo sapiens
MADTDLFMECEEEELEPWQKISDVIEDSVVEDYNSVDKTTTAGNPLVQQGGQPLILTQNPAPGLGTMVTQPVLRPVQVMQNANHVTSSPVASQPIFITTQGFPVRNVRPVQNAMNQVGIVLNVQQGQTVRPITLVPAPGTQFVKPTVGVPQVFSQMTPVRPGSTMPVRPTTNTFTTVIPATLTIRSTVPQSQSQQTKSTPSTSTTPTATQPTSLGQLAVQSPGQSNQTTNPKLVSIASFVTVKRPGVTGENSNEVAKLVNTLNTIPSLGQSPGPVVVSNNSSAHGSQRTSGPESSMKVTSSIPVFDLQDGGRKICPRCNAQFRVTEALRGHMCYCCPEMVEYQKKGKSLDSEPSVPSAAKPPSPEKTAPVASTPSSTPIPALSPPTKVPEPNENVGDAVQTKLIMLVDDFYYGRDGGKVAQLTNFPKVATSFRCPHCTKRLKNNIRFMNHMKHHVELDQQNGEVDGHTICQHCYRQFSTPFQLQCHLENVHSPYESTTKCKICEWAFESEPLFLQHMKDTHKPGEMPYVCQVCQYRSSLYSEVDVHFRMIHEDTRHLLCPYCLKVFKNGNAFQQHYMRHQKRNVYHCNKCRLQFLFAKDKIEHKLQHHKTFRKPKQLEGLKPGTKVTIRASRGQAAVPVSSNDTPPSALQEAAPLTSSMDPLPVFLYPPVQRSIQKRAVRKMSVMGRQTCLECSFEIPDFPNHFPTYVHCSLCRYSTCCSRAYANHMINNHVPRKSPKYLALFKNSVSGIKLACTSCTFVTSVGDAMAKHLVFNPSHRSSSILPRGLTWIAHSRHGQTRDRVHDRNVKNMYPPPSFPTNKAATVKSAGATPAEPEELLTPLAPALPSPASTATPPPTPTHPQALALPPLATEGAECLNVDDQDEGSPVTQEPELASGGGGSGGVGKKEQLSVKKLRVVLFALCCNTEQAAEHFRNPQRRIRRWLRRFQASQGENLEGKYLSFEAEEKLAEWVLTQREQQLPVNEETLFQKATKIGRSLEGGFKISYEWAVRFMLRHHLTPHARRAVAHTLPKDVAENAGLFIDFVQRQIHNQDLPLSMIVAIDEISLFLDTEVLSSDDARGSENALQTVGTGEPWCDVVLAILADGTVLPTLVFYRGQMDQPANMPDSILLEAKESGYSDDEIMELWSTRVWQKHTACQRSKGMLVMDCHRTHLSEEVLAMLSASSTLPAVVPAGCSSKIQPLDVCIKRTVKNFLHKKWKEQAREMADTACDSDVLLQLVLVWLGEVLGVIGDCPELVQRSFLVASVLPGPDGNINSPTRNADMQEELIASLEEQLKLSGEHSESSTPRPRSSPEETIEPESLHQLFEGESETESFYGFEEADLDLMEI

SEQ ID NO: 8626 - protein, 186 aa, Homo sapiens
MFWKFDLHSSSHIDTLLEREDVTLKELMDEEDVLQECKAQNRKLIEFLLKAECLEDLVSFIIEEPPQDMDEKIRYKYPNISCELLTSDVSQMNDRLGEDESLLMKLYSFLLNDSPLNPLLASFFSKVLSILISRKPEQIVDFLKKKHDFVDLIIKHIGTSAIMDLLLRLLTCIEPPQPRQDVLNWL

SEQ ID NO: 8627 - protein, 95 aa, Homo sapiens
MSQSGAVSCCPGATNGSLGRSDGVAKMSPKDLFEQRKKYSNSNVIMHETSQYHVQHLATFIMDKSEAITSVDDAIRKLVQLSSKEKIWTQEMLLQ

SEQ ID NO: 8628 - protein, 578 aa, Homo sapiens
MDDSKQESTTSKEEETNIISSIVPSTQDIYQRQNSSDVHKSLLPAVDETTCGHTHFQQMIDKYINEANLIPEKTDLQELEHIFPNLHHQLFKPLEPHPDFDLSSSSSGISPDNRDFYQRSDSSSESHCATGLSKSTVYFTALRRTSMHSSLNTSPNQQPDTNLAHVGAHSFATENIIGGSEQCFEQLQPEYSSQEESQHADLPSIFSIEARDSSQGMKNQNYPSEEHTEILQNKKKIVHFQLSIGNLSSVYSSSDEANVFDQLNVQHSTPCGSNSSECSTKHQLESRKESMGFEELSKRGVVTMLQSQGLIEDNKNETCRVLDINPQVEETDSRLCVRTVEMGTSIQAPYSLTTQNEKYFENSAETDIPKITKKLSQLGESELFASSGSFSLQSSIPVWETETGHGIMEEPELTLISTTDTSIAEMDFANLTLEEKSENEAKCFFQVSEFLPLVSATEASDYPAVSELSIEKAAASTAETPRRLTPVPGSLQEAFIKRKKSFMERSHQRQKEIRNKIHVSENSQIKTVKEKPSISSSVSRLKGVNKVRASFPEDRKTTQALRHQRGLRLYNQLAEVKQ

SEQ ID NO: 8629 - protein, 144 aa, Homo sapiens; identical to SEQ ID NO: 8616

SEQ ID NO: 8630 - protein, 81 aa, Homo sapiens
MVAMAEAEAGVAVEVRGLPPAVPDELLTLYFENRRRSGGGPVLSWQRLGCGGVLTFREPADAERVLAQADHELHGAQLSLR

SEQ ID NO: 8631 - protein, 511 aa, Homo sapiens
MAAFKLDFLPEMMVDHCSLNSSPVSKKMNGTLDHPDQPDLDAIKMFVGQVAAWSEKDLRELFEQYGAVYEINVLRDRSQNPPQSKGCCFVTFYTRKAALEAQNALHNMKVLPGMHHPIQMKPADSEKNNVEDRKLFIGMISKKCTENDIRVMFSSFGQIEECRILRGPDGLSRGCAFVTFTTRAMAQTAIKAMHQAQTMEGCSSPMVVKFADTQKDKEQKRMAQQLQQQMQQISAASVWGNLAGLNTLGPQYLALYLQLLQQTASSGNLNTLSSLHPMGGLNAMQLQNLAALAAAASAAQNTPSGTNALTTSSSPLSVLTSSGSSPSSSSSNSVNPIASLGALQTLAGATAGLNVGSLAGMAALNGGLGSSGLSNGTGSTMEALTQAYSGIQQYAAAALPTLYNQNLLTQQSIGAAGSQKEGPEGANLFIYHLPQEFGDQDLLQMFMPFGNVVSAKVFIDKQTNLSKCFGFVSYDNPVSAQAAIQSMNGFQIGMKRLKVQLKRSKNDSKPY

SEQ ID NO: 8632 - protein, 376 aa, Homo sapiens
MKDVPGFLQQSQNSGPGQPAVWHRLEELYTKKLWHQLTLQVLDFVQDPCFAQGDGLIKLYENFISEFEHRVNPLSLVEIILHVVRQMTDPNVALTFLEKTREKVKSSDEAVILCKTAIGALKLNIGDLQVTKETIEDVEEMLNNLPGVTSVHSRFYDLSSKYYQTIGNHASYYKDALRFLGCVDIKDLPVSEQQERAFTLGLAGLLGEGVFNFGELLMHPVLESLRNTDRQWLIDTLYAFNSGNVERFQTLKTAWGQQPDLAANEAQLLRKIQLLCLMEMTFTRPANHRQLTFEEIAKSAKITVNEVELLVMKALSVGLVKGSIDEVDKRVHMTWVQPRVLDLQQIKGMKDRLEFWCTDVKSMEMLVEHQAHDILT

SEQ ID NO: 8633 - protein, 162 aa, Homo sapiens
MTSKKLVNSVAGCADDALAGLVACNPNLQLLQGHRVALRSDLDSLKGRVALLSGGGSGHEPAHAGFIGKGMLTGVIAGAVFTSPAVGSILAAIRAVAQAGTVGTLLIVKNYTGDRLNFGLAREQARAEGIPVEMVVIGDDSAFTVLKKAGRRGLCGTVLIHK

SEQ ID NO: 8634 - protein, 2621 aa, Homo sapiens
MLTDSGGGGTSFEEDLDSVAPRSAPAGASEPPPPGGVGLGIRTVRLFGEAGPASGVGSSGGGGSGSGTGGGDAALDFKLAAAVLRTGGGGGASGSDEDEVSEVESFILDQEDLDNPVLKTTSEIFLSSTAEGADLRTVDPETQARLEALLEAAGIGKLSTADGKAFADPEVLRRLTSSVSCALDEAAAALTRMKAENSHNAGQVDTRSLAEACSDGDVNAVRKLLDEGRSVNEHTEEGESLLCLACSAGYYELAQVLLAMHANVEDRGNKGDITPLMAASSGGYLDIVKLLLLHDADVNSQSATGNTALTYACAGGFVDIVKVLLNEGANIEDHNENGHTPLMEAASAGHVEVARVLLDHGAGINTHSNEFKESALTLACYKGHLDMVRFLLEAGADQEHKTDEMHTALMEACMDGHVEVARLLLDSGAQVNMPADSFESPLTLAACGGHVELAALLIERGANLEEVNDEGYTPLMEAAREGHEEMVALLLAQGANINAQTEETQETALTLACCGGFSEVADFLIKAGADIELGCSTPLMEASQEGHLELVKYLLASGANVHATTATGDTALTYACENGHTDVADVLLQAGADLEHESEGGRTPLMKAARAGHLCTVQFLISKGANVNRATANNDHTVVSLACAGGHLAVVELLLAHGADPTHRLKDGSTMLIEAAKGGHTNVVSYLLDYPNNVLSVPTTDVSQLPPPSQDQSQVPRVPTHTLAMVVPPQEPDRTSQENSPALLGVQKGTSKQKSSSLQVADQDLLPSFHPYQPLECIVEETEGKLNELGQRISAIEKAQLKSLELIQGEPLNKDKIEELKKNREEQVQKKKKILKELQKVERQLQMKTQQQFTKEYLETKGQKDTVSLHQQCSHRGVFPEGEGDGSLPEDHFSELPQVDTILFKDNDVDDEQQSPPSAEQIDFVPVQPLSSPQCNFSSDLGSNGTNSLELQKVSGNQQIVGQPQIAITGHDQGLLVQEPDGLMVATPAQTLTDTLDDLIAAVSTRVPTGSNSSSQTTECLTPESCSQTTSNVASQSMPPVYPSVDIDAHTESNHDTALTLACAGGHEELVSVLIARDAKIEHRDKKGFTPLILAATAGHVGVVEILLDKGGDIEAQSERTKDTPLSLACSGGRQEVVDLLLARGANKEHRNVSDYTPLSLAASGGYVNIIKILLNAGAEINSRTGSKLGISPLMLAAMNGHVPAVKLLLDMGSDINAQIETNRNTALTLACFQGRAEVVSLLLDRKANVEHRAKTGLTPLMEAASGGYAEVGRVLLDKGADVNAPPVPSSRDTALTIAADKGHYKFCELLIHRGAHIDVRNKKGNTPLWLASNGGHFDVVQLLVQAGADVDAADNRKITPLMSAFRKGHVKVVQYLVKEVNQFPSDIECMRYIATITDKELLKKCHQCVETIVKAKDQQAAEANKNASILLKELDLEKSREESARGSQALAAKREKRKEKARGSKKKEEQKRKQEEDEENKPKENSELPEDEDEEENDEDVEQEVPIEPPSATTTTTIGISATSATFTNVFGKKRANVVTTPSTNRKNKKNKTKETPPTAHLILPEQHMSLAQQKADKNKINGEPRGGGAGGNSDSDNLDSTDCNSESSSGGKSQELNFVMDVNSSKYPSLLLHSQEEKTSTATSKTQTRLEGEVTPNSLSTSYKTVSLPLSSPNIKLNLTSPKRGQKREEGWKEVVRRSKKLSVPASVVSRIMGRGGCNITAIQDVTGAHIDVDKQKDKNGERMITIRGGTESTRYAVQLINALIQDPAKELEDLIPKNHIRTPASTKSIHANFSSGVGTTAASSKNAFPLGAPTLVTSQATTLSTFQPANKLNKNVPTNVRSSFPVSLPLAYPHPHFALLAAQTMQQIRHPRLPMAQFGGTFSPSPNTWGPFPVRPVNPGNTNSSPKHNNTSRLPNQNGTVLPSESAGLATASCPITVSSVVAASQQLCVTNTRTPSSVRKQLFACVPKTSPPATVISSVTSTCSSLPSVSSAPITSGQAPTTFLPASTSQAQLSSQKMESFSAVPPTKEKVSTQDQPMANLCTPSSTANSCSSSASNTPGAPETHPSSSPTPTSSNTQEEAQPSSVSDLSPMSMPFASNSEPAPLTLTSPRMVAADNQDTSNLPQLAVPAPRVSHRMQPRGSFYSMVPNATIHQDPQSIFVTNPVTLTPPQGPPAAVQLSSAVNIMNGSQMHINPANKSLPPTFGPATLFNHFSSLFDSSQVPANQGWGDGPLSSRVATDASFTVQSAFLGNSVLGHLENMHPDNSKAPGFRPPSQRVSTSPVGLPSIDPSGSSPSSSSAPLASFSGIPGTRVFLQGPAPVGTPSFNRQHFSPHPWTSASNSSTSAPPTLGQPKGVSASQDRKIPPPIGTERLARIRQGGSVAQAPAGTSFVAPVGHSGIWSFGVNAVSEGLSGWSQSVMGNHPMHQQLSDPSTFSQHQPMERDDSGMVAPSNIFHQPMASGFVDFSKGLPISMYGGTIIPSHPQLADVPGGPLFNGLHNPDPAWNPMIKVIQNSTECTDAQQASLLPSVPALKGEIPSPQLTRPKKRIGRPMVASPNQRHQDHLRPKVPAGVQELTHCPDTPLLPPSDSRGHNSSNSPSLQAGGAEGAGDRGRDTR

SEQ ID NO: 8635 - protein, 250 aa, Homo sapiens
MGDIPAVGLSSWKASPGKVTEAVKEAIDAGYRHFDCAYFYHNEREVGAGIRCKIKEGAVRREDLFIATKLWCTCHKKSLVETACRKSLKALKLNYLDLYLIHWPMGFKPPHPEWIMSCSELSFCLSHPRVQDLPLDESNMVIPSDTDFLDTWEAMEDLVITGLVKNIGVSNFNHEQLERLLNKPGLRFKPLTNQILIRFQIQRNVIVIPGSITPSHIKENIQVFDFELTQHDMDNILSLNRNLRLAMFPM

SEQ ID NO: 8636 - protein, 174 aa, Homo sapiens
MLTENGQVLSCGSNSFGQLGVPHGPRRCVVPQAIELHKEKVVCIAAGLRHAVAATASGIVFQWGTGLASCGRRLCPGQTLPLFFTAKEPSRVTGLENSKAMCVLAGSDHSASLTDAGEVYVWGSNKHGQLANEAAFLPVPQKIEAHCFQNEKVTAIWSGWTHLVAQTGLLWLRA

SEQ ID NO: 8637 - protein, 75 aa, Homo sapiens
MNRRRKFLLASVLALQNSSFIYPSCQKCFSRIILVSKRSNCPKCGSTGESGNANYRYKLSLKVAESNKLFVITVF

SEQ ID NO: 8638 - protein, 83 aa, Homo sapiens
MVAMAEAEAGVAVEVRGLPPAVPDELLTLYFENRRRSGGGPVLSWQRLGCGGVLTFREPADAERVLAQADHELHGAQLSLRPA

SEQ ID NO: 8639 - protein, 175 aa, Homo sapiens
MLSEEEKEELKAELVQLEDEITTLRQVLSAKERHLVEIKQKLGMNLMNELKQNFSKSWHDMQTTTAYKKTHETLSHAGQKATAAFSNVGTAISKKFGDMSYSIRHSISMPAMRNSPTFKSFEERVETTVTSLKTKVGGTNPNGGSFEEVLSSTAHASAQSLAGGSRRTKEEELQC

SEQ ID NO: 8640 - protein, 76 aa, Homo sapiens
MNRRRKFLLASVLALQNSSFIYPSCQKCFSRIILVSKRSNCPKCGSTGESGNANYRYKLSLKVAESNKLFVITVFG

SEQ ID NO: 8641 - protein, 151 aa, Homo sapiens; identical to SEQ ID NO: 4740

SEQ ID NO: 8642 - protein, 89 aa, Homo sapiens
MEAADASRSNGSSPEARDARSPSGPSGSLENGTKADGKDAKTTNGHGGEAAEGKSLGSALKPGEGRSALFAGNEWRRPIIQFVESGDDK

SEQ ID NO: 8643 - protein, 513 aa, Homo sapiens
MEVGITIQHAYEKQHPWIDLTSIGFSYVIDFNTMGQINRQTQRQRRVRRRLDLIYPMVTGTLPKAQSWPVSPGPATSPPMSPCSCPQCVLVMSVKAAVVNGSTGPLQLPVTRKNMPPPGVVKLPPLPGSGAKPLDSTGTIRGPLKTAPSQVIRRQASSMPTGTTMGSPASPPGPNSKTGRVALATLNRTNLQRLAIAQSRVLIASGVPTVPVKNLNGSSPVNPALAGITGILMSAAGLPVCLTRPPKLVLHPPPVSKSEIKSIPGVSNTSRKTTKKQAKKGKTPEEVLKKYLQKVRHPPDEDCTICMERLTAPSGYKGPQPTVKPDLVGKLSRCGHVYHIYCLVAMYNNGNKDGSLQCPTCKTIYGVKTGTQPPGKMEYHLIPHSLPGHPDCKTIRIIYSIPPGIQGPEHPNPGKSFSARGFPRHCYLPDSEKGRKVLKLLLVAWDRRLIFAIGTSSTTGESDTVIWNEVHHKTEFGSNLTGHGYPDANYLDNVLAELAAQGISEDSTAQEKD

SEQ ID NO: 8644 - protein, 137 aa, Homo sapiens
MSSVQSQQEQLSQSDPSPSPNSCSSFELIDMDAGSLYEPVSPHWFYCKIIDSKETWIPFNSEDSQQLEEAYSSGKGCNGRVVPTDGGRYDVHLGERMRYAVYWDELASEVRRCTWFYKGDKDNKYVPYSESFSQVLE

SEQ ID NO: 8645 - protein, 39 aa, Homo sapiens
MFWKFDLHSSSHIDTLLEREDVTLKELMDEEDVLQECKA

SEQ ID NO: 8646 - protein, 717 aa, Homo sapiens
MLMTLEMTELTDPHHTMGDYKVAHPQDPHHPSEKPVIHCHKCGEPCKGEVLRVQTKHFHIKCFTCKVCGCDLAQGGFFIKNGEYLCTLDYQRMYGTRCHGCGEFVEGEVVTALGKTYHPNCFACTICKRPFPPGDRVTFNGRDCLCQLCAQPMSSSPKETTFSSNCAGCGRDIKNGQALLALDKQWHLGCFKCKSCGKVLTGEYISKDGAPYCEKDYQGLFGVKCEACHQFITGKVLEAGDKHYHPSCARCSRCNQMFTEGEEMYLQGSTVWHPDCKQSTKTEEKLRPTRTSSESIYSRPGSSIPGSPGHTIYAKVDNEILDYKDLAAIPKVKAIYDIERPDLITYEPFYTSGYDDKQERQSLGESAALSPTPSAEGYQDVRDRMIHRSTSQGSINSPVYSRHSYTPTTSRSPQHFHRPGNEPSSGRNSPLPYRPDSRPLTPTYAQAPKHFHVPDQGINIYRKPPIYKQHAALAAQSKSSEDIIKFSKFPAAQAPDPSETPKIETDHWPGPPSFAVVGPDMKRRSSGREEDDEELLRRRQLQEEQLMKLNSGLGQLILKEEMEKESRERSSLLASRYDSPINSASHIPSSKTASLPGYGRNGLHRPVSTDFAQYNSYGDVSGGVRDFQTLPDGHMPAMRMDRGVSMPNMLEPKIFPYEMLMVTNRGRNKILREVDRTRLERHLAPEVFREIFGMSIQEFDRLPLWRRNDMKKKAKLF

SEQ ID NO: 8647 - protein, 715 aa, Homo sapiens; identical to SEQ ID NO: 5405

SEQ ID NO: 8648 - protein, 119 aa, Homo sapiens
METDLNSQDRKDLDKFIKFFALKTVQVIVQARLGEKICTRSSSSPTGSDWFNLAIKDIPEVTHEAKKALAGQLPAVGRSMCVEISLKTSEGDSMELEIWCLEMNEKCDKEIKVSYTVYN

SEQ ID NO: 8649 - protein, 139 aa, Homo sapiens
MADTDLFMECEEEELEPWQKISDVIEDSVVEDYNSVDKTTTVSVSQQPVSAPVPIAAHASVAGHLSTSTTVSSSGAQNSDSTKKTLVTLIANNNAGNPLVQQGGQPLILTQNPAPGLGTMVTQPVLRPVQVMQNANHVT

SEQ ID NO: 8650 - protein, 163 aa, Homo sapiens
MHDKGITTAAVCVYPARVCDAVKALKAAGCNIPVASVAAGFPAGQTHLKTRLEEIRLAVEDGATEIDVVINRSLVLTGQWEALYDEIRQFRKACGEAHLKTILATGELGTLTNVYKASMIAMMAGSDFIKTSTGKETVNATFPVAIVMLRAIRDFFWKTGNKV

SEQ ID NO: 8651 - protein, 151 aa, Homo sapiens
MADTDLFMECEEEELEPWQKISDVIEDSVVEDYNSVDKTTTVSVSQQPVSAPVPIAAHASVAGHLSTSTTVSSSGAQNSDSTKKTLVTLIANNNAGNPLVQQGGQPLILTQNPAPGLGTMVTQPVLRPVQVMQNANHVTSSPVASQPIFIT

SEQ ID NO: 8652 - protein, 83 aa, Homo sapiens
MSQSGAVSCCPGATNGSLGRSDGVAKMSPKDLFEQRKKYSNSNVIMHETSQYHVQHLATFIMDKSEAITSVDDAIRKLVQLSS

SEQ ID NO: 8653 - protein, 121 aa, Homo sapiens
MAGRPLRIGDQLVLEEDYDETYIPSEQEILEFAREIGIDPIKEPELMWLAREGIVAPLPGEWKPCQDITGDIYYFNFANGQSMWDHPCDEHYRSLVIQERAKLSTSGAIKKKKKKKEKKDK

SEQ ID NO: 8654 - protein, 998 aa, Homo sapiens; identical to SEQ ID NO: 7614

SEQ ID NO: 8655 - protein, 167 aa, Homo sapiens
MGTTAPGPIHLLELCDQKLMEFLCNMDNKDLVWLEEIQEEAERMFTREFSKEPELMPKTPSQKNRRKKRRISYVQDENRDPIRRRLSRRKSRSSQLSSRRLRSKDSVEKLATVVGENGSVLRRVTRAAAAAAAATMALAAPSSPTPESPTMLTKKPEDNHTQCQLVP

SEQ ID NO: 8656 - protein, 204 aa, Homo sapiens
MEAQAQGLLETEPLQGTDEDAVASADFSSMLSEEEKEELKAELVQLEDEITTLRQVLSAKERHLVEIKQKLGMNLMNELKQNFSKSWHDMQTTTAYKKTHETLSHAGQKATAAFSNVGTAISKKFGDMSYSIRHSISMPAMRNSPTFKSFEERVETTVTSLKTKVGGTNPNGGSFEEVLSSTAHASAQSLAGGSRRTKEEELQC

SEQ ID NO: 8657 - protein, 340 aa, Homo sapiens
MAAARDPPEVSLREATQRKLRRFSELRGKLVARGEFWDIVAITAADEKQELAYNQQLSEKLKRKELPLGVQYHVFVDPAGAKIGNGGSTLCALQCLEKLYGDKWNSFTILLIHSGGYSQRLPNASALGKIFTALPLDIPECSGKTSCIIQSILDSRCSVAPGSVVEYSRLGPDVSVGENCIISGSYILTKAALPAHSFVCSLSLKMNRCLKYATMAFGVQDNLKKSVKTLSDIKLLQFFGVCFLSCLDVWNLKVTEELFSGNKTCLSLWTARIFPVCSSLSDSVITSLKMLNAVKNKSAFSLNSYKLLSIEEMLIYKDVEDMITYREQIFLEISLKSSLM

SEQ ID NO: 8658 - protein, 290 aa, Homo sapiens
MAELTALESLIEMGFPRGRAEKALALTGNQGIEAAMDWLMEHEDDPDVDEPLETPLGHILGREPTSSEQGGLEGSGSAAGEGKPALSEEERQEQTKRMLELVAQKQREREEREEREALERERQRRRQGQELSAARQRLQEDEMRRAAEERRREKAEELAARQRVREKIERDKAERAKKYGGSVGSQPPPVAPEPGPVPSSPSQEPPTKREYDQCRIQVRLPDGTSLTQTFRAREQLAAVRLYVELHRGEELGGGQDPVQLLSGFPRRAFSEADMERPLQELGLVPSAVLI

SEQ ID NO: 8659 - protein, 102 aa, Homo sapiens; identical to SEQ ID NO: 6784

SEQ ID NO: 8660 - protein, 92 aa, Homo sapiens
MLSEEEKEELKAELVQLEDEITTLRQVLSAKERHLVEIKQKLGMNLMNELKQNFSKSWHDMQTTTAYKKTHETLSHAGQKATAAFSNVGTAI

SEQ ID NO: 8661 - protein, 1246 aa, Homo sapiens; identical to SEQ ID NO: 5898

SEQ ID NO: 8662 - protein, 890 aa, Homo sapiens
MDQPEAPCSSTGPRLAVARELLLAALEELSQEQLKRFRHKLRDVGPDGRSIPWGRLERADAVDLAEQLAQFYGPEPALEVARKTLKRADARDVAAQLQERRLQRLGLGSGTLLSVSEYKKKYREHVLQLHARVKERNARSVKITKRFTKLLIAPESAAPEEAMGPAEEPEPGRARRSDTHTFNRLFRRDEEGRRPLTVVLQGPAGIGKTMAAKKILYDWAAGKLYQGQVDFAFFMPCGELLERPGTRSLADLILDQCPDRGAPVPQMLAQPQRLLFILDGADELPALGGPEAAPCTDPFEAASGARVLGGLLSKALLPTALLLVTTRAAAPGRLQGRLCSPQCAEVRGFSDKDKKKYFYKYFRDERRAERAYRFVKENETLFALCFVPFVCWIVCTVLRQQLELGRDLSRTSKTTTSVYLLFITSVLSSAPVADGPRLQGDLRNLCRLAREGVLGRRAQFAEKELEQLELRGSKVQTLFLSKKELPGVLETEVTYQFIDQSFQEFLAALSYLLEDGGVAAAAGGVGTLLRGDAQPHSHLVLTTRFLFGLLSAERMRDIERHFGCMVSERVKQEALRWVQGQGQGCPGVAPEVTEGAKGLEDTEEPEEEEEGEEPNYPLELLYCLYETQEDAFVRQALCRFPELALQRVRFCRMDVAVLSYCVRCCPAGQALRLISCRLVAAQEKKKKSLGKRLQASLGGGSSQGTTKQLPASLLHPLFQAMTDPLCHLSSLTLSHCKLPDAVCRDLSEALRAAPALTELGLLHNRLSEAGLRMLSEGLAWPQCRVQTVRVQLPDPQRGLQYLVGMLRQSPALTTLDLSGCQLPAPMVTYLCAVLQHQGCGLQTLSLASVELSEQSLQELQAVKRAKPDLVITHPALDGHPQPPKELISTF

SEQ ID NO: 8663 - protein, 79 aa, Homo sapiens
MSQSGAVSCCPGATNGSLGRSDGVAKMSPKDLFEQRKKYSNSNVIMHETSQYHVQHLATFIMDKSEAITSVDDAIRKLV

SEQ ID NO: 8664 - protein, 180 aa, Homo sapiens
MGDKKSPTRPKRQPKPSSDEGYWDCSVCTFRNSAEAFKCMMCDVRKGTSTRKPRPVSQLVAQQVTQQFVPPTQSKKEKKDKVEKEKSEKETTSKKNSHKKTRPRLKNVDRSSAQHLEVTVGDLTVIITDFKEKTKSPPASSAASADQHSQSGSSSDNTERGMSRSSSPRGEASSLNGESH

SEQ ID NO: 8665 - protein, 731 aa, Homo sapiens
MGSGEEPGQSGASLRTGPMVQGRGIMTTGSGQEPGQSGTSLRTGPMGSLGQAEQVSSMPMGSLEHEGLVSLRPVGLQEQEGPMSLGPVGSAGPVETSKGLLGQEGLVEIAMDSPEQEGLVGPMEITMGSLEKAGPVSPGCVKLAGQEGLVEMVLLMEPGAMRFLQLYHEDLLAGLGDVALLPLEGPDMTGFRLCGAQASCQAAEEFLRSLLGSISCHVLCLEHPGSARFLLGPEGQHLLQGLEAQFQCVFGTERLATATLDTGLEEVDPTEALPVLPGNAHTLWTPDSTGGDQEDVSLEEVRELLATLEGLDLDGEDWLPRELEEEGPQEQPEEEVTPGHEEEEPVAPSTVAPRWLEEEAALQLALHRSLEPQGQVAEQEEAAALRQALTLSLLEQPPLEAEEPPDGGTDGKAQLVVHSAFEQDVEELDRALRAALEVHVQEETVGPWRRTLPAELRARLERCHGVSVALRGDCTILRGFGAHPARAARHLVALLAGPWDQSLAFPLAASGPTLAGQTLKGPWNNLERLAENTGEFQEVVRAFYDTLDAARSSIRVVRVERVSHPLLQQQYELYRERLLQRCERRPVEQVLYHGTTAPAVPDICAHGFNRSFCGRNATVYGKGVYFARRASLSVQDRYSPPNADGHKAVFVARVLTGDYGQGRRGLRAPPLRGPGHVLLRYDSAVDCICQPSIFVIFHDTQALPTHLITCEHVPRASPDDPSGLPGRSPDT

SEQ ID NO: 8666 - protein, 360 aa, Homo sapiens
MQVYEGLDIITNKVSAQEQRICRHHMISFVDPLVTNYTVVDFRNRATALIYLPETKFLLLWEEPIITLNLCSGKFLSIPRSLQVFEETGISHSEFLHRQHTEEGGGPLGGPLKFSNPCILWLHADQAVLDERLDKRVDDMLAAGLLEELRDFHRRYNQKNVSENSQDYQHGIFQSIGFKEFHEYLITEGKCTLETSNQLLKKGIEALKQVTKRYARKQNRWVKNRFLSRPGPIVPPVYGLEVSDVSKWEESVLEPALEIVQSFIQGHKPTATPIKMPYNEAENKRSYHLCDLCDRIIIGDREWAAHIKSKSHLNQLKKRRRLDSDAVNTIESQSVSPDHNKEPKEKGSPGQNDQELKCSV

SEQ ID NO: 8667 - protein, 275 aa, Homo sapiens; identical to SEQ ID NO: 4746

SEQ ID NO: 8668 - protein, 563 aa, Homo sapiens
METAKQKALEVANRLYQKDLRAPDVVIGADTIVTVGGLILEKPVDKQDAYRMLSRLSGREHSVFTGVAIVHCSSKDHQLDTRVSEFYEETKVKFSELSEELLWEYVHSGEPMDKAGGYGIQALGGMLVESVHGDFLNVVGFPLNHFCKQLVKLYYPPRPEDLRRSVKHDSIPAADTFEDLSDVEGGGSEPTQRDAGSRDEKAEAGEAGQATAEAECHRTRETLPPFPTRLLELIEGFMLSKGLLTACKLKVFDLLKDEAPQKAADIASKVDASACGMERLLDICAAMGLLEKTEQGYSNTETANVYLASDGEYSLHGFIMHNNDLTWNLFTYLEFAIREGTNQHHRALGKKAEDLFQDAYYQSPETRLRFMRAMHGMTKLTACQVATAFNLSRFSSACDVGGCTGALARELAREYPRMQVTVFDLPDIIELAAHFQPPGPQAVQIHFAAGDFFRDPLPSAELYVLCRILHDWPDDKVHKLLSRVAESCKPGAGLLLVETLLDEEKRVAQRALMQSLNMLVQTEGKERSLGEYQCLLELHGFHQVQVVHLGGVLDAILATKVAP

SEQ ID NO: 8669 - protein, 275 aa, Homo sapiens; identical to SEQ ID NO: 4746

SEQ ID NO: 8670 - protein, 332 aa, Homo sapiens
MEYLGGGSALDLLKPGPLEETYIATILREILKGLDYLHSERKIHRDIKAANVLLSEQGDVKLADFGVAGQLTDTQIKRNTFVGTPFWMAPEVIKQSAYDFKADIWSLGITAIELAKGEPPNSDLHPMRVLFLIPKNSPPTLEGQHSKPFKEFVEACLNKDPRFRPTAKELLKHKFITRYTKKTSFLTELIDRYKRWKSEGHGEESSSEDSDIDGEAEDGEQGPIWTFPPTIRPSPHSKLHKGTALHSSQKPAEPVKRQPRSQCLSTLVRPVFGELKEKHKQSGGSVGALEELENAFSLAEESCPGISDKLMVHLVERVQRFSHNRNHLTSTR

SEQ ID NO: 8671 - protein, 92 aa, Homo sapiens
MNFTPTHTPVCRKRTVVSKRGVAVSGPTKRRGMADSLESTPLPSPEDRLAKLHPSKELLEYYQKKMAECEAENEDLLKKLELYKEACEGQHK

SEQ ID NO: 8672 - protein, 142 aa, Homo sapiens
MAQKENSYPWPYGRQTAPSGLSTLPQRVLRKEPVTPSALVLMSRSNVQPTAAPGQKVMENSSGTPDILTRRHFTIDDFEIGRPLGKGKFGNVYLAREKKSHFIVALKVLFKSQIEKEGVEHQLRREIEIQAHLQSWRSWQML

SEQ ID NO: 8673 - protein, 166 aa, Homo sapiens
MDQEDSESKTVSEHGERDWMTAKKFWKPGDSLAPPEVDFDRLLASLQDLSELVVEGDTQVTPVPGGARLRTLEPIPLKLYRNGIMMFDGPFQPFYDPSTQRCLRDILDGFFPSELQRLYPNGVPFKVISCSSNHTFGDFEGSGDTQPPQTPPILRGSRCTPWGTPV

SEQ ID NO: 8674 - protein, 490 aa, Homo sapiens
MQSLDDATKQLDFTRKTLAEKKQELDKLRNEWASHTAALTNKHSQELTNEKEKALQAQVQYQQQHEQQKKDLEILHQQNIHQLQNRLSELEAANKDLTERKYKGDSTIRELKAKLSGVEEELQRTKQEVLSLRRENSTLDVECHEKEKHVNQLQTKVAVLEQEIKDKDQLVLRTKEAFDTIQEQKVVLEENGEKNQVQLGKLEATIKSLSAELLKANEIIKKLQGDLKTLMGKLKLKNTVTIQQEKLLAEKEEKLQKEQKELQDVGQSLRIKEQEVCKLQEQLEATVKKLEESKQLLKNNEKLITWLNKELNENQLVRKQDVLGPSTTPPAHSSSNTIRSGISPNLNVVDGRLTYPTCGIGYPVSSAFAFQNTFPHSISAKNTSHPGSGTKVQFNLQFTKPNASLGDVQSGATISMPCSTDKENGENVGLESKYLKKREDSIPLRGLSQNLFSNSDHQRDGTLGALHTSSKPTALPSASSAYFPGQLPNS

SEQ ID NO: 8675 - protein, 1003 aa, Homo sapiens
MLRTAGRDGLCRLSTYLEELEAVELKKFKLYLGTATELGEGKIPWGSMEKAGPLEMAQLLITHFGPEEAWRLALSTFERINRKDLWERGQREDLVRDTPPGGPSSLGNQSTCLLEVSLVTPRKDPQETYRDYVRRKFRLMEDRNARLGECVNLSHRYTRLLLVKEHSNPMQVQQQLLDTGRGHARTVGHQASPIKIETLFEPDEERPEPAAVVMQGAAGIGKSMLAHKVMLDWADGKLFQGRFDYLFYINCREMNQSATECSMQDLIFSCWPEPSAPLQELIRVPERLLFIIDGFDELKPSFHDPQGPWCLCWEEKRPTELLLNSLIRKKLLPELSLLITTRPTALEKLHRLLEHPRHVEILGFSEAERKEYFYKYFHNAEQAGQVFNYVRDNEPLFTMCFVPLVCWVVCTCLQQQLEGGGLLRQTSRTTTAVYMLYLLSLMQPKPGAPRLQPPPNQRGLCSLAADGLWNQKILFEEQDLRKHGLDGEDVSAFLNMNIFQKDINCERYYSFIHLSFQEFFAAMYYILDEGEGGAGPDQDVTRLLTEYAFSERSFLALTSRFLFGLLNEETRSHLEKSLCWKVSPHIKMDLLQWIQSKAQSDGSTLQQGSLEFFSCLYEIQEEEFIQQALSHFQVIVVSNIASKMEHMVSSFCLKRCRSAQVLHLYGATYSADGEDRARCSAGAHTLLVQLPERTVLLDAYSEHLAAALCTNPNLIELSLYRNALGSRGVKLLCQGLRHPNCKLQNLRLKRCRISSSACEDLSAALIANKNLTRMDLSGNGVGFPGMMLLCEGLRHPQCRLQMIQLRKCQLESGACQEMASVLGTNPHLVELDLTGNALEDLGLRLLCQGLRHPVCRLRTLWLKICRLTAAACDELASTLSVNQSLRELDLSLNELGDLGVLLLCEGLRHPTCKLQTLRLGICRLGSAACEGLSVVLQANHNLRELDLSFNDLGDWGLWLLAEGLQHPACRLQKLWLFGMDLNKMTHSRLAALRVTKPYLDIGC

SEQ ID NO: 8676 - protein, 838 aa, Homo sapiens; identical to SEQ ID NO: 5559

SEQ ID NO: 8677 - protein, 54 aa, Homo sapiens
MGNSDSQYTLQGSKNHSNTITGAKQIPCSLKIRGIHAKEEKSLHGWGHGSNGAG

SEQ ID NO: 8678 - protein, 422 aa, Homo sapiens
MASLSRALRVAAAHPRQSPTRGMGPCNLSSAAGPTAEKSVPYQRTLKEGQGTSVVAQGPSRPLPSTANVVVIGGGSLGCQTLYHLAKLGMSGAVLLERERLTSGTTWHTAGLLWQLRPSDVEVELLAHTRRVVSRELEEETGLHTGWIQNGGLFIASNRQRLDEYKRLMSLGKAYGVESHVLSPAETKTLYPLMNVDDLYGTLYVPHDGTMDPAGTCTTLARAASARGAQVIENCPVTGIRVWTDDFGVRRVAGVETQHGSIQTPCVVNCAGVWASAVGRMAGVKVPLVAMHHAYVVTERIEGIQNMPNVRDHDASVYLRLQGDALSVGGYEANPIFWEEVSDKFAFGLFDLDWEVFTQHIEGAINRVPVLEKTGIKSTVCGPESFTPDHKPLMGEAPELRGFFLGCGFNSAGESGQALLAP

SEQ ID NO: 8679 - protein, 108 aa, Homo sapiens
MSMLKPSGLKAPTKILKPGSTALKTPTAVVAPVEKTISSEKASSTPSSETQEEFVDDFRVGERVWVNGNKPGFIQFLGETQFAPGQWAGIVLDEPIGKNDGSVAGVRY

SEQ ID NO: 8680 - protein, 715 aa, Homo sapiens
MKRGRLPSSSEDSDDNGSLSTTWSQNSRSQHRRSSCSRHEDRKPSEVFRTDLITAMKLHDSYQLNPDEYYVLADPWRQEWEKGVQVPVSPGTIPQPVARVVSEEKSLMFIRPKKYIVSSGSEPPELGYVDIRTLADSVCRYDLNDMDAAWLELTNEEFKEMGMPELDEYTMERVLEEFEQRCYDNMNHAIETEEGLGIEYDEDVVCDVCQSPDGEDGNEMVFCDKCNICVHQACYGILKVPEGSWLCRTCALGVQPKCLLCPKKGGAMKPTRSGTKWVHVSCALWIPEVSIGSPEKMEPITKVSHIPSSRWALVCSLCNEKFGASIQCSVKNCRTAFHVTCAFDRGLEMKTILAENDEVKFKSYCPKHSSHRKPEESLGKGAAQENGAPECSPRNPLEPFASLEQNREEAHRVSVRKQKLQQLEDEFYTFVNLLDVARALRLPEEVVDFLYQYWKLKRKVNFNKPLITPKKDEEDNLAKREQDVLFRRLQLFTHLRQDLERVRNLTYMVTRREKIKRSVCKVQEQIFNLYTKLLEQERVSGVPSSCSSSSLENMLLFNSPSVGPDAPKIEDLKWHSAFFRKQMGTSLVHSLKKPHKRDPLQNSPGSEGKTLLKQPDLCGRREGMVVPESFLGLEKTFAEARLISAQQKNGVVMPDHGKRRDNRFHCDLIKGDLKDKSFKQSHKPLRSTDVSQRHLDNTRAAAIWRFRVIWQGPAA

SEQ ID NO: 8681 - protein, 53 aa, Homo sapiens
MGRRSTSSTKSGKFMNPTDQARKEARKRELKKNKKQRMMVRAAVLKMKDPKQI

SEQ ID NO: 8682 - protein, 344 aa, Homo sapiens
MTTRSVLDVETFVADILKGENLSKKAKEKRESLIKKIKDVKSIYLQEFQDKGDAEDGEEYDDPFAGPPDTISLASERYDKDDEAPSDGAQFPPIAAQDLPFVLKAGYLEKRRKDHSFLGFEWQKRWCALSKTVFYYYGSDKDKQQKGEFAIDGYSVRMNNTLRKDGKKDCCFEISAPDKRIYQFTAASPKDAEEWVQQLKFVLQDMESDIIPEDYDERGELYDDVDHPLPISNPLTSSQPIDDEIYEELPEEEEDSAPVKVEEQRKMSQDSVHHTSGDKSTDYANFYQGLWDCTGAFSDELSFKRGDVIYILSKEYNRYGWWVGEMKGAIGLVPKAYIMEMYDI

SEQ ID NO: 8683 - protein, 955 aa, Homo sapiens; identical to SEQ ID NO: 6801

SEQ ID NO: 8684 - protein, 277 aa, Homo sapiens
MLSQKEVAVADAKKSLELNPNNSTAMLRKGICEYHEKNYAAALETFTEGQKLDSADANFSVWIKRCQEAQNGSESEVWTHQSKIKYDWYQTESQVVITLMIKNVQKNDVNVEFSEKELSALVKLPSGEDYNLKLELLHPIIPEQSTFKVLSTKIEIKLKKPEAVRWEKLEGQGDVPTPKQFVADVKNLYPSSSPYTRNWDKLVGEIKEEEKNEKLEGDAALNRLFQQIYSDGSDEVKRAMNKSFMESGGTVLSTNWSDVGKRKVEINPPDDMEWKKY

SEQ ID NO: 8685 - protein, 268 aa, Homo sapiens
MGSAKSVPVTPARPPPHNKHLARVADPRSPSAGILRTPIQVESSPQPGLPAGEQLEGLKHAQDSDPRSPTLGIARTPMKTSSGDPPSPLVKQLSEVFETEDSKSNLPPEPVLPPEAPLSSELDLPLGTQLSVEEQMPPWNQTEFPSKQVFSKEEARQPTETPVASQSSDKPSRDPETPRSSGSMRNRWKPNSSKVLGRSPLTILQDDNSPGTLTLRQGKRPSPLSENVSELKEGAILGTGRLLKTGGRAWEQGQDHDKENQHFPLVES

SEQ ID NO: 8686 - protein, 379 aa, Homo sapiens
MVFKLKTKEEQHSMLGSGFKAERLRVNLRLVINRLKLLEKKKTELAQKARKEIADYLAAGKDERARIRVEHIIREDYLVEAMEILELYCDLLLARFGLIQSMKELDSGLAESVSTLIWAAPRLQSEVAELKIVADQLCAKYSKEYGKLCRTNQIGTVNDRLMHKLSVEAPPKILVERYLIEIAKNYNVPYEPDSVVMAEAPPGVETDLIDVGFTDDVKKGGPGRGGSGGFTAPVGGPDGTVPMPMPMPMPMPSANTPFSYPLPKGPSDFNGLPMGTYQAFPNIHPPQIPATPPSYESVDDINADKNISSAQIVGPGPKPEASAKLPSRPADNYDNFVLPELPSVPDTLPTASAGASTSASEDIDFDDLSRRFEELKKKT

SEQ ID NO: 8687 - protein, 300 aa, Homo sapiens
MARPLSTPSSSQMQARKKHRGIIEKRRRDRINSSLSELRRLVPTAFEKQGSSKLEKAEVLQMTVDHLKMLHATGGTGFFDARALAVDFRSIGFRECLTEVIRYLGVLEGPSSRADPVRIRLLSHLNSYAAEMEPSPTPTGPLAFPAWPWSFFHSCPGLPALSNQLAILGRVPSPVLPGVSSPAYPIPALRTAPLRRATGIILPARRNVLPSRGASSTRRARPLERPATPVPVAPSSRAARSSHIAPLLQSSSPTPPGPTGSAAYVAVPTPNSSSPGPAGRPAGAMLYHSWVSEITEIGAF

SEQ ID NO: 8688 - protein, 105 aa, Homo sapiens [sequence omitted]

SEQ ID NO: 8689 - protein, 195 aa, Homo sapiens
MGNSDSQYTLQGSKNHSNTITGAKQIPCSLKIRGIHAKEEKSLHGWGHGSNGAGYKSRSLARSCLSHFKSNQPYASRLGGPTCKVSRGVAYSTHRTNAPGKDFQGISAAFSTENGFHSVGHELADNHITSRDCNGHLLNCYGRNESIASTPPGEDRKSPRVLIKTLGKLDGCLRVEFHNGGNPSKVPAEDCSEPV

SEQ ID NO: 8690 - protein, 526 aa, Homo sapiens
MVPGEENQLVPKEDVFWRCRQNIFDEMKKKFLQIENAAEEPRVLCIIQDTTNSKTVNERITLNLPASTPVRKLFEDVANKVGYINGTFDLVWGNGINTADMAPLDHTSDKSLLDANFEPGKKNFLHLTDKDGEQPQILLEDSSAGEDSVHDRFIGPLPREGSGGSTSDYVSQSYSYSSILNKSETGYVGLVNQAMTCYLNSLLQTLFMTPEFRNALYKWEFEESEEDPVTSIPYQLQRLFVLLQTSKKRAIETTDVTRSFGWDSSEAWQQHDVQELCRVMFDALEQKWKQTEQADLINELYQGKLKDYVRCLECGYEGWRIDTYLDIPLVIRPYGSSQAFASVEEALHAFIQPEILDGPNQYFCERCKKKCDARKGLRFLHFPYLLTLQLKRFDFDYTTMHRIKLNDRMTFPEELDMSTFIDVEDEKSPQTESCTDSGAENEGSCHSDQMSNDFSNDDGVDEGICLETNSGTEKISKSGLEKNSLIYELFSVMVHSGSAAGGHYYACIKSSVMSSGTASMINMSAG

SEQ ID NO: 8691 - protein, 320 aa, Homo sapiens
MGKEQELLEAARTGHLPAVEKLLSGKRLSSGFGGGGGGGSGGGGGGSGGGGGGLGSSSHPLSSLLSMWRGPNVNCVDSTGYTPLHHAALNGHKDVVEVLLRNDALTNVADSKGCYPLHLAAWKGDAQIVRLLIHQGPSHTRVNEQNNDNETALHCAAQYGHTEVVKVLLEELTDPTMRNNKFETPLDLAALYGRLEVVKMLLNAHPNLLSCNTKKHTPLHLAARNGHKAVVQVLLDAGMDSNYQTEMGSALHEAALFGKTDVVQILLAAGTDVNIKDNHGLTALDTVRELPSQKSQQIAALIEDLDTLQFYFISCPFQGL

SEQ ID NO: 8692 - protein, 219 aa, Homo sapiens
MVIHKNPPDTPTESQFTRFLCSSPLEAETPPNGPDCGYGSFHQQYWLDGKIIAVGVIDILPNCVSSVYLYYDPDYSFLSLGVYSALREIAFTRQLHEKTSQLSYYYMGFYIHSCPKMKYKGQYRPSDLLCPETYVWVPIEQCLPSLENSKYCRFNQDPEAVDEDRSTEPDRLQVFHKRAIMPYGVYKKQQKDPSEEAAVLQYASLVGQKCSERMLLFRN

SEQ ID NO: 8693 - protein, 596 aa, Homo sapiens
MQQKELGTFAQSSIALHHQYNPKFQTLFQPCNLMGAMQLIEDFSTHVSIDCSPHKTVKKTANEFPCLPKQVAWILATSKVFMYPELLPVCSLKAKNPQDKILFTKAEDNKYLLTCKTARQLTVRIKNLNMNRAPDNIIKFYKKTKQLPVLGKCCEEIQPHQWKPPIEREEHRLPFWLKASLPSIQEELRHMADGAREVGNMTGTTEINSDQGLEKDNSELGSETRYPLLLPKGVVLKLKPVADRFPKKAWRQKRSSVLKPLLIQPSPSLQPSFNPGKTPAQSTHSEAPPSKMVLRIPHPIQPATVLQTVPGVPPLGVSGGESFESPAALPAMPPEARTSFPLSESQTLLSSAPVPKVMMPSPASSMFRKPYVRRRPSKRRGARAFRCIKPAPVIHPASVIFTVPATTVKIVSLGGGCNMIQPVNAAVAQSPQTIPIATLLVNPTSFPCPLNQPLVASSVSPLIVSGNSVNLPIPSTPEDKAHMNVDIACAVADGENAFQGLEPKLEPQELSPLSATVFPKVEHSPGPPPVDKQCQEGLSENSAYRWTVVKTEEGRQALEPLPQGIQESLNNSSPGDLEEVVKMEPEDATEEISGFL

SEQ ID NO: 8694 - protein, 303 aa, Homo sapiens
MADKSKFIEYIDEALEKSKETALSHLFFTYQGIPYPITMCTSETFQALDTFEARHDDIVLASYPKCGSNWILHIVSELIYAVSKKKYKYPEFPVLECGDSEKYQRMKGFPSPRILATHLHYDKLPGSIFENKAKILVIFRNPKDTAVSFLHFHNDVPDIPSYGSWDEFFRQFMKGQVSWGRYFDFAINWNKHLDGDNVKFILYEDLKENLAAGIKQIAEFLGFFLTGEQIQTISVQSTFQAMRAKSQDTHGAVGPFLFRKGEVGDWKNLFSEIQNQEMDEKFKECLAGTSLGAKLKYESYCQG

SEQ ID NO: 8695 - protein, 121 aa, Homo sapiens
MGVPEIPGEKLVTERNKKRLEKEKHEKGAQKTDCQKNLGTVGAVALDCKGNVAYATSTGGIVNKMVGRVGDSPCLGRTKGCLLPLPLFSRPQAFLTLYSLPLSVSCCVPFLLLVQLQDVWE

SEQ ID NO: 8696 - protein, 192 aa, Homo sapiens
MTLGSKSQQPPEDIKALSWNRQAQHILSSAHPSGKAVVWDLRKNEPIIKVSDHSNRMHCSGLAWHPDIATQLVLCSEDDRLPVIQLWDLRFASSPLKVLESHSRGILSVSWSQADAELLLTSAKDSQILCRNLGSSEVVYKLPTQSSWCFDVQWCPRDPSVFSAASFNGWISLYSVMGRSWEVQHMRQADKV

SEQ ID NO: 8697 - protein, 206 aa, Homo sapiens
MKDVDNLKSIKEEWVCETGSDNQPLGNNQQSNCEYFVDSLFEEAQKVSSKCVSPAEQKKQVDVNIKLWKNGFTVNDDFRSYSDGASQQFLNSIKKGELPSELQGIFDKEEVDVKVEDKKNEICLSTKPVFQPFSGQGHRLGRVSHIKDFIEKYQGSQRSPPFSLATALPVLRLLDETLTLEEADLQNAVIIQRLQKTASFRELSEH

SEQ ID NO: 8698 - protein, 452 aa, Homo sapiens [sequence omitted]

SEQ ID NO: 8699 - protein, 149 aa, Homo sapiens
MERIEGASVGRCAASPYLRPLTLHYRQNGAQKSWDFMKTHDSVTVLLFNSSRRSLVLVKQFRPAVYAGEVERRFPGSLAAVDQDGPRELQPALPGSAGVTVELCAGLVDQPGLSLEEVACKEAWEECGYHLAPSDLRRVATYWDATMGS

SEQ ID NO: 8700 - protein, 162 aa, Homo sapiens
MNSNASEHTGMLRTCWSHSHWDPFSSGSVTAMWATHSPTSKAWAGIQGRGRWALGFPWRGQGVLHVIASQKAAVTEAVDLRTGAASQAMSEAFVRSGMFYLRPAFVLLCYKWGKLRHSEVSNLLGVAWPVSEEACMGTWGSLAVAVTLPAQGLGTWGRDEGE

SEQ ID NO: 8701 - protein, 439 aa, Homo sapiens; identical to SEQ ID NO: 6489

SEQ ID NO: 8702 - protein, 288 aa, Homo sapiens
MAKWGEGDPRWIVEERADATNVNNWHWTERDASNWSTDKLKTLFLAVQVQNEEGKCEVTEVSKLDGEASINNRKGKLIFFYEWSVKLNWTGTSKSGVQYKGHVEIPNLSDENSVDEVEISVSLAKDEPDTNLVALMKEEGVKLLREAMGIYISTLKTEFTQGMILPTMNGESVDPVGQPALKTEERKAKPAPSKTQARPVGVKIPTCKITLKETFLTSPEELYRVFTTQELVQAFTHAPATLEADRGGKFHMVDGNVSGEFTDLVPEKHIVMKWRFKSWPEGSHCHSG

SEQ ID NO: 8703 - protein, 350 aa, Homo sapiens
MPSFIRHGPTIPRRTDICLPDSSPNAFSTSGDVVSRNQSFLRTPIQRTPHEIMRRESNRLSAPSYLARSLADVPREYGSSQSFVTEVSFAVENGDSGSRYYYSDNFFDGQRKRPLGDRAHEDYRYYEYNHDLFQRMPQNQGRHASGIGRVAATSLGNLTNHGSEDLPLPPGWSVDWTMRGRKYYIDHNTNTTHWSHPLEREGLPPGWERVESSEFGTYYVDHTNKKAQYRHPCAPSVPRYDQPPPVTYQPQQTERNQSLLVPANPYHTAEIPDWLQVYARAPVKYDHILKWELFQLADLDTYQGMLKLLFMKELEQIVKMYEAYRQALLTELENRKQRQQWYAQQHGKNF

SEQ ID NO: 8704 - protein, 178 aa, Homo sapiens
MTFREGHQWEKIPLSGSNQEIRRQKERITEQPLKEEEDEDRKNKGHQAAEIEWLGFRKPSQADMLHSKHDEEQKVWDEEIDDDDDDNCNNDEDEVRVIEFKKKHEEVSQFKEEGDASEDSPLSSASSQAVTPDEQPTLGKKSDISRNAYSRYNTISYRKIRKGNTKQRIDEFESMMHL

SEQ ID NO: 8705 - protein, 102 aa, Homo sapiens
MAAFKLDFLPEMMVDHCSLNSSPVSKKMNGTLDHPDQPDLDAIKMFVGQVAAWSEKDLRELFEQYGAVYEINVLRDRSQNPPQSKGCCFVTFYTRKAALEAQ

SEQ ID NO: 8706 - protein, 638 aa, Homo sapiens
MPPINLQEKQVICLSGDDSSTCIGILAKEVEIVASSDSSISSKARGSNKVKIQPVAKYDWEQKYYYGNLIAVSNSFLAYAIRAANNGSAMVRVISVSTSERTLLKGFTGSVADLAFAHLNSPQLACLDEAGNLFVWRLALVNGKIQEEILVHIRQPEGTPLNHFRRIIWCPFIPEESEDCCEESSPTVALLHEDRAEVWDLDMLRSSHSTWPVDVSQIKQGFIVVKGHSTCLSEGALSPDGTVLATASHDGYVKFWQIYIEGQDEPRCLHEWKPHDGRPLSCLLFCDNHKKQDPDVPFWRFLITGADQNRELKMWCTVSWTCLQTIRFSPDIFSSVSVPPSLKVCLDLSAEYLILSDVQRKVLYVMELLQNQEEGHACFSSISEFLLTHPVLSFGIQVVSRCRLRHTEVLPAEEENDSLGADGTHGAGAMESAAGVLIKLFCVHTKALQDVQIRFQPQLNPDVVAPLPTHTAHEDFTFGESRPELGSEGLGSAAHGSQPDLRRIVELPAPADFLSLSSETKPKLMTPDAFMTPSASLQQITASPSSSSSGSSSSSSSSSSSLTAVSAMSSTSAVDPSLTRPPEELTLSPKLQLDGSLTMSSSGSLQASPRGLLPGLLPAPADKLTPKGPGQVCDWVCV

SEQ ID NO: 8707 - protein, 164 aa, Homo sapiens
MRILILGLDGAGKTTILYRLQVGEVVTTIPTIGFNVETVTYKNLKFQVWDLGGQTSIRPYWRCYYSNTDAVIYVVDSCDRDRIGISKSELVAMLEEEELRKAILVVFANKQDMEQAMTSSEMANSLGLPALKDRKWQIFKTSATKGTGLDEAMEWLVETLKSRQ

SEQ ID NO: 8708 - protein, 647 aa, Homo sapiens
MAQGSVSFNDVTVDFTQEEWQHLDHAQKTLYMDVMLENYCHLISVGCHMTKPDVILKLERGEEPWTSFAGHTCLEENWKAEDFLVKFKEHQEKYSRSVVSINHKKLVKEKSKIYEKTFTLGKNPVNSKNLPPEYDTHGRILKNVSELIISNLNPARKRLSEYNGYGKSLLSTKQETTHPEVKSHNQSARAFSHNEVLMQYQKTETPAQSFGYNDCEKSFLQRGGLITHSRPYKGENPSVYNKKRRATNIEKKHTCNECGKSFCRKSVLILHQGIHSEEKPYQCHQCGNAFRRKSYLIDHQRTHTGEKPFVCNECGKSFRLKTALTDHQRTHTGEKSYECLQCRNAFRLKSHLIRHQRTHTGEKPYECNDCGKSFRQKTTLSLHQRIHTGEKPYICKECGKSFHQKANLTVHQRTHTGEKPYICNECGKSFSQKTTLALHEKTHNEEKPYICSECGKSFRQKTTLVAHQRTHTGEKSYECPHCGKAFRMKSYLIDHHRTHTGEKPYECNECGKSFSQKTNLNLHQRIHTGEKPYVCNECGKSFRQKATLTVHQKIHTGQKSYECPQCGKAFSRKSYLIHHQRTHTGEKPYKCSECGKCFRQKTNLIVHQRTHTGEKPYVCNECGKSFSYKRNLIVHQRTHKGENIEMQ

SEQ ID NO: 8709 - protein, 1189 aa, Homo sapiens [sequence omitted]

SEQ ID NO: 8710 - protein, 196 aa, Homo sapiens
MWSVLQDGPISRVIVFSLSAAKETKDRPLQDEYSVLVASMLEPAVVYRDLLNRGLEDQLLLPGSDQFDSVLCSLVTDVDLDGRPEVLVATYGQELLCYKYRGPESGLPEAQHGFHLLWQRSFSSPLLAMAHVDLTGDGLQELAVVSLKGVHILQHSLIQASELVLTRLRHQVEQRRRRLQGLEDGAGAGPAENAAS

SEQ ID NO: 8711 - protein, 351 aa, Homo sapiens
MVSHTFHMRTEESDASQEGDDLPKSSANTSHPKQDDSPKSSEETIQPKEGDIPKAPEETIQSKKEDLPKSSEKAIQPKESNIPKSSAKPIQPKLGNIPKTSVKPSQPKESDIPKSPEEAIQPKEGDIPKSLEEAIQPKEGDIPKSPEETIQPKKGDIPKSPEEAIQPKEGDIPKSPKQAIQPKEGDIPKSLEEAIPPKEIDIPKSPEETIQPKEDDSPKSLEEATPSKEGDILKPEEETMEFPEGDKVKVILSKEDFEASLKEAGERLVAVDFSATWCGPCRTIRPFFHALSVKHEDVVFLEVDADNCEEVVRECAIMCVPTFQFYKKEEKVDELCGALKEKLEAVIAELK

SEQ ID NO: 8712 - protein, 490 aa, Homo sapiens
MPDGKIQKLIITEETAKIRPFAVAAVLRNIKFTKDRYDSFIELQEKLHQNICRKRALVAIGTHDLDTLSGPFTYTAKRPSDIKFKPLNKTKEYTACELMNIYKTDNHLKHYLHIIENKPLYPVIYDSNGVVLSMPPIINGDHSRITVNTRNIFIECTGTDFTKAKIVLDIIVTMFSEYCENQFTVEAAEVVFPNGKSHTFPELAYRKEMVRADLINKKVGIRETPENLAKLLTRMYLKSEVIGDGNQIEIEIPPTRADIIHACDIVEDAAIAYGYNNIQMTLPKTYTIANQFPLNKLTELLRHDMAAAGFTEALTFALCSQEDIADKLGVDISATKAVHISNPKTAEFQVARTTLLPGLLKTIAANRKMPLPLKLFEISDIVIKDSNTDVGAKNYRHLCAVYYNKNPGFEIIHGLLDRIMQLLDVPPGEDKGGYVIKASEGPAFFPGRCAEIFARGQSVGKLGVLHPDVITKFELTMPCSSLEINVGPFL

SEQ ID NO: 8713 - protein, 485 aa, Homo sapiens; identical to SEQ ID NO: 6789

SEQ ID NO: 8714 - protein, 67 aa, Homo sapiens
MALLAEHLLKPLPADKQIETGPFLEAVSHLPPFFDCLGSPVFTPIKADISGNITMRKLRLRGVEGLA

SEQ ID NO: 8715 - protein, 271 aa, Homo sapiens
ICERIRSTVDEKEQKQLLMDLDVVMRSSDCPYIVQFYGALFREGDCWICMELMSTSFDKFYKYVYSVLDDVIPEEILGKITLATVKALNHLKENLKIIHRDIKPSNILLDRSGNIKLCDFGISGQLVDSIAKTRDAGCRPYMAPERIDPSASRQGYDVRSDVWSLGITLYELATGRFPYPKWNSVFDQLTQVVKGDPPQLSNSEEREFSPSFINFVNLCLTKDESKRPKYKELLKHPFILMYEERAVEVACYVCKILDQMPATPSSPMYVD

SEQ ID NO: 8716 - protein, 96 aa, Homo sapiens
MSEKVDWLQSQNGVCKVDVYSPGDNQAQDWKMDTSTDPVRVLSWLRRDLEKSTAEFQDVRFKPGESFGGETSNSGDPHKGFSVDYYNTTTKGTPER

SEQ ID NO: 8717 - protein, 263 aa, Homo sapiens; identical to SEQ ID NO: 5395

SEQ ID NO: 8718 - protein, 288 aa, Homo sapiens; identical to SEQ ID NO: 5393

SEQ ID NO: 8719 - protein, 182 aa, Homo sapiens; identical to SEQ ID NO: 6850

SEQ ID NO: 8720 - protein, 332 aa, Homo sapiens
MDQPAGLQVDYVFRGVEHAVRVMVSGQVLELEVEDRMTADQWRGEFDAGFIEDLTHKTGNFKQFNIFCHMLESALTQSSESVTLDLLTYTDLESLRNRKMGGRPGSLAPRSAQLNSKRYLILIYSVEFDRIHYPLPLPYQGKPDPVVLQGIIRSLKEELGRLQGLDGQNTRDTRENEIWHLREQQQQRNRLGSGGSGDGPSVSWSRQTQPPAALTGRGDAPNRSRNRSSSVDSFRSRCSSASSCSDLEDFSESLSRGGHRRRGKPPSPTPWSGSNMKSPPVERSHHQKSLANSGGWVPIKEYSSEHQAADMAEIDARLKALQEYMNRLDMRS

SEQ ID NO: 8721 - protein, 171 aa, Homo sapiens; identical to SEQ ID NO: 4714

SEQ ID NO: 8722 - protein, 796 aa, Homo sapiens
MSLDDNLSGTSGMEVDDRVSALEQRLQLQEDELAVLKAALADALRRLRACEEQGAALRARGTPKGRAPPRLGTTASVCQLLKGLPTRTPLNGSGPPRRVGGYATSPSSPKKEATSGRSSVRRYLSPERLASVRREDPRSRTTSSSSNCSAKKEGKTKEVIFSVEDGSVKMFLRGRPVPMMIPDELAPTYSLDTRSELPSCRLKLEWVYGYRGRDCRANLYLLPTGEIVYFVASVAVLYSVEEQRQRHYLGHNDDIKCLAIHPDMVTIATGQVAGTTKEGKPLPPHVRIWDSVSLSTLHVLGLGVFDRAVCCVGFSKSNGGNLLCAVDESNDHMLSVWDWAKETKVVDVKCSNEAVLVATFHPTDPTVLITCGKSHIYFWTLEGGSLSKRQGLFEKHEKPKYVLCVTFLEGGDVVTGDSGGNLYVWGKGGNRITQAVLGAHDGGVFGLCALRDGTLVSGGGRDRRVVLWGSDYSKLQEVEVPEDFGPVRTVAEGHGDTLYVGTTRNSILQGSVHTGFSLLVQGHVEELWGLATHPSRAQFVTCGQDKLVHLWSSDSHQPLWSRIIEDPARSAGFHPSGSVLAVGTVTGRWLLLDTETHDLVAIHTDGNEQISVVSFSPDGAYLAVGSHDNLVYVYTVDQGGRKVSRLGKCSGHSSFITHLDWAQDSSCFVTNSGDYEILYWDPATCKQITSADAVRNMEWATATCVLGFGVFGIWSEGADGTDINAVARSHDGKLLASADDFGKVHLFSYPCCQPRALSHKYGGHSSHVTNVAFLWDDSMALTTGGKDTSVLQWRVV

SEQ ID NO: 8723 - protein, 352 aa, Homo sapiens
MALLGQALKWQQHQGLLPPGMTIDLFRGKAAVKDVEEEKFPTQLSRHIKFGQKSHVECARFSPDGQYLVTGSVDGFIEVWNFTTGKIRKDLKYQAQDNFMMMDDAVLCMCFSRDTEMLATGAQDGKIKVWKIQSGQCLRRFERAHSKGVTCLSFSKDSSQILSASFDQTIRIHGLKSGKTLKEFRGHSSFVNEATFTQDGHYIISASSDGTVKIWNMKTTECSNTFKSLGSTAGTDITVNSVILLPKNPEHFVVCNRSNTVVIMNMQGQIVRSFSSGKREGGDFVCCALSPRGEWIYCVGEDFVLYCFSTVTGKLERTLTVHEKDVIGIAHHPHQNLIATYSEDGLLKLWKP

SEQ ID NO: 8724 - protein, 316 aa, Homo sapiens
MQSWVLISKELISLLHLSLLHLEEDKTTVSQESRRAETLVCCCFDLLKKLRAKLQSLKAEREEARHREEMALRGKDAAEIVLEAFCAHASQRISQLEQDLASMREFRGLLKDAQTQLVGLHAKQEELVQQTVSLTSTLQQDWRSMQLDYTTWTALLSRSRQLTEKLTVKSQQALQERDVAIEEKQEVSRVLEQVSAQLEECKGQTEQLELENSRLATDLRAQLQILANMDSQLKELQSQHTHCAQDLAMKDELLCQLTQSNEEQAAQWQKEEMALKHMQAELQQQQAVLAKEVRDLKETLEFADQENQVAHLELAW

SEQ ID NO: 8725 - protein, 198 aa, Homo sapiens; identical to SEQ ID NO: 5709

SEQ ID NO: 8726 - protein, 196 aa, Homo sapiens
MVPRPWSGSPGPGECLHSLLSERLWICRDISAQRRSAPGSPRPSDCQQLSFLPGNQPTFLCLQALAALVPGVTQVDNKSGFLQKRPHRQHPGILKLPHVRLPQALANGAQLLLLGSAGPTMENQVQTLTSYLWSRHLPVEPEELQRRARHLEKKFLENPGPDFQSLFSPQTYLRQRRNFVEQCYTHYVKLPTIGKN

SEQ ID NO: 8727 - protein, 376 aa, Homo sapiens
MPDVVQTRQQAYRDKLAQQQAAAAAAAAAAASQQGSAKNGENTANGEENGAHTIARIWNLSENSTSGSTQLVLRHCIREGGQDVPSNKDVTSLDWNSEGTLLATGSYDGFARIWTKDGNLASTLGQHKGPIFALKWNKKGNFILSAGVDKTTIIWDAHTGEAKQQFPFHSAPALDVDWQSNNTFASCSTDMCIHVCKLGQDRPIKTFQGHTNEVNAIKWDPTGNLLASCSDDMTLKIWSMKQDNCVHDLQAHNKEIYTIKWSPTGPGTNNPNANLMLASASFDSTVRLWDVDRGICIHTLTKHQEPVYSVAFSPDGRYLASGSFDKCVHIWNTQTGALVHSYRGTGGIFEVCWNAAGDKVGASASDGSVCVLDLRK

SEQ ID NO: 8728 - protein, 371 aa, Homo sapiens
MHIKSIILEGFKSYAQRTEVNGFDPLFNAITGLNGSGKSNILDSICFLLGISNLSQVRASNLQDLVYKNGQAGITKASVSITFDNSDKKQSPLGFEVHDEITVTRQVVIGGRNKYLINGVNANNTRVQDLFCSVGLNVNNPHFLIMQGRITKVLNMKPPEILSMIEEAAGTRMYEYKKIAAQKTIEKKEAKLKEIKTILEEEITPTIQKLKEERSSYLEYQKVMREIEHLSRLYIAYQFLLAEDTKVRSAEELKEMQDKVIKLQEELSENDKKIKALNHEIEELEKRKDKETGGILRSLEDALAEAQRVNTKSQSAFDLKKKNLACEESKRKELEKNMVEDSKTLAAKEKEKIKRKAFWKSAGSCLVILVD

SEQ ID NO: 8729 - protein, 168 aa, Homo sapiens
HKLQSGIGRLILKEEMKARSSSYADPWTPPRSSTSSREALHTAGYEMSLNGSPRSHYLADSDPLISKSASLPAYRRNGLHRTPSADLFHYDSMNAVNWGMREYKIYPYELLLVTTRGRNRLPKDVDRTRLERHLSQEEFYQVFGMTISEFDRLALWKRNELKKQARLF

SEQ ID NO: 8730 - protein, 589 aa, Homo sapiens; identical to SEQ ID NO: 5669

SEQ ID NO: 8731 - protein, 428 aa, Homo sapiens
MSMLKPSGLKAPTKILKPGSTALKTPTAVVAPVEKTISSEKASSTPSSETQEEFVDDFRVGERVWVNGNKPGFIQFLGETQFAPGQWAGIVLDEPIGKNDGSVAGVRYFQCEPLKGIFTRPSKLTRKVQAEDEANGLQTTPASRATSPLCTSTASMVSSSPSTPSNIPQKPSQPAAKEPSATPPISNLTKTASESISNLSEAGSIKKGERELKIGDRVLVGGTKAGVVRFLGETDFAKGEWCGVELDEPLGKNDGAVAGTRYFQCQPKYGLFAPVHKVTKIGFPSTTPAKAKANAVRRVMATTSASLKRSPSASSLSSMSSVASSVSSRPSRTGLHVLELEAKMDQLRTMVEAADREKVELLNQLEEEKRKVEDLQFRVEEESITKGDLEQKSQISEDPENVRGHLTVWIFPLLTKIDHRLKCLLIYS

SEQ ID NO: 8732 - protein, 1160 aa, Homo sapiens
MVVTLGPGPDCLILEASRQPQLVPKPERMASDGASALPGPDMSMKPSAAPSPSPALPFLPPTSDPPDHPPREPPPQPIMPSVFSPDNPLMLSAFPSSLLVTGDGGPCLSGAGAGKVIVKVKTEGGSAEPSQTQNFILTQTALNSTAPGTPCGGLEGPAPPFVTASNVKTILPSKAVGVSQEGPPGLPPQPPPPVAQLVPIVPLEKAWPGPHGTTGEGGPVATLSKPSLGDRSKISKDVYENFRQWQRYKALARRHLSQSPDTEALSCFLIPVLRSLARLKPTMTLEEGLPLAVQEWEHTSNFDRMIFYEMAERFMEFEAEEMQIQNTQLMNGSQGLSPATPLKLDPLGPLASEVCQQPVYIPKKAASKTRAPRRRQRKAQRPPAPEAPKEIPPEAVKEYVDIMEWLVGTHLATGESDGKQEEEGQQQEEEGMYPDPGLLSYINELCSQKVFVSKVEAVIHPQFLADLLSPEKQRDPLALIEELEQEEGLTLAQLVQKRLMALEEEEDAEAPPSFSGAQLDSSPSGSVEDEDGDGRLRPSPGLQGAGGAACLGKVSSSGKRAREVHGGQEQALDSPRGMHRDGNTLPSPSSWDLQPELAAPQGTPGPLGVERRGSGKVINQVSLHQDGHLGGAGPPGHCLVADRTSEALPLCWQGGFQPESTPSLDAGLAELAPLQGQGLEKQVLGLQKGQQTGGRGVLPQGKEPLAVPWEGSSGAMWGDDRGTPMAQSYDQNPSPRAAGERDDVCLSPGVWLSSEMDAVGLELPVQIEEVIESFQVEKCVTEYQEGCQGLGSRGNISLGPGETLVPGDTESSVIPCGGTVAAAALEKRNYCSLPGPLRANSPPLRSKENQEQSCETVGHPSDLWAEGCFPLLESGDSTLGSSKETLPPTCQGNLLIMGTEDASSLPEASQEAGSRGNSFSPLLETIEPVNILDVKDDCGLQLRVSEDTCPLNVHSYDPQGEGRVDPDLSKPKNLAPLQESQESYTTGTPKATSSHQGLGSTLPRRGTRNAIVPRETSVSKTHRSADRAKGKEKKKKEAEEEDEELSNFAYLLASKLSLSPREHPLSPHHASGGQGSQRASHLLPAGAKGPSKLPYPVAKSGKRALAGGPAPTEKTPHSGAQLGVPREKPLALGVVRPSQPRKRRCDSFVTGRRKKRRRSQ

SEQ ID NO: 8733 - protein, 515 aa, Homo sapiens
LNSQCRNKNPFAAGPRPPHHQFFQRPQIQPPRATIPNSSPSIRPGAQTPTAVYQANQHIMMVNHLPMPYPVPQGPQYCIPQYRHSGPPYVGPPQQYPVQPPGPGPFYPGPGPGDFPNAYGTPFYPSQPVYQSAPIIVPTQQQPPPAKREKKTIRIRDPNQGGKDITEEIMSGGGSRNPTPPIGRPTSTPTPPQQLPSQVPEHSPVVYGTVESAHLAASTPVTAASDQKQEEKPKPDPVLKSPSPVLRLVLSGEKKEQEGQTSETTAIVSIAELPLPPSPTTVSSVARSTIAAPTSSALSSQPIFTTAIDDRCELSSPREDTIPIPSLTSCTETSDPLPTNENDDDICKKPCSVAPNDIPLVSSTNLINEINGVSEKLSATESIVEIVKQEVLPLTLELEILENPPEEMKLECIPAPITPSTVPSFPPTPPTPPASPPHTPVIVPAAATTVSSPSAAITVQRVLEEDESIRTCLSEDAKEIQNKIEVEADGQTEEILDSQNLNSRRSPVPETSNEC

SEQ ID NO: 8734 - protein, 67 aa, Homo sapiens; identical to SEQ ID NO: 8714

SEQ ID NO: 8735 - protein, 805 aa, Homo sapiens
MMQNVHLAPETDEDDLYSGYNDYNPIYDIEELENDAAFQQAVRTSHGRRPPSKTSLASSIGRPMTGAIQDGVTRPMTAVRAAGFTKAALRGSAFDPLSQSRGPASPLEAKKKDSPEEKIKQLEKEVNELVEESCIANSCGDLKLALEKAKDAGRKERVLVRQREQVTTPENINLDLTYSVLFNLASQYSVNEMYAEALNTYQVIVKNKMFSNAGILKMNMGNIYLKQRNYSKAIKFYRMALDQVPSVNKQMRIKIMQNIGVTFIQAGQYSDAINSYEHIMSMAPNLKAGYNLTICYFAIGDREKMKKAFQKLITVPLEIDEDKYISPSDDPHTNLVTEAIKNDHLRQMERERKAMAEKYIMTSAKLIAPVIETSFAAGYDWCVEVVKASQYVELANDLEINKAVTYLRQKDYNQAVEILKVLEKKDSRVKSAAATNLSALYYMGKDFAQASSYADIAVNSDRYNPAALTNKGNTVFANGDYEKAAEFYKEALRNDSSCTEALYNIGLTYEKLNRLDEALDCFLKLHAILRNSAEVLYQIANIYELMENPSQAIEWLMQVVSVIPTDPQVLSKLGELYDREGDKSQAFQYYYESYRYFPCNIEVIEWLGAYYIDTQFWEKAIQYFERASLIQPTQVKWQLMVASCFRRSGNYQKALDTYKDTHRKFPENVECLRFLVRLCTDLGLKDAQEYARKLKRLEKMKEIREQRIKSGRDGSGGSRGKREGSASGDSGQNYSASSKGERLSARLRALPGTNEPYESSSNKEIDASYVDPLGPQIERPKTAAKKRIDEDDFADEELGDDLLPE

SEQ ID NO: 8736 - protein, 254 aa, Homo sapiens
MAPGSFAEYTVVPASIATPVPSVKPEYLTLLVSGTTAYISLKELGGLSEGKKVLVTAAAGGTGQFAMQLSKKAKCHVIGTCSSDEKSAFLKSLGCDRPINYKTEPVGTVLKQEYPEGVDVVYESVGGAMFDLAVDALATKGRLIVIGFISGYQTPTGLSPVKAGTLPAKLLKKSASVQGFFLNHYLSKYQAAMSHLLEMCVSGDLVCEVDLGDLSPEGRFTGLESIFRAVNYMYMGKNTGKIVVELPHSVNSKL

SEQ ID NO: 8737 - protein, 403 aa, Homo sapiens
MHHPIQMKPADSEKSNAVEDRKLFIGMVSKKCNENDIRVMFSPFGQIEECRILRGPDGLSRGCAFVTFSTRAMAQNAIKAMHQSQTMEGCSSPIVVKFADTQKDKEQRRLQQQLAQQMQQLNTATWGNLTGLGGLTPQYLALLQQATSSSNLGAFSGIQQMAGMNALQLQNLATLAAAAAAAQTSATSTNANPLSTTSSALGALTSPVAASTPNSTAGAAMNSLTSLGTLQGLAGATVGLNNINALAVAQMLSGMAALNGGLGATGLTNGTAGTMDALTQAYSGIQQYAAAALPTLYSQSLLQQQSAAGSQKEGPEGANLFIYHLPQEFGDQDILQMFMPFGNVISAKVFIDKQTNLSKCFGFVSYDNPVSAQAAIQAMNGFQIGMKRLKVQLKRSKNDSKPY

SEQ ID NO: 8738 - protein, 443 aa, Homo sapiens
MAEFLKQVKPYVEEGLHPQIIIRAFRTATQLAVNKIKEIAVTVKKADKVEQRKLLEKCAMTALSSKLISQQKAFFAKMVVDAVMMLDDLLQLKMIGIKKVQGGALEDSQLVAGVAFKKTFSYAGFEMQPKKYHNPKIALLNVELELKAEKDNAEIRVHTVEDYQAIVDAEWNILYDKLEKIHHSGAKVVLSKLPIGDVATQYFADRDMFCAGRVPEEDLKRTMMACGGSIQTSVNALSADVLGRCQVFEETQIGGERYNFFTGCPKAKTCTFILRGGAEQFMEETERSLHDAIMIVRRAIKNDSVVAGGGAIEMELSKYLRDYSRTIPGKQQLLIGAYAKALEIIPRQLCDNAGFDATNILNKLRARHAQGGTWYGVDINNEDIADNFEAFVWEPAMVRINALTAASEAACLIVSVDETIKNPRSTVDAPTAAGRGRGRGRPH

SEQ ID NO: 8739 - protein, 729 aa, Homo sapiens
MQLFEQPCPGEDPRPGGQIGEVELSSYTPPAGVPGKPAAPHFLPVLCSVSPSGSRVPHDLLGGSGGFTLEDALFGLLFGADATLLQSPVVLCGLPDGQLCCVILKALVTSRSAPGDPNALVKILHHLEEPVIFIGALKTEPQAAEAAENFLPDEDVHCDCLVAFGHHGRMLAIKASWDESGKLVPELREYCLPGPVLCAACGGGGRVYHSTPSDLCVVDLSRGSTPLGPEQPEEGPGGLPPMLCPASLNICSVVSLSASAAHEGGTKLLALSAKGRLMTCSLDLDSEMPGPARMTTESAGQKIKELLSGIGNISERVSFLKKAVDQRNKALTSLNEAMNVSCALLSSGTGPRPISCTTSTTWSRLQTQDVLMATCVLENSSSFSLDQGWTLCIQVLTSSCALDLDSACSAITYTIPVDQLGPGARREVTLPLGPGENGGLDLPVTVSCTLFYSLREVVGGALAPSDSEDPFLDECPSDVLPEQEGVCLPLSRHTVDMLQCLRFPGLAPPHTRAPSPLGPTRDPVATFLETCREPGSQPAGPASLRAEYLPPSVASIKVSAELLRAALKDGHSGVPLCCATLQWLLAENAAVDVVRARALSSIQGVAPDGANVHLIVREVAMTDLCPAGPIQAVEIQVESSSLADICRAHHAVVGRMQTMVTEQATQGSSAPDLRVQYLRQIHANHETLLREVQTLRDRLCTEDEASSCATAQRLLQVYRQLRHPSLILL

SEQ ID NO: 8740 - protein, 1394 aa, Homo sapiens
MSMLKPSGLKAPTKILKPGSTALKTPTAVVAPVEKTISSEKASSTPSSETQEEFVDDFRVGERVWVNGNKPGFIQFLGETQFAPGQWAGIVLDEPIGKNDGSVAGVRYFQCEPLKGIFTRPSKLTRKVQAEDEANGLQTTPASRATSPLCTSTASMVSSSPSTPSNIPQKPSQPAAKEPSATPPISNLTKTASESISNLSEAGSIKKGERELKIGDRVLVGGTKAGVVRFLGETDFAKGEWCGVELDEPLGKNDGAVAGTRYFQCQPKYGLFAPVHKVTKIGFPSTTPAKAKANAVRRVMATTSASLKRSPSASSLSSMSSVASSVSSRPSRTGLLTETSSRYARKISGTTALQEALKEKQQHIEQLLAERDLERAEVAKATSHVGEIEQELALARDGHDQHVLELEAKMDQLRTMVEAADREKVELLNQLEEEKRKVEDLQFRVEEESITKGDLEVATVSEKSRIMELEKDLALRVQEVAELRRRLESNKPAGDVDMSLSLLQEISSLQEKLEVTRTDHQREITSLKEHFGAREETHQKEIKALYTATEKLSKENESLKSKLEHANKENSDVIALWKSKLETAIASHQQAMEELKVSFSKGLGTETAEFAELKTQIEKMRLDYQHEIENLQNQQDSERAAHAKEMEALRAKLMKVIKEKENSLEAIRSKLDKAEDQHLVEMEDTLNKLQEAEIKVKELEVLQAKCNEQTKVIDNFTSQLKATEEKLLDLDALRKASSEGKSEMKKLRQQLEAAEKQIKHLEIEKNAESSKASSITRELQGRELKLTNLQENLSEVSQVKETLEKELQILKEKFAEASEEAVSVQRSMQETVNKLHQKEEQFNMLSSDLEKLRENLADMEAKFREKDEREEQLIKAKEKLENDIAEIMKMSGDNSSQLTKMNDELRLKERDVEELQLKLTKANENASFLQKSIEDMTVKAEQSQQEAAKKHEEEKKELERKLSDLEKKMETSHNQCQELKARYERATSETKTKHEEILQNLQKTLLDTEDKLKGAREENSGLLQELEELARGSQADKAKAAQTAEDAMQIMEQMTKEKTETLASLEDTKQTNAKLQNELDTLKENNLKNVEELNKSKELLTVENQKMEEFRKEIETLKQAAAQKSQQLSALQEENVKLAEELGRSRDEVTSHQKLEEERSVLNNQLLEMKKRESKFIKDADEEKASLQKSISITSALLTEKDAELEKLRNEVTVLRGENASAKSLHSVVQTLESDKVKLELKVKNLELQLKENKRQLSSSSGNTDTQADEDERAQESQIDFLNSVIVDLQRKNQDLKMKVEMMSEAALNGNGDDLNNYDSDDQEKQSKKKPRLFCDICDCFDLHDTEDCPTQAQMSEDPPHSTHHGSRGEERPYCEICEMFGHWATNCNDDETF

SEQ ID NO: 8741 - protein, 163 aa, Homo sapiens
MFRKIGIEALKQVTKRYARKQNRWVKNRFLSRPGPIVPPVYGLEVSDVSKWEESVLEPALEIVQSFIQGHKPTATPIKMPYNEAENKRSYHLCDLCDRIIIGDREWAAHIKSKSHLNQLKKRRRLDSDAVNTIESQSVSPDHNKEPKEKGSPGQNDQELKCSV

SEQ ID NO: 8742 - protein, 533 aa, Homo sapiens
MASPGKDNYRMKSYKNNALNPEEMRRRREEEGIQLRKQKREQQLFKRRNVELINEEAAMFDSLLMDSYVSSTTGESVITREMVEMLFSDDSDLQLATTQKFRKLLSKEPSPPIDEVINTPRVVDRFVEFLKRNENCTLQFEAAWALTNIASGTSQQTKIVIEAGAVPIFIELLNSDFEDVQEQAVWALGNIAGDSSVCRDYVLNCSILNPLLTLLTKSTRLTMTRNAVWALSNLCRGKNPPPEFAKVSPCLPVLSRLLFSSDSDLLADACWALSYLSDGPNEKIQAVIDSGVCRRLVELLMHNDYKVASPALRAVGNIVTGDDIQTQVILNCSALPCLLHLLSSPKESIRKEACWTISNITAGNRAQIQAVIDANIFPVLIEILQKAEFRTRKEAAWAITNATSGGTPEQIRYLVSLGCIKPLCDLLTVMDSKIVQVALNGLENILRLGEQEGKRSGSGVNPYCGLIEEAYGLDKIEFLQSHENQEIYQKAFDLIEHYFGVEDDDSSLAPQVDETQQQFIFQQPEAPMEGFQL

SEQ ID NO: 8743 - protein, 330 aa, Homo sapiens; identical to SEQ ID NO: 6983

SEQ ID NO: 8744 - protein, 191 aa, Homo sapiens
MSRERGSRSEEPGAGNRESGSREPGLAAAAMSTVDLARVGACILKHAVTGEAVELRSLWREHACVVAGLRRFGCVVCRWIAQDLSSLAGLLDQHGVRLVGVGPEALGLQEFLDGDYFAGELYLDESKQLYKELGFKRYNSLSILPAALGKPVRDVAAKSPGDYVPKEHILQVLGISAEVCASDPPQCDREV

SEQ ID NO: 8745 - protein, 349 aa, Homo sapiens
NTIHDVLDVEAAVVNLDNSVVDLETLQALYENRAQSDELEKIEKHGRSSKDKENAKSLDKPEQFLYELSLIPNFSERVFCILFQSTFSESICSIRRKLELLQKLCETLKNGPGVMQVLGLVLAFGNYMNGGNKTRGQADGFGLDILPKLKDVKSSDNSRSLLSYIVSYYLRNFDEDAGKEQCLFPLPEPQDLFQASQMKFEDFQKDLRKLKKDLKACEVEAGKVYQVSSKEHMQPFKENMEQFIIQAKIDQEAEENSLTETHKCFLETTAYFFMKPKLGEKEVSPNAFFSIWHEFSSDFKDFWKKENKLLLQERVKEAEEVCRQKKGKSLYKIKPRHDSGIKNNNSMHT

SEQ ID NO: 8746 - protein, 189 aa, Homo sapiens
MTASASSFSSSQGVQQPSIYSFSQITRSLFLSNGVAANDKLLLSSNRITAIVNASVEGQRILRGIQYIKVPVTDARDSRLYDFFDPIADLIHTIDMRQGRTLLHCMAGVSRSASLCLAYLMKYHSMSLLDAHTWTKSRRPIIRPNNGFWEQLINYEFKLFNNNTVRMINSPVGNIPDIYEKDLRMMISM

SEQ ID NO: 8747 - protein, 182 aa, Homo sapiens; identical to SEQ ID NO: 5239

SEQ ID NO: 8748 - protein, 128 aa, Homo sapiens [sequence omitted]

SEQ ID NO: 8749 - protein, 163 aa, Homo sapiens; identical to SEQ ID NO: 8741

SEQ ID NO: 8750 - protein, 407 aa, Homo sapiens
MAAELYAPASAAAADLANSNAGAAVGRKAGPRSPPSAPAPAPPPPAPAPPTLGNNHQESPGWRCCRPTLRERNALMFNNELMADVHFVVGPPGATRTVPAHKYVLAVGSSVFYAMFYGDLAEVKSEIHIPDVEPAAFLILLKYMYSDEIDLEADTVLATLYAAKKYIVPALAKACVNFLETSLEAKNACVLLSQSRLFEEPELTQRCWEVIDAQAEMALRSEGFCEIDRQTLEIIVTREALNTKEAVVFEAVLNWAEAECKRQGLPITPRNKRHVLGRALYLVRIPTMTLEEFANGAAQSDILTLEETHSIFLWYTATNKPRLDFPLTKRKGLAPQRCHRFQSSAYRSNQWRYRGRCDSIQFAVDRRVFIAGLGLYGSSSGKAEYSVKIELKRLGVVLAQNLTKFMS

SEQ ID NO: 8751 - protein, 200 aa, Homo sapiens
MLELVAQKQREREEREEREALERERQRRRQGQELSAARQRLQEDEMRRAAEERRREKAEELAARQRVREKIERDKAERAKKYGGSVGSQPPPVAPEPGPVPSSPSQEPPTKREYDQCRIQVRLPDGTSLTQTFRAREQLAAVRLYVELHRGEELGGGQDPVQLLSGFPRRAFSEADMERPLQELGLVPSAVLIVAKKCPS

SEQ ID NO: 8752 - protein, 294 aa, Homo sapiens
MGLASWSQLASTPRAPGSRDARWERREPALRGAKDRLTIGKHLDMGSPQLRTRDRGWPSPRPEREKRTSQSARRPTCTESRWKSEEEVESDDEYLALPARLTQVSSLVSYLGSISTLVTLPTGDIKGQSPLEVSDSDGPASFPSSSSQSQLPPGAALQGSGDPEGQNPCFLRSFVRAHDSAGEGSLGSSQALGVSSGLLKTRPSLPARLDRWPFSDPDVEGQLPRKGGEQGKESLVQCVKVMTLNVRKLCVQVSCLFPQSTNIIIKHVHVDQALFMCQALCCTLSYSVLTTFTR

SEQ ID NO: 8753 - protein, 117 aa, Homo sapiens
MVRKITLVSAAPGKVICEMKVEEEHTNAIGTLHGGLTATLVDNISTMALLCTERGAPGVSVDMNITYMSPAKLGEDIVITAHVLKQGKTLAFTSVDLTNKATGKLIAQGRHTKHLGN

SEQ ID NO: 8754 - protein, 279 aa, Homo sapiens
MTSGKIKKFIQENIFGICPHMTEDNKDLIQGKDLLIAYYDVDYEKNAKGSNYWRNRVMMVAKKFLDAGHKLNFAVASRKTFSHELSDFGLESTAGEIPVVAIRTAKGEKFVMQEEFSRDGKALERFLQDYFDGNLKRYLKSEPIPESNDGPVKVVVAENFDEIVNNENKDVLIEFYAPWCGHCKNLEPKYKELGEKLSKDPNIVIAKMDATANDVPSPYEVRGFPTIYFSPANKKLNPKKYEGGRELSDFISYLQREATNPPVIQEEKPKKKKKAQEDL

SEQ ID NO: 8755 - protein, 1075 aa, Homo sapiens
MSQGFHPERDPSDLKKVKAVEENGEEAEPVRNGAESVSEGEGIDANSGSTDSSGDGVTFPFKPESWKPTDTEGKKQYDREFLLDFQFMPACIQKPEGLPPISDVVLDKINQPKLPMRTLDPRILPRGPDFTPAFADFGRQTPGGRGVPICKVQSRHGLPILEQSKAPTCPPLVMSHPPMKSLPLGLLNVGSRRSQPGQRREPRKIITVSVKEDVHLKKAENAWKPSQKRDSQADDPENIKTQELFRKVRSILNKLTPQMFNQLMKQVSGLTVDTEERLKGVIDLVFEKAIDEPSFSVAYANMCRCLVTLKVPMADKPGNTVNFRKLLLNRCQKEFEKDKADDDVFEKKQKELEAASAPEERTRLHDELEEAKDKARRRSIGNIKFIGELFKLKMLTEAIMHDCVVKLLKNHDEESLECLCRLLTTIGKDLDFEKAKPRMDQYFNQMEKIVKERKTSSRIRFMLQDVIDLRLCNWVSRRADQGPKTIEQIHKEAKIEEQEEQRKVQQLMTKEKRRPGVQRVDEGGWNTVQGAKNSRVLDPSKFLKITKPTIDEKIQLVPKAQLGSWGKGSSGGAKASETDALRSSASSLNRFSALQPPAPSGSTPSTPVEFDSRRTLTSRGSMGREKNDKPLPSATARPNTFMRGGSSKDLLDNQSQEEQRREMLETVKQLTGGVDVERNSTEAERNKTRESAKPEISAMSAHDKAALSEEELERKSKSIIDEFLHINDFKEAMQCVEELNAQGLLHVFVRVGVESTLERSQITRDHMGQLLYQLVQSEKLSKQDFFKGFSETLELADDMAIDIPHIWLYLAELVTPMLKEGGISMRELTIEFSKPLLPVGRAGVLLSEILHLLCKQMSHKKVGALWREADLSWKDFLPEGEDVHNFLLEQKLDFIESDSPCSSEALSKKELSAEELYKRLEKLIIEDKANDEQIFDWVEANLDEIQMSSPTFLRALMTAVCKAAIIADSSTFRVDTAVIKQRVPILLKYLDSDTEKELQALYALQASIVKLDQPANLLRMFFDCLYDEEVISEDAFYKWESSKDPAEQNGKGVALKSVTAFFTWLREAEEESEDN

SEQ ID NO: 8756 - protein, 157 aa, Homo sapiens
MKCIPYSVLLKDLEMRNLRELEDLIIEAVYTDIIQGKLDQRNQLLEVDFCIGRDIRKKDINNIVKTLHEWCDGCEAVLLGIEQQVLRANQYKENHNRTQQQVEAEVTNIKKTLKATASSSAQEMEQQLAERECPPHAEQRQPTKKMSKVKGLVSSRH

SEQ ID NO: 8757 - protein, 278 aa, Homo sapiens
MDCREMDLYEDYQSPFDFDAGVNKSYLYLSPSGNSSPPGSPTLQKFGLLRTDPVPEEGEDVAATISATETLSEEEQEELRRELAKVEEEIQTLSQVLAAKEKHLAEIKRKLGINSLQELKQNIAKGWQDVTATSAYKKTSETLSQAGQKASAAFSSVGSVITKKLEDVKNSPTFKSFEEKVENLKGSPKNVESFASMLRHSPLTQMGPAKDKLVIGRIFHIVENDLYIDFGGKFHCVCRRPEVDGESPISWYAVWRRFSQVMITCFSSNSDFGKHRKR

SEQ ID NO: 8758 - protein, 1040 aa, Homo sapiens; identical to SEQ ID NO: 5697

SEQ ID NO: 8759 - protein, 602 aa, Homo sapiens
MSDKSDLKAELERKKQRLAQIREEKKRKEEERKKKEADMQQKKEPVQDDSDLDRKRRETEALLQSIGISPEPPLVPTPMSPSSKSVSTPSEAGSQDSGDLGPLTRRRLHKLGVSKVTQVDFLPREVVSYSKETQTPLATHQSEEDEEDEEMVESKVGQDSELENQDKKQEVKEAPPRELTEEEKQQILHSEEFLIFFDRTIRVIERALAEDSDIFFDYSGRELEEKDGDVQAGANLSFNRQFYDEHWSKHRVVTCMDWSLQYPELMVASYNNNEDAPHEPDGVALVWNMKFKKTTPEYVFHCQSSVMSVCFARFHPNLVVGGTYSGQIVLWDNRSHRRTPVQRTPLSAAAHTHPVYCVNVVGTQNAHNLITVSTDGKMCSWSLDMLSTPQESMELVYNKSKPVAVTGMAFPTGDVNNFVVGSEEGTVYTACRHGSKAGIGEVFEGHQGPVTGINCHMAVGPIDFSHLFVTSSFDWTVKLWTTKHNKPLYSFEDNADYVYDVMWSPVHPALFACVDGMGRLDLWNLNNDTEVPTASVAIEGASALNRVRWAQAGKEVAVGDSEGRIWVYDVGEGLAMLPGWSQNSWTQAILLCWPPKVLGLQT

SEQ ID NO: 8760 - protein, 948 aa, Homo sapiens
MYGSARSVGKVEPSSQSPGRSPRLPRSPRLGHRRTNSTGGSSGSSVGGGSGKTLSMENIQSLNAAYATSGPMYLSDHENVGSETPKSTMTLGRSGGRLPYGVRMTAMGSSPNIASSGVASDTIAFGEHHLPPVSMASTVPHSLRQARDNTIMDLQTQLKEVLRENDLLRKDVEVKESKLSSSMNSIKTFWSPELKKERALRKDEASKITIWKEQYRVVQEENQHMQMTIQALQDELRIQRDLNQLFQQDSSSRTGEPCVAELTEENFQRLHAEHERQAKELFLLRKTLEEMELRIETQKQTLNARDESIKKLLEMLQSKGLSAKATEEDHERTRRLAEAEMHVHHLESLLEQKEKENSMLREEMHRRFENAPDSAKTKALQTVIEMKDSKISSMERGLRDLEEEIQMLKSNGALSTEEREEEMKQMEVYRSHSKFMKNKIGQVKQELSRKDTELLALQTKLETLTNQFSDSKQHIEVLKESLTAKEQRAAILQTEVDALRLRLEEKETMLNKKTKQIQDMAEEKGTQAGEIHDLKDMLDVKERKVNVLQKKIENLQEQLRDKEKQMSSLKERVKSLQADTTNTDTALTTLEEALAEKERTIERLKEQRDRDEREKQEEIDNYKKDLKDLKEKVSLLQGDLSEKEASLLDLKEHASSLASSGLKKDSRLKTLEIALEQKKEECLKMESQLKKAHEAALEARASPEMSDRIQHLEREITRYKDESSKAQAEVDRLLEILKEVENEKNDKDKKIAELESLFSRQVKDQNKKVANLKHKEQVEKKKSAQMLEEARRREDNLNDSSQQLQVEELLMAMEKVKQELESMKAKLSSTQQSLAEKETHLTNLRAERRKHLEEVLEMKQEALLAAISEKDANIALLELSSSKKKTQEEVAALKREKDRLVQQLKQQTQNRMKLMADNYEDDHFKSSHSNQTNHKPSPDQDEEEGIWA

SEQ ID NO: 8761 - protein, 913 aa, Homo sapiens
MEVGSEEEKWEKLDAEFDHFVVDMKPFVLKLPHRTERQRCALWIRKLCEPSGTGAGIMGRKNRNLYAKLLLHMLKRGALEGPFTHRPEPGTLKILPSYMSIYFDEPNPARAKGSSPEGLPAWVLGELETSEHKLNESWKLSSGEDNTLVQSPTDVYSREQYTGKLRVRSHSLSPTHREDGQNITPKICEVYSKKSPVSLDDSDIEARLNSWNLGLDMKTKMMEAKFHEEKLKLQQKHDADVQKILERKNNEIEELKTLYRSKQHETEETIRKLEKKVQTLIRDCQVIRETKEDQIAELKKICEQSTESLNNDWEKKLHNAVAEMEQEKFDLQKQHTENIQELLEDTNVRLNKMESEYMAQTQSTNHMIKELEARVQQLTGEAENSNLQRQKLIQEKAELERCYQITCSELQEVKARRNTLHKEKDHLVNDYEQNMKLLQTKYDADINLLKQEHALSASKASSMIEELEQNVCQLKQQLQESELQRKQQLRDQENKFQMEKSHLKHIYEKKAHDLQSELDKGKEDTQKKIHKFEEALKEKEEQLTRVTEVQRLQAQQADAALEEFKRQVELNSEKVYAEMKEQMEKVEADLTRSKSLREKQSKEFLWQLEDIRQRYEQQIVELKLEHEQEKTHLLQQHNAEKDSLVRDHEREIENLEKQLRAANMEHENQIQEFKKRDAQVIADMEAQVHKLREELINVNSQRKQQLVELGLLREEEKQRATREHEIVVNKLKAESEKMKIELKKTHAAETEMTLEKANSKLKQIEKEYTQKLAKSSQIIAELQTTISSLKEENSQQQLAAERRLQDVRQKFEDEKKQLIRDNDQAIKVLQDELENRSNQVRCAEKKLQHKELESQEQITYIRQEYETKLKGLMPASLRQELEDTISSLKSQVNFLQKRASILQEELTTYQGRR

SEQ ID NO: 8762 - protein, 273 aa, Homo sapiens
MQDEKLRDETEQPVSKVIERNRLRTVLKNLSLLKLLKSSNRRIQELHKLAKRCWHSLLSVPKILRISSGENSACNKTKQNNEEFQEIGCSEKELKSKKLESTGDPKKKEYKEWKSQVQSGMRNKEKTSLAAMPRKEKHIEPEVAASRDDSLNPGVQGRQPLTEGPRVIFIKPYRNRTPMGHMKQLDVADQWIWFEGLPTRIHLPAPRVMCRSSTLRWVKRRCTRFCSASLEMPMWHPYKVDVTWTRARGASRGWRSRHQLKGRNGWRNSRVYK

SEQ ID NO: 8763 - protein, 51 aa, Homo sapiens
MQLRHIGDNIDHRMVREDLQQDGRDALDHFVFFFFRRVQVLLHFFWNNHLL

SEQ ID NO: 8764 - protein, 147 aa, Homo sapiens
MAGGAREVLTLQLGHFAGFVGAHWWNQQDAALGRATDSKEPPGELCPDVLYRTGRTLHGQETYTPRLILMDLKGSLSSLKEEGGLYRDKQLDAAIAWQGKLTTHKEELYPKNPYLQDFLSAEVRASVLNFLTRCHNLRVSIGAGSAE

SEQ ID NO: 8765 - protein, 558 aa, Homo sapiens
MSVSVHETRKSRSSTGSMNVTLFHKASHPDCVLAASSRYFEAMFSHGLRESRDDTVNFQDNLHPEVLELLLDFAYSSRIAINEENAESLLEAGDMLQFHDVRDAAAEFLEKNLFPSNCLGMMLLSDAHQCRRLYEFSWRMCLVHFETVRQSEDFNSLSKDTLLDLISSDELETEDERVVFEAILQWVKHDLEPRKVHLPELLRSVRLALLPSDCLQEAVSSEALLMADERTKLIMDEALRCKTRILQNDGVVTSPCARPRKAGHTLLILGGQTFMCDKIYQVDHKAKEIIPKADLPSPRKEFSASAIGCKVYVTGGRGSENGVSKDVWVYDTVHEEWSKAAPMLIARFGHGSAELENCLYVVGGHTSLAGVFPASPSVSLKQVEKYDPGANKWMMVAPLRDGVSNAAVVSAKLKLFVFGGTSIHRDMVSKVQCYDPSENRWTIKAECPQPWRYTAAAVLGSQIFIMGGDTEFTAASAYRFDCETNQWTRIGDMTAKRMSCHALASGNKLYVVGGYFGTQRCKTLDCYDPTSDTWNCITTVPYSLIPTAFVSTWKHLPA

SEQ ID NO: 8766 - protein, 971 aa, Homo sapiens
MNFLRGVMGGQSAGPQHTEAETVRGAAGLGLGKGSGQGRGRSTRRPEECGLKFRHSFRLVKHILYHVTINVSDSEIIGYALDTLYNIISNEEEEEVGGSQEENSTRQSEDLGSQFTEIFIKQQENVTLLLSLLEEFDFHVRWPGVKLLTSLLKQLGPQVQQIILVSPMGVSRLMDLLADSREVIRNDGVLLLQALTRSNGAIQKIVAFENAFERLLDIISEEGNSDGGIVVEDCLILLQNLLKNNNSNQNFFKEGSYIQRMKPWFEVGDENSGWSAQKVTNLHLMLQLVRVLVSPTNPPGATSSCQKAMFQCGLLQQLCTILMATGVPADILTETINTVSEVIRGCQVNQDYFASVNAPSNPPRPAIVVLLMSMVNERQPFVLRCAVLYCFQCFLYKNQKGQGEIVSTLLPSTIDATGNSVSAGQLLCGGLFSTDSLSNWCAAVALAHALQENATQKEQLLRVQLATSIGNPPVSLLQQCTNILSQGDKIDRRGSKIQTRVGLLMLLCTWLSNCPIAVTHFLHNSANVPFLTGQIAENLGEEEQLVQGLCALLLGISIYFNDNSLESYMKEKLKQLIEKRIGKENFIEKLGFISKHELYSRASQKPQPNFPSPEYMIFDHEFTKLVKELEGVITKAIYKSSEEDKKEEEVKKTLEQHDNIVTHYKNMIREQDLQLEELRQQVSTLKCQNEQLQTAVTQQVSQIQQHKDQYNLLKIQLGKDNQHQGSYSEGAQMNGIQPEEIGRLREEIEELKRNQELLQSQLTEKDSMIENMKSSQTSGTNEQSSAIVSARDSEQVAELKQELATLKSQLNSQSVEITKLQTEKQELLQKTEAFAKSVEVQGETETIIATKTTDVEGRLSALLQETKELKNEIKALSEERTAIKEQLDSSNSTIAILQTEKDKLELEITDSKKEQDDLLVLLADQDQKILSLKNKLKDLGHPVEEEDELESGDQEDEDDESEDPGKDLDHI

SEQ ID NO: 8767 - protein, 85 aa, Homo sapiens
MGNSDSQYTLQGSKNHSNTITGAKQIPCSLKIRGIHAKEEKSLHGWGHGSNGAGYKSRSLARSCLSHFKSNQPYASRLGGPTCKV

SEQ ID NO: 8768 - protein, 57 aa, Homo sapiens
  MOD_RES 1: note = X can be any amino acid
XGRAPGPAIGGRRAGDSCPGWRRRSRSRGRGQRLSHGPRRRPQLLTETRRPVLVQWL

SEQ ID NO: 8769 - protein, 311 aa, Homo sapiens
MVSLRVNPLSLVEIILHVVRQMTDPNVALTFLEKTREKVKSSDEAVILCKTAIGALKLNIGDLQVTKETIEDVEEMLNNLPGVTSVHSRFYDLSSKYYQTIGNHASYYKDALRFLGCVDIKDLPVSEQQERAFTLGLAGLLGEGVFNFGELLMHPVLESLRNTDRQWLIDTLYAFNSGNVERFQTLKTAWGQQPDLAANEAQLLRKIQLLCLMEMTFTRPANHRQLTFEEIAKSAKITVNEVELLVMKALSVGLVKGSIDEVDKRVHMTWVQPRVLDLQQIKGMKDRLEFWCTDVKSMEMLVEHQAHDILT

SEQ ID NO: 8770 - protein, 386 aa, Homo sapiens
MKSLKACKREIKSVMNTAGNSAPSLFLKSNFEYLRGNYRKAVKLLNSSNIAEHPGFMKTGECLRCMFWNNLGCIHFAMSKHNLGIFYFKKALQENDNVCAQLSAGSTDPGKKFSGRPMCTLLTNKRYELLYNCGIQLLHIGRPLAAFECLIEAVQVYHANPRLWLRLAECCIAANKGTSEQETKGLPSKKGIVQSIVGQGYHRKIVLASQSIQNTVYNDGQSSAIPVASMEFAAICLRNALLLLPEEQQDPKQENGAKNSNQLGGNTESSESSETCSSKSHDGDKFIPAPPSSPLRKQELENLKCSILACSAYVALALGDNLMALNHADKLLQQPKLSGSLKFLGHLYAAEALISLDRISDAITHLNPENVTDVSLGISSNEQDQG

SEQ ID NO: 8771 - protein, 531 aa, Homo sapiens
MLQELNFGAYLGLPAFLLPLNQEDNTNLARVLTNHIHTGHHSSMFWMRVPLVAPEDLRDDIIENAPTTHTEEYSGEEKTWMWWHNFRTLCDYSKRIAVALEIGADLPSNHVIDRWLGEPIKAAILPTSIFLTNKKGFPVLSKMHQRLIFRLLKLEVQFIITGTNHHSEKEFCSYLQYLEYLSQNRPPPNAYELFAKGYEDYLQSPLQPLMDNLESQTYEVFEKDPIKYSQYQQAIYKCLLDRVPEEEKDTNVQVLMVLGAGRGPLVNASLRAAKQADRRIKLYAVEKNPNAVVTLENWQFEEWGSQVTVVSSDMREWVAPEKADIIVSELLGSFADNELSPECLDGAQHFLKDDGVSIPGEYTSFLAPISSSKLYNEVRACREKDRDPEAQFEMPYVVRLHNFHQLSAPQPCFTFSHPNRDPMIDNNRYCTLEFPVEVNTVLHGFAGYFETVLYQDITLSIRPETHSPGMFSWFPILFPIKQPITVREGQTICVRFWRCSNSKKVWYEWAVTAPVCSAIHNPTGRSYTIGL

SEQ ID NO: 8772 - protein, 262 aa, Homo sapiens; identical to SEQ ID NO: 5940

SEQ ID NO: 8773 - protein, 376 aa, Homo sapiens [sequence omitted]

SEQ ID NO: 8774 - protein, 344 aa, Homo sapiens
MAGSGCAWGAEPPRFLEAFGRLWQVQSRLGSGSSASVYRVRCCGNPGSPPGALKQFLPPGTTGAAASAAEYGFRKERAALEQLQGHRNIVTLYGVFTIHFSPNVPSRCLLLELLDVSVSELLLYSSHQGCSMWMIQHCARDVLEALAFLHHEGYVHADLKPRNILWSAENECFKLIDFGLSFKEGNQDVKYIQTDGYRAPEAELQNCLAQAGLQSDTECTSAVDLWSLGIILLEMFSGMKLKHTVRSQEWKANSSAIIDHIFASKAVVNAAIPAYHLRDLIKSMLHDDPSRRIPAEMALCSPFFSIPFAPHIEDLVMLPTPVLRLLNVLDDDYLENEEEYEGLC

SEQ ID NO: 8775 - protein, 486 aa, Homo sapiens
MALKMNTLSSNRANMLKEVQLMNRLSHPNILRFMGVCVHQGQLHALTEYINSGNLEQLLDSNLHLPWTVRVKLAYDIAVGLSYLHFKGIFHRDLTSKNCLIKRDENGYSAVVADFGLAEKIPDVSMGSEKLAVVGSPFWMAPEVLRDEPYNEKADVFSYGIILCEIIARIQADPDYLAAENFGLDYDAFQHMVGDCPPDFLQLTFNCCNMDPKLRPSFVEIGKTLEEILSRLQEEEQERDRKLQPTARGLLEKAPGVKRLSSLDDKIPHKSPCPRRTIWLSRSQSDIFSRKPAAVSVLDPYYRPRDGAARTPKVNPFSARQDLMGGKIKFFDLPSKSVISLVFDLDAPGPGTMPLADWQEPLAPPIRRWRSLPGSPEFLHQEACPFVGREESLSDGPPPRLSSLKYRVKEIPPFRASALPAAQAHEAMDCSILQEENGFGSRPQGTSPCPAGASEEMEVEERPAGSTPATFSTSGIGLQTQGKQDG

SEQ ID NO: 8776 - protein, 484 aa, Homo sapiens
MTLWILPKFKAVDFSPSLAAYTHTWLLPRFLEILIQCGHCKRLAPEYEAAATRLKGIVPLAKVDCTANTNTCNKYGVSGYPTLKIFRDGEEAGAYDGAAADGIVSHLKKQAGPASVPLRTEEEFKKFISDKDASIVGFFDDSFSEAHSEFLKAASNLRDNYRFAHTNVESLVNEYDDNGEGIILFRPSHLTNKFEDKTVAYTEQKMTSGKIKKFIQENIFGICPHMTEDNKDLIQGKDLLIAYYDVDYEKNAKGSNYWRNRVMMVAKKFLDAGHKLNFAVASRKTFSHELSDFGLESTAGEIPVVAIRTAKGEKFVMQEEFSRDGKALERFLQDYFDGNLKRYLKSEPIPESNDGPVKVVVAENFDEIVNNENKDVLIEFYAPWCGHCKNLEPKYKELGEKLSKDPNIVIAKMDATANDVPSPYEVRGFPTIYFSPANKKLNPKKYEGGRELSDFISYLQREATNPPVIQEEKPKKKKKAQEDL

SEQ ID NO: 8777 - protein, 294 aa, Homo sapiens
MSAQHFVSTEQVELPGPGQWVVAECPARVDFSGGWSDTPPLAYELGGAVLGLAVRVDGRRPIGARARRIPEPELWLAVGPRQDEMTVKIVCRCLADLRDYCQPHAPGALLKAAFICAGIVHVHSELQLSEQLLRTFGGGFELHTWSELPHGSGLGTSSILAGTALAALQRAAGRVVGTEALIHAVLHLEQVLTTGGGWQDQVGGLMPGIKVGRSRAQLPLKVEVEEVTVPEGFVQKLNDHLLLVYTGKTRLARNLLQDVLRSWYARLPAVVQNAHSLVRQTEECAEGFRQGSHI

SEQ ID NO: 8778 - protein, 314 aa, Homo sapiens
VGRMEGCSSPIVVKFADTQKDKEQRRLQQQLAQQMQQLNTATWGNLTGLGGLTPQYLALLQQATSSSNLGAFSGIQQMAGMNALQLQNLATLAAAAAAAQTSATSTNANPLSTTSSALGALTSPVAASTPNSTAGAAMNSLTSLGTLQGLAGATVGLNNINALAGMAALNGGLGATGLTNGTAGTMDALTQAYSGIQQYAAAALPTLYSQSLLQQQSAAGSQKEGPEGANLFIYHLPQEFGDQDILQMFMPFGNVISAKVFIDKQTNLSKCFGFVSYDNPVSAQAAIQAMNGFQIGMKRLKVQLKRSKNDSKPY

SEQ ID NO: 8779 - protein, 360 aa, Homo sapiens
SMEKTYTSTSNNSISGSLKRLEDTTARFTNANFQEVSAHTSSGKDVSETRGSEGKGKKSSAHSSGQRGRKPGGGRNPGTTVSAASPFPQAGYKRAQTSGIEEETVKEKKRKGNKQSKHGPGRPKGNKNQENVSHLSVSSASPTSSVASAAGSITSSSLQKSPTLLRNGSLQSLSVGSSPVGSEISMQYRHDGACPTTTFSELLNAIHNDRGDSSTLTKQELKFIGIYNSNDVAVSFPNVVSGSGSSTPVSSSHLPQQSSGHLQQVGALSPSAVSSAAPAVATTQANTLSGSSLSQAPSHMYGNRSNSSMAALIAQSENNQTDQDLGDNSRNLVGRGSSPRGSLSPRSPVSSLQIRYDQPG

SEQ ID NO: 8780 - protein, 307 aa, Homo sapiens
MQSLTLDLLGPSELLLALNMGNTSFNEVMEAQLPSHGGPKPSAESDMGTRRDYIMAKYVEHRFARRCTPEPQRLWTAICNRDLLSVLEAFANGQDFGQPLPGPDAQAPEELVLHLAVKVANQASLPLVDFIIQNGGHLDAKAADGNTALHYAALYNQPDCLKLLLKGRALVGTVNEAGETALDIARKKHHKECEELLEQAQAGTFAFPLHVDYSWVISTEPGSDSEEDEEEKRCLLKLPAQAHWASGRLDISNKTYETVASLGAATPQGESEDCPPPLPVKNSSRTLVQGCARHASGGRREERARRE

SEQ ID NO: 8781 - protein, 498 aa, Homo sapiens
MSSCVSSQPSSNRAAPQDELGGRGSSSSESQKPCEALRGLSSLSIHLGMESFIVVTECEPGCAVDLGLARDRPLEADGQEVPLDTSGSQARPHLSGRKLSLQERSQGGLAAGGSLDMNGRCICPSLPYSPVSSPQSSPRLPRRPTVESHHVSITGMQDCVQLNQYTLKDEIGKGSYGVVKLAYNENDNTYYAMKVLSKKKLIRQAGFPRRPPPRGTRPAPGGCIQPRGPIEQVYQEIAILKKLDHPNVVKLVEVLDDPNEDHLYMVFELVNQGPVMEVPTLKPLSEDQARFYFQDLIKGIEYLHYQKIIHRDIKPSNLLVGEDGHIKIADFGVSNEFKGSDALLSNTVGTPAFMAPESLSETRKIFSGKALDVWAMGVTLYCFVFGQCPFMDERIMCLHSKIKSQALEFPDQPDIAEDLKDLITRMLDKNPESRIVVPEIKILVKTMIRKRSFGNPFEGSRREERSLSAPGNLLTKQGSEDNLQGTDPPPVGEEEVLL

SEQ ID NO: 8782 - protein, 199 aa, Homo sapiens; identical to SEQ ID NO: 5747

SEQ ID NO: 8783 - protein, 415 aa, Homo sapiens
MWRKVYTPRSSFELSAQPPSWEQRKLLEKCAMTALSSKLISQQKAFFAKMVVDAVMMLDDLLQLKMIGIKKVQGGALEDSQLVAGVAFKKTFSYAGFEMQPKKYHNPKIALLNVELELKAEKDNAEIRVHTVEDYQAIVDAEWNILYDKLEKIHHSGAKVVLSKLPIGDVATQYFADRDMFCAGRVPEEDLKRTMMACGGSIQTSVNALSADVLGRCQVFEETQIGGERYNFFTGCPKAKTCTFILRGGAEQFMEETERSLHDAIMIVRRAIKNDSVVAGGGAIEMELSKYLRDYSRTIPGKQQLLIGAYAKALEIIPRQLCDNAGFDATNILNKLRARHAQGGTWYGVDINNEDIADNFEAFVWEPAMVRINALTAASEAACLIVSVDETIKNPRSTVDAPTAAGRGRGRGRPH

SEQ ID NO: 8784 - protein, 1038 aa, Homo sapiens; identical to SEQ ID NO: 6752

SEQ ID NO: 8785 - protein, 479 aa, Homo sapiens
MRLRRLALFPGVALLLAAARLAAASEFFAPWCGHCKRLAPEYEAAATRLKGIVPLAKVDCTANTNTCNKYGVSGYPTLKIFRDGEEAGAYDGAAADGIVSHLKKQAGPASVPLRTEEEFKKFISDKDASIVGFFDDSFSEAHSEFLKAASNLRDNYRFAHTNVESLVNEYDDNGEGIILFRPSHLTNKFEDKTVAYTEQKMTSGKIKKFIQENIFGICPHMTEDNKDLIQGKDLLIAYYDVDYEKNAKGSNYWRNRVMMVAKKFLDAGHKLNFAVASRKTFSHELSDFGLESTAGEIPVVAIRTAKGEKFVMQEEFSRDGKALERFLQDYFDGNLKRYLKSEPIPESNDGPVKVVVAENFDEIVNNENKDVLIEFYAPWCGHCKNLEPKYKELGEKLSKDPNIVIAKMDATANDVPSPYEVRGFPTIYFSPANKKLNPKKYEGGRELSDFISYLQREATNPPVIQEEKPKKKKKAQEDL

SEQ ID NO: 8786 - protein, 75 aa, Homo sapiens
MGVKLEIFRMIIYLTFPVAMFWVSNQAEWFEDDVIQRKRELWPPEKLQELEEFKERLRKRKRREEKLLRDAQQNS

SEQ ID NO: 8787 - protein, 268 aa, Homo sapiens; identical to SEQ ID NO: 8685

SEQ ID NO: 8788 - protein, 116 aa, Homo sapiens
MLLECGMQEEGLFRVAPSASKLKKLKAALDCCVVDVQEYSADPHAIAGALKSYLRELPEPLMTFELYDEWIQASNVQEQDKKLQALWNACEKLPKANHNNIRYLIKFYPSCQNIKM

SEQ ID NO: 8789 - protein, 301 aa, Homo sapiens
MVRTKTWTLKKHFVGYPTNSDFELKTAELPPLKNGEVLLEALFLTVDPYMRVAAKRLKEGDTMMGQQVAKVVESKNVALPKGTIVLASPGWTTHSISDGKDLEKLLTEWPDTIPLSLALGTVGMPGLTAYFGLLEICGVKGGETVMVNAAAGAVGSVVGQIAKLKGCKVVGAVGSDEKVAYLQKLGFDVVFNYKTVESLEETLKKASPDGYDCYFDNVGGEFSNTVIGQMKKFGRIAICGAISTYNRTGPLPPGPPPEIVIYQELRMEAFVVYRWQGDARQKALKDLLKWVLEIKRENEED

SEQ ID NO: 8790 - protein, 355 aa, Homo sapiens
MLGSGFKAERLRVNLRLVINRLKLLEKKKTELAQKARKEIADYLAAGKDERARIRVEHIIREDYLVEAMEILELYCDLLLARFGLIQSMKELDSGLAESVSTLAELKIVADQLCAKYSKEYGKLCRTNQIGTVNDRLMHKLSVEAPPKILVERYLIEIAKNYNVPYEPDSVVMAEAPPGVETDLIDVGFTDDVKKGGPGRGGSGGFTAPVGGPDGTVPMPMPMPMPMPSANTPFSYPLPKGPSDFNGLPMGTYQAFPNIHPPQIPATPPSYESVDDINADKNISSAQIVGPGPKPEASAKLPSRPADNYDNFVLPELPSVPDTLPTASAGASTSASEDIDFDDLSRRFEELKKKT

SEQ ID NO: 8791 - protein, 724 aa, Homo sapiens
MQMTIQALQDELRIQRDLNQLFQQDSSSRTGEPCVAELTEENFQRLHAEHERQAKELFLLRKTLEEMELRIETQKQTLNARDESIKKLLEMLQSKGLSAKATEEDHERTRRLAEAEMHVHHLESLLEQKEKENSMLREEMHRRFENAPDSAKTKALQTVIEMKDSKISSMERGLRDLEEEIQMLKSNGALSTEEREEEMKQMEVYRSHSKFMKNKIGQVKQELSRKDTELLALQTKLETLTNQFSDSKQHIEVLKESLTAKEQRAAILQTEVDALRLRLEEKETMLNKKTKQIQDMAEEKGTQAGEIHDLKDMLDVKERKVNVLQKKIENLQEQLRDKEKQMSSLKERVKSLQADTTNTDTALTTLEEALAEKERTIERLKEQRDRDEREKQEEIDNYKKDLKDLKEKVSLLQGDLSEKEASLLDLKEHASSLASSGLKKDSRLKTLEIALEQKKEECLKMESQLKKAHEAALEARASPEMSDRIQHLEREITRYKDESSKAQAEVDRLLEILKEVENEKNDKDKKIAELESLTSRQVKDQNKKVANLKHKEQVEKKKSAQMLEEARRREDNLNDSSQQLQVEELLMAMEKVKQELESMKAKLSSTQQSLAEKETHLTNLRAERRKHLEEVLEMKQEALLAAISEKDANIALLELSSSKKKTQEEVAALKREKDRLVQQLKQQTQNRMKLMADNYEDDHFKSSHSNQTNHKPSPDQDEEEGIWA

SEQ ID NO: 8792 - protein, 135 aa, Homo sapiens
MAIGFNVETVTYKNLKFQVWDLGGQTSIRPYWRCYYSNTDAVIYVVDSCDRDRIGISKSELVAMLEEEELRKAILVVFANKQDMEQAMTSSEMANSLGLPALKDRKWQIFKTSATKGTGLDEAMEWLVETLKSRQ

SEQ ID NO: 8793 - protein, 227 aa, Homo sapiens
RRQILKELALCLRRQEMYGPRAASRNKETSAGPVAVMGKDYYKILGIPSGANEDEIKKAYRKMALKYHPDKNKEPNAEEKFKEIAEAYDVLSDPKKRGLYDQYGEEGLKTGGGTSGGSSGSFHYTFHGDPHATFASFFGGSNPFDIFFASSRSTRPFSGFDPDDMDVDEDEDPFGAFGRFGFNGLSRGPRRAPEPLYPRRKVQDPPVVHELRVSLEEIYHGSTKRMK

SEQ ID NO: 8794 - protein, 83 aa, Homo sapiens
MSMLKPSGLKAPTKILKPGSTALKTPTAVVAPVEKTISSEKASSTPSSETQEEFVDDFRVGERVWVNGNKPGFIQFLGETQFA

SEQ ID NO: 8795 - protein, 213 aa, Homo sapiens
MDMLGGPGIESQCRKVDIIADAAYSIFQKPKSFTGNFVIDENILKEEGIENFDVYAIKPGHPLQPDFFLDEYPEAVSKKVESTGAVPEFKEEKLQLQPKPRSGAVEETFRIVKDSLSDDVVKATQAIYLFELSGEDGGTWFLDLKSKGGNVGYGEPSDQADVVMSMTTDDFVKMFSGKLKPTMAFMSGKLKIKGNMALAIKLEKLMNQMNARL

SEQ ID NO: 8796 - protein, 409 aa, Homo sapiens
MNRTWPRRIWGSSQDEPEFASSVRRPHLTSDAVALLRDNVTPRENELWTSLGDSWTRPGLELSPEEGPPYRPEFFSGWEPPVTDPQSRAWEDPVEKQLQHERRRRQVTQATQQGRGWEVRGRGRSAWPRLTRLSYFLQQSAPQVAVNGHRDLEPESEPQLESETAGKWVLCNYDFQARNSSELSVKQRDVLEVLDDSRKWWKVRDPAGQEGYVPYNILTPYPGPRLHHSQSPARSLNSTPPPPPAPAPAPPPALARPRWDRPRWDSCDSLNGLDPSEKEKFSQMLIVNEELQARLAQGRSGPSRAVPGPRAPEPQLSPGSDASEVRAWLQAKGFSSGTVDALGVLTGAQLFSLQKEELRAVSPEEGARVYSQVTVQRSLLEDKEKVSELEAVMEKQKKKVEGEVEMEVI

SEQ ID NO: 8797 - protein, 474 aa, Homo sapiens
MASLSRALRVAAAHPRQSPTRGMGPCNLSSAAGPTAEKSVPYQRTLKEGQGTSVVAQGPSRPLPSTANVVVIGGGSLGCQTLYHLAKLGMSGAVLLERERLTSGTTWHTAGLLWQLRPSDVEVELLAHTRRVVSRELEEETGLHTGWIQNGGLFIASNRQRLDEYKRLMSLGKAYGVESHVLSPAETKTLYPLMNVDDLYGTLYVPHDGTMDPAGTCTTLARAASARGAQVIENCPVTGIRVWTDDFGVRRVAGVETQHGSIQTPCVVNCAGVWASAVGRMAGVKVPLVAMHHAYVVTERIEGIQNMPNVRDHDASVYLRLQGDALSVGGYEANPIFWEEVSDKFAFGLFDLDWEVFTQHIEGAINRVPVLEKTGIKSTVCGPESFTPDHKPLMGEAPELRGFFLGCGFNSAGMMLGGGCGQELAHWIIHGRPEKDMHGYDIRRFHHSLTDHPRWIRERSHESYQELLRRLPPR

SEQ ID NO: 8798 - protein, 630 aa, Homo sapiens
MSIELQSVSNPVHRKDLVIRLTDDTDPFFLYNLVISEEDFQSLKFQQGLLVDFLAFPQKFIDLLQQCTQEHAKEIPRFLLQLVSPAAILDNSPAFLNVVETNPFKHLTHLSLKLLPGNDVEIKKFLAGCLKCSKEEKLSLMQSLDDATKQLDFTRKTLAEKKQELDKLRNEWASHTAALTNKHSQELTNEKEKALQAQVQYQQQHEQQKKDLEILHQQNIHQLQNRLSELEAANKDLTERKYKGDSTIRELKAKLSGVEEELQRTKQEVLSLRRENSTLDVECHEKEKHVNQLQTKVAVLEQEIKDKDQLVLRTKEAFDTIQEQKVVLEENGEKNQVQLGKLEATIKSLSAELLKANEIIKKLQGDLKTLMGKLKLKNTVTIQQEKLLAEKEEKLQKEQKELQDVGQSLRIKEQEVCKLQEQLEATVKKLEESKQLLKNNEKLITWLNKELNENQLVRKQDVLGPSTTPPAHSSSNTIRSGISPNLNVVDGRLTYPTCGIGYPVSSAFAFQNTFPHSISAKNTSHPGSGTKVQFNLQFTKPNASLGDVQSGATISMPCSTDKENGENVGLESKYLKKREDSIPLRGLSQNLFSNSDHQRDGTLGALHTSSKPTALPSASSAYFPGQLPNS

SEQ ID NO: 8799 - protein, 389 aa, Homo sapiens
MDRETLIDVARTSLRTKVHAELADVLTEAVVDSILAIKKQDEPIDLFMIEIMEMKHKSETDTSLIRGLVLDHGARHPDMKKRVEDAYILTCNVSLEYEKTEVNSGFFYKSAEEREKLVKAERKFIEDRVKKIIELKRKVCGDSDKGFVVINQKGIDPFSLDALSKEGIVALRRAKRRNMERLTLACGGVALNSFDDLSPDCLGHAGLVYEYTLGEEKFTFIEKCNNPRSVTLLIKGPNKHTLTQIKDAVRDGLRAVKNAIDDGCVVPGAGAVEVAMAEALIKHKPSVKGRAQLGVQAFADALLIIPKVLAQNSGFDLQETLVKIQAEHSESGQLVGVDLNTGEPMVAAEVGVWDNYCVKKQLLHSCTVIATNILLVDEIMRAGMSSLKG

SEQ ID NO: 8800 - protein, 146 aa, Homo sapiens
MTVNEAKEKLKEAPEGTFLIRDSSHSDYLLTISVKTSAGPTNLRIEYQDGKFRLDSIICVKSKLKQFDSVVHLIDYYVQMCKDKRTGPEAPRNGTVHLYLTKPLYTSAPSLQHLCRLTINKCTGAIWGLPLPTRLKDYLEEYKFQV

SEQ ID NO: 8801 - protein, 634 aa, Homo sapiens
MLEYALKQERAKYHKLKFGTDLNQGEKKADVSEQVSNGPVESVTLENSPLVWKEGRQLLRQYLEEVGYTDTILDMRSKRVRSLLGRSLELNGAVEPSEGAPRAPPGPAGLSGGESLLVKQIEEQIKRNAAGKDGKERLGGSVLGQIPFLQNCEDEDSDEDDELDSVQHKKQRVKLPSKALVPEMEDEDEEDDSEDAINEFDFLGSGEDGEGAPDPRRCTVDGSPHELESRRVKLQGILADLRDVDGLPPKVTGPPPGTPQPRPHEDVFIMDTIGGGEVSLGDLADLTVTNDNDLSCDLSDSKDAFKKTWNPKFTLRSHYDGIRSLAFHHSQSALLTASEDGTLKLWNLQKAVTAKKNAALDVEPIHAFRAHRGPVLAVAMGSNSEYCYSGGADACIHSWKIPDLSMDPYDGYDPSVLSHVLEGHGDAVWGLAFSPTSQRLASCSADGTVRIWDPSSSSPACLCTFPTASEHGVPTSVAFTSTEPAHIVASFRSGDTVLYDMEVGSALLTLESRGSSGPTQINQVVSHPNQPLTITAHDDRGIRFLDNRTGKPVHSMVAHLDAVTCLAVDPNGAFLMSGSHDCSLRLWSLDNKTCVQEITAHRKKHEEAIHAVACHPSKALIASAGADALAKVFV

SEQ ID NO: 8802 - protein, 455 aa, Homo sapiens; identical to SEQ ID NO: 5679

SEQ ID NO: 8803 - protein, 157 aa, Homo sapiens
MKSMSQLAVLSRRWKPSEMKLDPFQEVVLESSSVDELREKLSEISGIPLDDIEFAKGRGTFPCDISVLDIHQDLDWNPKVSTLNVWPLYICDDGAVIFYRDKTEELMELTDEQRNELMKKESSRLQKTGHRVTYSPRKEKALKIYLDGAPNKDLTQD

SEQ ID NO: 8804 - protein, 360 aa, Homo sapiens
MKATAMTSAWLAQGTGEGVNDVRKGACASHVSTMASFLKGAHVTINARAEEDVEPECIMEKVAKASGANYSFHKESGRFQDVGPQAPVGSVYQKTNAVSEIKRVGKDSFWAKAEKEEENRRLEEKRRAEEAQRQLEQERRERELREAARREQRYQEQGGEASPQRTWEQQQEVVSRNRNEQESAVHPREIFKQKERAMSTTSISSPQPGKLRSPFLQKQLTQPETHFGREPAAAISRPRADLPAEEPAPSTPPCLVQAEEEAVYEEPPEQETFYEQPPLVQQQGAGSEHIDHHIQGQGLSGQGLCARALYDYQAADDTEISFDPENLITGIEVIDEGWWRGYGPDGHFGMFPANYVELIE

SEQ ID NO: 8805 - protein, 96 aa, Homo sapiens
MCHTSCSSGCQPACCAPSPCQPACCVPVSCQSSVCVPVSCRPIVCAAPSCQSSLCVPVSCRPVVYAAPSCQSSGCCQPSCTSVLCRPISYSISSCC

SEQ ID NO: 8806 - protein, 8 aa, Homo sapiens
MPLSSPNA

SEQ ID NO: 8807 - protein, 127 aa, Homo sapiens
MSSSMWYIMQSIQSKYSLSERLIRTIAAIRSFPHDNVEDLIRGGADVNCTHGTLKPLHCACMVSDADCVELLLEKGAEVNALDGYNRTALHYAAEKDEACVEVLLEYGANPNALDGNRDTPLHWAAF

SEQ ID NO: 8808 - protein, 104 aa, Homo sapiens
QWTASTATITKEKQDQPKKDISNYQVEQAQVLLKREKEIPPTVFPNRSPWCQNPYVSAHPYCPLIEPHNTSTAGGRLDRQAARSTRPNRASGSKKKKTSESQKQ

SEQ ID NO: 8809 - protein, 371 aa, Homo sapiens
MEEEGLADEEVRLVQKKDTGHIYAMKILRKSDMLEKEQVAHIRAERDILVEADGAWVVKMFYSFQDKRNLYLIMEFLPGGDMMTLLMKKDTLTEEETQFYISETVLAIDAIHQLGFIHRDIKPDNLLLDAKGHVKLSDFGLCTGLKKAHRTEFYRNLTHNPPSDFSFQNMNSKRKAETWKKNRRQLAYSTVGTPDYIAPEVFMQTGYNKLCDWWSLGVIMYEMLIGYPPFCSETPQETYRKVMNWKETLVFPPEVPISEKAKDLILRFCIDSENRIGNSGVEEIKGHPFFEGVDWEHIRERPAAIPIEIKSIDDTSNFDDFPESDILQPVPNTTEPDYKSKDWVFLNYTYKRFEGLTQRGSIPTYMKAGKL

SEQ ID NO: 8810 - protein, 187 aa, Homo sapiens
MNNTLRKDGKKDCCFEISAPDKRIYQFTAASPKDAEEWVQQLKFVLQDMESDIIPEDYDERGELYDDVDHPLPISNPLTSSQPIDDEIYEELPEEEEDSAPVKVEEQRKMSQDSVHHTSGDKSTDYANFYQGLWDCTGAFSDELSFKRGDVIYILSKEYNRYGWWVGEMKGAIGLVPKAYIMEMYDI

SEQ ID NO: 8811 - protein, 72 aa, Homo sapiens
MALSLGWKAHRNHCGLLLQALRSSGLLLFPCGQCPWRGAGSFLDPEIKAFLEENTEVTSSGSLTPEIQLRLL

SEQ ID NO: 8812 - protein, 972 aa, Homo sapiens
MAAAAAEQQQFYLLLGNLLSPDNVVRKQAEETYENIPGQSKITFLLQAIRNTTAAEEARQMAAVLLRRLLSSAFDEVYPALPSDVQTAIKNLLPGFLQAVNDSCYQNDDSVLKSLVEIADTVPKYLRPHLEATLQLSLKLCGDTSLNNMQRQLALEVIVTLSETAAAMLRKHTNIVAQTIPQMLAMMVDLEEDEDWANADELEDDDFDSNAVAGESALDRMACGLGGKLVLPMIKEHIMQMLQNPDWKYRHAGLMALSAIGEGCHQQMEGILNEIVNFVLLFLQDPHPRVRYAACNAVGQMATDFAPGFQKKFHEKVIAALLQTMEDQGNQRVQAHAAAALINFTEDCPKSLLIPYLDNLVKHLHSIMVLKLQELIQKGTKLVLEQVVTSIASVADTAEEKFVPYYDLFMPSLKHIVENAVQKELRLLRGKTIECISLIGLAVGKEKFMQDASDVMQLLLKTQTDFNDMEDDDPQISYMISAWARMCKILGKEFQQYLPVVMGPLMKTASIKPEVALLDTQDMENMSDDDGWEFVNLGDQQSFGIKTAGLEEKSTACQMLVCYAKELKEGFVEYTEQVVKLMVPLLKFYFHDGVRVAAAESMPLLLECARVRGPEYLTQMWHFMCDALIKAIGTEPDSDVLSEIMHSFAKCIEVMGDGCLNNEHFEELGGILKAKLEEHFKNQELRQVKRQDEDYDEQVEESLQDEDDNDVYILTKVSDILHSIFSSYKEKVLPWFEQLLPLIVNLICPHRPWPDRQWGLCIFDDVIEHCSPASFKYAEYFLRPMLQYVCDNSPEVRQAAAYGLGVMAQYGGDNYRPFCTEALPLLVRVIQSADSKTKENVNATENCISAVGKIMKFKPDCVNVEEVLPHWLSWLPLHEDKEEAVQTFNYLCDLIESNHPIVLGPNNTNLPKIFSIIAEGEMHEAIKHEDPCAKRLANVVRQVQTSGGLWTECIAQLSPEQQAAIQELLNSA

SEQ ID NO: 8813 - protein, 475 aa, Homo sapiens
MQVTFIYVCLKGLMLQDLVSAKLISDYTVTEIPDTINDLQGSTKVLQAVQWLVSHCPHSLDLCCQTLIQYVEDGIGHEFSGRFFHDRRERRLGGLASQEPGAIIELFNSVLQFLASVVSSEQLCDLSWPVTEFAEAGGSRLLPHLHWNAPEHLAWLKQAVLGFQLPQMDLPPLGAPWLPVCSMVVQYASQIPSSRQTQPVLQSQVENLLHRTYCRWKSKSPSPVHGAGPSVMEIPWDDLIALCINHKLRDWTPPRLPVTSEALSEDGQICVYFFKNDLKKYDVPLSWEQARLQTQKELQLREGRLAIKPFHPSANNFPIPLLHMHRNWKRSTECAQEGRIPSTEDLMRGASAEELLAQCLSSSLLLEKEENKRFEDQLQQWLSEDSGAFTDLTSLPLYLPQTLVSLSHTIEPVMKTSVTTSPQSDMMREQLQLSEATGTCLGERLKHLERLIRSSREEEVASELHLSALLDMVDI

SEQ ID NO: 8814 - protein, 110 aa, Homo sapiens
MSTALTHTTVAMRCPMGGGGGPTYGPPQPWGHPDVHIMQHHVLPIQARLGSIAEIDLGVPPPVMKTFKEFLLSLDDSVDETEAVKRYNDYKLDFRRQQMQDFFLAHKDEE

SEQ ID NO: 8815 - protein, 275 aa, Homo sapiens; identical to SEQ ID NO: 4746

SEQ ID NO: 8816 - protein, 290 aa, Homo sapiens
MIGDGEDYFLSLFGDSKKLTAHSNYTQKTLKYFSMILEEVGQFTSSSLGDVEIAEVNVKGLFVKLINSSLDKEMAIGDHILQQNVNGQTISLYRFLPNIVMQANSTVTVWAAASEAKHQPPSDFLWKEQDKFRASPDCITILCKPNGQAIAWYTPIHWKQAWEKLDADVEFNRCSVVSPTFRKRVFQWTASTATITKEKQDQPKKDISNYQVEQAQVLLKREKEIPPTVFPNRSPWCQNPYVSAHPYCPLIEPHNTSTAGGRLDRQAARSTRPNRASGSKKKKTSESQKQ

SEQ ID NO: 8817 - protein, 394 aa, Homo sapiens
MVPSQAPYLVPAFPLPAATSPGREYAAPGTAPEGLHGLPLSEGLQPYPAFPFPYLDTFMTVFLPDPPVCPLLSPSFLPCPFLGATASSAISPSMSSAMSPTLDPPPSVTSQRREEEKWEAQSEGHPFITSRSSSPLQLNLLQEEMPRPSESPDQMRRNTCPQTEYCVTGNNGSESSPATTGALSTGSPPRENPSHPTASALSTGSPPMKNPSHPTASTLSMGLPPSRTPSHPTATVLSTGSPPSESPSRTGSAASGSSDSSIYLTSSVYSSKISQNGQQSQDVQKKETFPNVAEEPIWRMIRQTPERILMTYQVPERVKEVVLKEDLEKLESMRQQQPQFSHGQKEELAKVYNWIQSQTVTQEIDIQACVTCENEDSADGAATSCGQVLVEDSC

SEQ ID NO: 8818 - protein, 807 aa, Homo sapiens
QGASFALAAAAALLFGSDMEDGPSNNASCFRRLTECFLSPSLTDEKVKAYLSLHPQVLDEFVSESVSAETVEKWLKRKNNKSEDESAPKEVSRYQDTNMQGVVYELNSYIEQRLDTGGDNQLLLYELSSIIKIATKADGFALYFLGECNNSLCIFTPPGIKEGKPRLIPAGPITQGTTVSAYVAKSRKTLLVEDILGDERFPRGTGLESGTRIQSVLCLPIVTAIGDLIGILELYRHWGKEAFCLSHQEVATANLAWASVAIHQVQVCRGLAKQTELNDFLLDVSKTYFDNIVAIDSLLEHIMIYAKNLVNADRCALFQVDHKNKELYSDLFDIGEEKEGKPVFKKTKEIRFSIEKGIAGQVARTGEVLNIPDAYADPRFNREVDLYTGYTTRNILCMPIVSRGSVIGVVQMVNKISGSAFSKTDENNFKMFAVFCALALHCANMYHRIRHSECIYRVTMEKLSYHSICTSEEWQGLMQFTLPVRLCKEIELFHFDIGPFENMWPGIFVYMVHRSCGTSCFELEKLCRFIMSVKKNYRRVPYHNWKHAVTVAHCMYAILQNNHTLFTDLERKGLLIACLCHDLDHRGFSNSYLQKFDHPLAALYSTSTMEQHHFSQTVSILQLEGHNIFSTLSSSEYEQVLEIIRKAIIATDLALYFGNRKQLEEMYQTGSLNLNNQSHRDRVIGLMMTACDLCSVTKLWPVTKLTANDIYAEFWAEGDEMKKLGIQPIPMMDRDKKDEVPQGQLGFYNAVAIPCYTTLTQILPPTEPLLKACRDNLSQWEKVIRGEETATWISSPSVAQKAAASED

SEQ ID NO: 8819 - protein, 558 aa, Homo sapiens
MASCPDSDNSWVLAGGELGISLNMCLLGALVLLGLGVLLFSGGLSESETGPMEEVERQVLPDPEVLEAVGDRQDGLREQLQAPVPPDSVPSLQNMGLLLDKLAKENQDIRLLQAQLQAQKEELQSLMHQPKGLEEENAQLRGALQQGEAFQRALESELQQLRARLQGLEADCVRGPDGVCLSGGRGPQGDKAIREQGPREQEPELSFLKQKEQLEAEAQALRQELERQRRLLGSVQQDLERSLQDASRGDPAHAGLAELGHRLAQKLQGLENWGQDPGVSANASKAWHQKSHFQNSREWSGKEKWWDGQRDRKAEHWKHKKEESGRERKKNWGGQEDREPAGRWKEGRPRVEESGSKKEGKRQGPKEPPRKSGSFHSSGEKQKQPRWREGTKDSHDPLPSWAELLRPKYRAPQGCSGVDECARQEGLTFFGTELAPVRQQELASLLRTYLARLPWAGQLTKELPLSPAFFGEDGIFRHDRLRFRDFVDALEDSLEEVAVQQTGDDDEVDDFEDFIFSHFFGDKALKKRSGKKDKHSQSPRAAGPREGHSHSHHHHHRG

SEQ ID NO: 8820 - protein, 626 aa, Homo sapiens
MGNAAGSAEQPAGPAAPPPKQHRFEKLMEYFRNEDSNIDFMVACMQFINIVVHSVENMNFRVFLQYEFTHLGLDLYLERLRLTESDKLQVQIQAYLDNIFDVGALLEDTETKNAVLEHMEELQEQVALLTERLRDAENESMAKIAELEKQLSQARKELETLRERFSESTAMGPSRRPPEPEKAPPAAPTRPSALELKVEELEEKGLIRILRGPGDAVSIEILPVAVATPSGGDAPTPGVPTGSPSPDLAPAAEPAPGAAPPPPPPPPGGPPDALGRRDSELGPGVKAKKPIQTKFRMPLLNWVALKPSQITGTVFTELNDEKVLQELDMSDFEEQFKTKSQGPSLDLSALKSKAAQKAPSKATLIEANRAKNLAITLRKGNLGAERICQAIEAYDLQALGLDFLELLMRFLPTEYERSLITRFEREQRPMEELSEEDRFMLCFSRIPRLPERMTTLTFLGNFPDTAQLLMPQLNAIIAASMSIKSSDKLRQILEIVLAFGNYMNSSKRGAAYGFRLQSLDALLEMKSTDRKQTLLHYLVKVIAEKYPQLTGFHSDLHFLDKAGSVSLDSVLADVRSLQRGLELTQREFVRQDDCMVLKEFLRANSPTMDKLLADSKTAQAVPTGGL

SEQ ID NO: 8821 - protein, 499 aa, Homo sapiens
MDKLIVDGRGKATISNDGATILKLLDVVHPAAKTLVDIAKSQDAEVGDGTTSVTLLAAEFLKQVKPYVEEGLHPQIIIRAFRTATQLAVNKIKEIAVTVKKADKVEQRKLLEKCAMTALSSKLISQQKAFFAKMVVDAVMMLDDLLQLKMIGIKKVQGGALEDSQLVAGVAFKKTFSYAGFEMQPKKYHNPKIALLNVELELKAEKDNAEIRVHTVEDYQAIVDAEWNILYDKLEKIHHSGAKVVLSKLPIGDVATQYFADRDMFCAGRVPEEDLKRTMMACGGSIQTSVNALSADVLGRCQVFEETQIGGERYNFFTGCPKAKTCTFILRGGAEQFMEETERSLHDAIMIVRRAIKNDSVVAGGGAIEMELSKYLRDYSRTIPGKQQLLIGAYAKALEIIPRQLCDNAGFDATNILNKLRARHAQGGTWYGVDINNEDIADNFEAFVWEPAMVRINALTAASEAACLIVSVDETIKNPRSTVDAPTAAGRGRGRGRPH

SEQ ID NO: 8822 - protein, 25 aa, Homo sapiens
MAHEMIGTQIVTERLVALLESGTEK

SEQ ID NO: 8823 - protein, 210 aa, Homo sapiens [sequence omitted]

SEQ ID NO: 8824 - protein, 166 aa, Homo sapiens
MDLMPFINKAGCECLNESDEHGFDNCLRKDTTFLESDCDEQLLITVAFNQPVKLYSMKFQGPDNGQGPKYVKIFINLPRSMDFEEAERSEPTQALELTEDDIKEDGIVPLRYVKFQNVNSVTIFVQSNQGEEETTRISYFTFIGTPVQATNMNDFKRVVGKKGESH

SEQ ID NO: 8825 - protein, 212 aa, Homo sapiens [sequence omitted]

SEQ ID NO: 8826 - protein, 456 aa, Homo sapiens; identical to SEQ ID NO: 7230

SEQ ID NO: 8827 - protein, 60 aa, Homo sapiens
MDEQALLGLNPNADSDFRQRALAYFEQLKISPDAWQVCAEALAQRTYSDDHVKFFCFQVL

SEQ ID NO: 8828 - protein, 112 aa, Homo sapiens
MSSSMWYIMQSIQSKYSLSERLIRTIAAIRSFPHDNVEDLIRGGADVNCTHGTLKPLHCACMVSDADCVELLLEKGAEVNALDGYNRTALHYAAEKDEACVEVLLEYGANPN

SEQ ID NO: 8829 - protein, 390 aa, Homo sapiens; identical to SEQ ID NO: 8012

SEQ ID NO: 8830 - protein, 444 aa, Homo sapiens; identical to SEQ ID NO: 4946

SEQ ID NO: 8831 - protein, 164 aa, Homo sapiens; identical to SEQ ID NO: 6206

SEQ ID NO: 8832 - protein, 1082 aa, Homo sapiens; identical to SEQ ID NO: 5042

SEQ ID NO: 8833 - protein, 500 aa, Homo sapiens [sequence omitted]

SEQ ID NO: 8834 - protein, 513 aa, Homo sapiens
MWDVCMERGHRDLEQFERVHRYISDQLFTNFKERTERLVISPLNQLLSMFTGPHKLVQKRFDKLLDFYNCTERAEKLKDKKTLEELQSARNNYEALNAQLLDELPKFHQYAQGLFTNCVHGYAEAHCDFVHQALEQLKPLLSLLKVAGREGNLIAIFHEEHSRVLQQLQVFTFFPESLPATKKPFERKTIDRQSARKPLLGLPSYMLQSEELRASLLARYPPEKLFQAERNFNAAQDLDVSLLEGDLVGVIKKKDPMGSQNRWLIDNGVTKGFVYSSFLKPYNPRRSHSDASVGSHSSTESEHGSSSPRFPRQNSGSTLTFNPSSMAVSFTSGSCQKQPQDASPPPKECDQGTLSASLNPSNSESSPSRCPSDPDSTSQPRSGDSADVARDVKQPTATPRSYRNFRHPEIVGYSVPGRNGQSQDLVKGCARTAQAPEDRSTEPDGSEAEGNQVYFAVYTFKARNPNELSVSANQKLKILEFKDVTGNTEWWLAEVNGKKGYVPSNYIRKTEYT

SEQ ID NO: 8835 - protein, 50 aa, Homo sapiens; identical to SEQ ID NO: 6722

SEQ ID NO: 8836 - protein, 1442 aa, Homo sapiens
MSMLKPSGLKAPTKILKPGSTALKTPTAVVAPVEKTISSEKASSTPSSETQEEFVDDFRVGERVWVNGNKPGFIQFLGETQFAPGQWAGIVLDEPIGKNDGSVAGVRYFQCEPLKGIFTRPSKLTRKVQAEDEANGLQTTPASRATSPLCTSTASMVSSSPSTPSNIPQKPSQPAAKEPSATPPISNLTKTASESISNLSEAGSIKKGERELKIGDRVLVGGTKAGVVRFLGETDFAKGEWCGVELDEPLGKNDGAVAGTRYFQCQPKYGLFAPVHKVTKIGFPSTTPAKAKANAVRRVMATTSASLKRSPSASSLSSMSSVASSVSSRPSRTGLLTETSSRYARKISGTTALQEALKEKQQHIEQLLAERDLERAEVAKATSHVGEIEQELALARDGHDQHVLELEAKMDQLRTMVEAADREKVELLNQLEEEKRKVEDLQFRVEEESITKGDLEQKSQISEDPENTQTKLEHARIKELEQSLLFEKTKADKLQRELEDTRVATVSEKSRIMELEKDLALRVQEVAELRRRLESNKPAGDVDMSLSLLQEISSLQEKLEVTRTDHQREITSLKEHFGAREETHQKEIKALYTATEKLSKENESLKSKLEHANKENSDVIALWKSKLETAIASHQQAMEELKVSFSKGLGTETAEFAELKTQIEKMRLDYQHEIENLQNQQDSERAAHAKEMEALRAKLMKVIKEKENSLEAIRSKLDKAEDQHLVEMEDTLNKLQEAEIKVKELEVLQAKCNEQTKVIDNFTSQLKATEEKLLDLDALRKASSEGKSEMKKLRQQLEAAEKQIKHLEIEKNAESSKASSITRELQGRELKLTNLQENLSEVSQVKETLEKELQILKEKFAEASEEAVSVQRSMQETVNKLHQKEEQFNMLSSDLEKLRENLADMEAKFREKDEREEQLIKAKEKLENDIAEIMKMSGDNSSQLTKMNDELRLKERDVEELQLKLTKANENASFLQKSIEDMTVKAEQSQQEAAKKHEEEKKELERKLSDLEKKMETSHNQCQELKARYERATSETKTKHEEILQNLQKTLLDTEDKLKGAREENSGLLQELEELRKQADKAKAAQTAEDAMQIMEQMTKEKTETLASLEDTKQTNAKLQNELDTLKENNLKNVEELNKSKELLTVENQKMEEFARGSEIETLKQAAAQKSQQLSALQEENVKLAEELGRSRDEVTSHQKLEEERSVLNNQLLEMKKRESKFIKDADEEKASLQKSISITSALLTEKDAELEKLRNEVTVLRGENASAKSLHSVVQTLESDKVKLELKVKNLELQLKENKRQLSSSSGNTDTQADEDERAQESQIDFLNSVIVDLQARGSNQDLKMKVEMMSEAALNGNGDDLNNYDSDDQEKQSKKKPRLFCDICDCFDLHDTEDCPTQAQMSEDPPHSTHHGSRGEERPYCEICEMFGHWATNCNDDETF

SEQ ID NO: 8837 - protein, 211 aa, Homo sapiens
MAFADSHLWKLLDRHANTIRLFVLLPEQSPVSYSKRTAYQKAGGDSGNVDDDCERVKGPVGSLKSVEAILEESTEKLKSLSLQQQQDGDNGDSSKSTETSDFENIESPLNERDSSASVDNRELEQHIQTSDPENFQSEERSDSDVNNDRSTSSVDSDILSSSHSSDTLCNADNAQIPLANGLDSHSITSSRRTKANREKRNMGYSRRRLWN

SEQ ID NO: 8838 - protein, 711 aa, Homo sapiens
MLASLKVKKQELANSSDATLPDRPLSPPLTAPPTMKSSEFFEMLEKMQGIKLEEQKPGPQKNKDDYIPYPSIDEVVEKGGPYPQVILPQFGGYWIEDPENVGTPTSLGSSICEEEEEDNLSPNTFGYKLECKGEARAYRRHFLGKDHLNFYCTGSSLGNLILSVKCEEAEGIEYLRVILRSKLKTVHERIPLAGLSKLPSVPQIAKAFCDDAVGLRFNPVLYPKASQMIVSYDEHEVNNTFKFGVIYQKARQTLEEELFGNNEESPAFKEFLDLLGDTITLQDFKGFRGGLDVTHGQTGVESVYTTFRDREIMFHVSTKLPFTDGDAQQLQRKRHIGNDIVAIIFQEENTPFVPDMIASNFLHAYIVVQVETPGTETPSYKVSVTAREDVPTFGPPLPSPPVFQKGPEFREFLLTKLTNAENACCKSDKFAKLEDRTRAALLDNLHDELHAHTQAMLGLGPEEDKFENGGHGGFLESFKRAIRVRSHSMETMVGGQKKSHSGGIPGSLSGGISHNSMEVTKTTFSPPVVAATVKNQSRSPIKRRSGLFPRLHTGSEGQGDSRARCDSTSSTPKTPDGGHSSQEIKSETSSNPSSPEICPNKEKPFMKLKENGRAISRSSSSTSSVSSTAGEGEAMEEGDSGGSQPSTTSPFKQEVFVYSPSPSSESPSLGAAATPIIMSRSPTDAKSRNSPRSNLKFRFDKLSHASSGAGH

SEQ ID NO: 8839 - protein, 362 aa, Homo sapiens [sequence omitted]

SEQ ID NO: 8840 - protein, 606 aa, Homo sapiens
MCGAGFGHFEWLAGGGAGQDVGRSCILVSIAGKNVMLDCGMHMGFNDDRRFPDFSYITQNGRLTDFLDCVIISHFHLDHCGALPYFSEMVGYDGPIYMTHPTQAICPILLEDYRKIAVDKKGEANFFTSQMIKDCMKKVVAVHLHQTVQVDDELEIKAYYAGHVLGAAMFQIKVGSESVVYTGDYNMTPDRHLGAAWIDKCRPNLLITESTYATTIRDSKRCRERDFLKKVHETVERGGKVLIPVFALGRAQELCILLETFWERMNLKVPIYFSTGLTEKANHYYKLFIPWTNQKIRKTFVQRNMFEFKHIKAFDRAFADNPGPMVVFATPGMLHAGQSLQIFRKWAGNEKNMVIMPGYCVQGTVGHKILSGQRKLEMEGRQVLEVKMQVEYMSFSAHADAKGIMQLVGQAEPESVLLVHGEAKKMEFLKQKIEQELRVNCYMPANGETVTLPTSPSIPVGISLGLLKREMAQGLLPEAKKPRLLHGTLIMKDSNFRLVSSEQALKELGLAEHQLRFTCRVHLHDTRKEQETALRVYSHLKSVLKDHCVQHLPDGSVTVESVLLQAAAPSEDPGTKVLLVSWTYQDEELGSFLTSLLKKGLPQAPS

SEQ ID NO: 8841 - protein, 132 aa, Homo sapiens
MKKVRLKELESRLQQVDGFEKPKLLLEQYPTRPHIAACMLYTIHNTYDDIENKVVADLGCGCGVLSIGTAMLGAGLCVGFDIDEDALEIFNRNAEEFELQILTWFNVMCAYYLTECPSHSIQNYESSLWDQK

SEQ ID NO: 8842 - protein, 456 aa, Homo sapiens
MMVGDGTTSVTLLAAEFLKQVKPYVEEGLHPQIIIRAFRTATQLAVNKIKEIAVTVKKADKVEQRKLLEKCAMTALSSKLISQQKAFFAKMVVDAVMMLDDLLQLKMIGIKKVQGGALEDSQLVAGVAFKKTFSYAGFEMQPKKYHNPKIALLNVELELKAEKDNAEIRVHTVEDYQAIVDAEWNILYDKLEKIHHSGAKVVLSKLPIGDVATQYFADRDMFCAGRVPEEDLKRTMMACGGSIQTSVNALSADVLGRCQVFEETQIGGERYNFFTGCPKAKTCTFILRGGAEQFMEETERSLHDAIMIVRRAIKNDSVVAGGGAIEMELSKYLRDYSRTIPGKQQLLIGAYAKALEIIPRQLCDNAGFDATNILNKLRARHAQGGTWYGVDINNEDIADNFEAFVWEPAMVRINALTAASEAACLIVSVDETIKNPRSTVDAPTAAGRGRGRGRPH

SEQ ID NO: 8843 - protein, 839 aa, Homo sapiens
MDGKADVKSLMAKYNTGGNPTEDVSVNSRPFRVTGPNSSSGIQARKNLFNNQGNASPPAGPSNVPKFGSPKPPVAVKPSSEEKPDKEPKPPFLKPTGAGQRFGTPASLTTRDPEAKVGFLKPVGPKPINLPKEDSKPTFPWPPGNKPSLHSVNQDHDLKPLGPKSGPTPPTSENEQKQAFPKLTGVKGKFMSASQDLEPKPLFPKPAFGQKPPLSTENSHEDESPMKNVSSSKGSPAPLGVRSKSGPLKPAREDSENKDHAGEISSLPFPGVVLKPAASRGGPGLSKNGEEKKEDRKIDAAKNTFQSKINQEELASGTPPARFPKAPSKLTVGGPWGQSQEKEKGDKNSATPKQKPLPPLFTLGPPPPKPNRPPNVDLTKFHKTSSGNSTSKGQTSYSTTSLPPPPPSHPASQPPLPASHPSQPPVPSLPPRNIKPPFDLKSPVNEDNQDGVTHSDGAGNLDEEQDSEGETYEDIEASKEREKKREKEEKKRLELEKKEQKEKEKKEQEIKKKFKLTGPIQVIHLAKACCDVKGGKNELSFKQGEQIEIIRITDNPEGKWLGRTARGSYGYIKTTAVEIDYDSLKLKKDSLGAPSRPIEDDQEVYDDVAEQDDISSHSQSGSGGIFPPPPDDDIYDGIEEEDADDGSTLQVQEKSNTWSWGILKMLKGKDDRKKSIREKPKVSDSDNNEGSSFPAPPKQLDMGDEVYDDVDTSDFPVSSAEMSQGTNVGKAKTEEKDLKKLKKQEKEEKDFRKKFKYDGEIRVLYSTKVTTSITSKKWGTRDLQVKPGESLEVIQTTDDTKVLCRNEEGKYGYVLRSYLADNDGEIYDDIADGCIYDND

SEQ ID NO: 8844 - protein, 338 aa, Homo sapiens
MGHRYIEVFKSHRTEMDWVLKHSGPNSADSANDGFVRLRGLPFGCTKEEIVQFFSGLEIVPNGITLPVDPEGKITGEAFVQFASQELAEKALGKHKERIGHRYIEVFKSSQEEVRSYSDPPLKFMSVQRPGPYDRPGTARRYIGIVKQAGLERMRPGAYSTGYGGYEEYSGLSDGYGFTTDLFGRDLSYCLSGMYDHRYGDSEFTVQSTTGHCVHMRGLPYKATENDIYNFFSPLNPVRVHIEIGPDGRVTGEADVEFATHEEAVAAMSKDRANMQHRYIELFLNSTTGASNGAYSSQVMQGMGVSAAQATYSGLESQSVSGCYGAGYSGQNSMGGYD

SEQ ID NO: 8845 - protein, 511 aa, Homo sapiens
MASVVEYKGLRAGYHCGYCDSKEGKASCGMWAHSMTVQDYQDLIDRGWRRSGKYVYKPVMNQTCCPQYTIRCRPLQFQPSKSHKKVLKKMLKFLAKGEVPKGSCEDEPMDSTMDDAVAGDFALINKLDIQCDLKTLSDDIKESLESEGKNSKKEEPQELLQSQDFVGEKLGSGEPSHSVKVHTVPKPGKGADLSKPPCRKAKEIRKERKRLKLMQQNPAGELEGFQAQGHPPSLFPPKAKSNQPKSLEDLIFESLPENASHKLEVRLVPVSFEDPEFKSSFSQSFSLYVKYQVAIHQDPPDECGKTEFTRFLCSSPLEAETPPNGPDCGYGSFHQQYWLDGKIIAVGVIDILPNCVSSVYLYYDPDYSFLSLGVYSALREIAFTRQLHEKTSQLSYYYMGFYIHSCPKMKYKGQYRPSDLLCPETYVWVPIEQCLPSLENSKYCRFNQDPEAVDEDRSTEPDRLQVFHKRAIMPYGVYKKQQKDPSEEAAVLQYASLVGQKCSERMLLFRN

SEQ ID NO: 8846 - protein, 1320 aa, Homo sapiens
MQDDSIEASTSISQLLRESYLAETRHRGNNERSRAEPSSNPCHFGSPSGAAEGGGGQDDLPDLSAFLSQEELDESVNLARLAINYDPLEKADETQARKRLSPDQMKHSPNLSFEPNFCQDNPRSPTSSKESPQEAKRPQYCSETQSKKVFLNKAADFIEELSSLFKSHSSKRIRPRACKNHKSKLESQNKVMQENSSSFSDLSERRERSSVPIPIPADTRDNEVNHALEQQEAKRREAEQAASEAAGGDTTPGSSPSSLYYEEPLGQPPRFTQKLRSREVPEGTRVQLDCIVVGIPPPQVRWYCEGKELENSPDIHIVQAGNLHSLTIAEAFEEDTGRYSCFASNIYGTDSTSAEIYIEGVSSSDSEGDPNKEEMNRIQKPNEVSSPPTTSAVIPPAVPQAQHLVAQPRVATIQQCQSPTNYLQGLDGKPIIAAPVFTKMLQNLSASEGQLVVFECRVKGAPSPKVEWYREGTLIEDSPDFRILQKRPVCMEHIEEICTLVIAEVFAEDSGCFTCTASNKYGTVSSIAQLHVRGNEDLSNNGSLHSANSTTNLAAIEPQPSPPHSEPPSVEQPPKPKLEGVLVNHNEPRSSSRIGLRVHFNLPEDDKGSEASSEAGVVTTRQTRPDSFQERFNGQATKTPEPSSPVKEPPPVLAKPKLDSTQLQQLHNQVLLEQHQLQNPPPSSPKEFPFSMTVLNSNAPPAVTTSSKQVKAPSSQTFSLARPKYFFPSTNTTAATVAPSSSPVFTLSSTPQTIQRTVSKESLLVSHPSVQTKSPGGLSIQNEPLPPGPTEPTPPPFTFSIPSGNQFQPRCVSPIPVSPTSRIQNPVAFLSSVLPSLPAIPPTNAMGLPRSAPSMPSQGLAKKNTKSPQPVNDDNIRETKNAVIRDLGKKITFSDVRPNQQEYKISSFEQRLMNEIEFRLERTPVDESDDEIQHDEIPTGKCIAPIFDKRLKHFRVTEGSPVTFTCKIVGIPVPKVYWFKDGKQISKRNEHCKMRREGDGTCSLHIESTTSDDDGNYTIMAANPQGRISCSGHLMVQSLPIRSRLTSAGQSHRGRSRVQERDKEPLQERFFRPHFLQAPGDMVAHEGRLCRLDCKVSGLPPPELTWLLNGQPVLPDASHKMLVRETGVHSLLIDPLTQRDAGTYKCIATNKTGQNSFSLELSVVAKEVKKAPVILEKLQNCGVPEGHPVRLECRVIGMPPPVFYWKKDNETIPCTRERISMHQDTTGYACLLIQPAKKSDAGWYTLSAKNEAGIVSCTARLDIYAQWHHQIPPPMSVRPSGSRYGSLTSKGLDIFSAFSSMESTMVYSCSSRSVVESDEL

SEQ ID NO: 8847 - protein, 763 aa, Homo sapiens
MQDLGDKLRMIVMGHRRVHISRQLEVEPEEPEAENKHKPRRKSKRGKKEAEDELSARHPAELAMEPTPELPAEVLMVEVENVVHEDFQVTEEVKALTAEIVKTIRDIIALNPLYRESVLQMMQAGQRVVDNPIYLSDMGAALTGAESHELQDVLEETNIPKRLYKALSLLKKEFELSKLQQRLGREVEEKIKQTHRKYLLQEQLKIIKKELGLEKDDKDAIEEKFRERLKELVVPKHVMDVVDEELSKLGLLDNHSSEFNVTRNYLDWLTSIPWGKYSNENLDLARAQAVLEEDHYGMEDVKKRILEFIAVSQLRGSTQGKILCFYGPPGVGKTSIARSIARALNREYFRFSVGGMTDVAEIKGHRRTYVGAMPGKIIQCLKKTKTENPLILIDEVDKIGRGYQGDPSSALLELLDPEQNANFLDHYLDVPVDLSKVLFICTANVTDTIPEPLRDRMEMINVSGYVAQEKLAIAERYLVPQARALCGLDESKAKLSSDVLTLLIKQYCRESGVRNLQKQVEKVLRKSAYKIVSGEAESVEVTPENLQDFVGKPVFTVERMYDVTPPGVVMGLAWTAMGGSTLFVETSLRRPQDKDAKGDKDGSLEVTGQLGEVMKESARIAYTFARAFLMQHAPANDYLVTSHIHLHVPEGATPKDGPSAGCTIVTALLSLAMGRPVRQNLAMTGEVSLTGKILPVGGIKEKTIAAKRAGVTCIVLPAENKKDFYDLAAFITEGLEVHFVEHYREIFDIAFPDEQAEALAVER

SEQ ID NO: 8848 - protein, 185 aa, Homo sapiens
MNNNQIVAKDLQDEKILYPEFNKLKERNRELKTLLSIGGWNFGTSRFTTMLSTFANREKFIASVISLLRTHDFDGLDLFFLYPGLRGSPMHDRWTFLFLIEELLFAFRKEALLTMRPRLLLSAAVSGVPHIVQTSYDVRFLGRFVPLSGERRSTGLITSMSRMPTRGKSGLAMTMPSASVTRHGL

SEQ ID NO: 8849 - protein, 422 aa, Homo sapiens
MSGGTPYIGSKISLISKAEIRYEGILYTIDTENSTVALAKVRSFGTEDRPTDRPIPPRDEVFEYIIFRGSDIKDLTVCEPPKPQCSLPQDPAIVQSSLGSSTSSFQSMGSYGPFGRMPTYSQFSPSSLVGQQFGAVGVGRSSPQLDPLRKSPTMEQAVQTASAHLPAPAAVGRRSPVSTRPLPSASQKAGENQEHRRAEVHKVSRPENEQLRNDNKRQVAPGAPSAPRRGRGGHRGGRGRFGIRRDGPMKFEKDFDFESANAQFNKEEIDREFHNKLKLKEDKLEKQEKPVNGEDKGDSGVDTQNSEGNADEEDPLGPNCYYDKTKSFFDNISCDDNRERRPTWAEERRLNAETFGIPLRPNRGRGGYRGRGGLGFRGGRGRGGGRGGTFTAPRGFRGGFRGGRGGREFADFEYRKTTAFGP

SEQ ID NO: 8850 - protein, 421 aa, Homo sapiens; identical to SEQ ID NO: 5867

SEQ ID NO: 8851 - protein, 251 aa, Homo sapiens
MDSELMHSIVGSYHKPPERVFVPSFTQNEPSQNCHPANLEVTSPKILHSPNSQALILALKTLQEKIHRLELERTQAEDNLNILSREAAQYKKALENETNERNLAHQELIKQKKDISIQLSSAQSRCTLLEKQLEYTKRMVLNVEREKNMILEQQAQLQREKEQDQMKLYAKLEKLDVLEKECFRLTTTQKTAEDKIKHLEEKLKEEEHQRKLFQDKASELQTGLEISKIIMSSVSNLKHSKEKKKSSKVCI

SEQ ID NO: 8852 - protein, 659 aa, Homo sapiens
MDSQGRVWAQEMLLRVSPDHVTLLDPASKEELESYPLGAIVRCDAVMPPGRSRSLLLLVCQEPERAQPDVHFFQGLRLGAELIREDIQGALHNYRSGRGERRAAALRATQEELQRDRSPAAETPPLQRRPSVRAVISTVERGAGRGRPQAKPIPEAEEAQRPEPVGTSSNADSASPDLGPRGPDLAVLQAEREVDILNHVFDDVESFVSRLQKSAEAARVLEHRERGRRSRRRAAGEGLLTLRAKPPSEAEYTDVLQKIKYAFSLLARLRGNIADPSSPELLHFLFGPLQMIVNTSGGPEFASSVRRPHLTSDAVALLRDNVTPRENELWTSLGDSWTRPGLELSPEEGPPYRPEFFSGWEPPVTDPQSRAWEDPVEKQLQHERRRRQQSAPQVAVNGHRDLEPESEPQLESETAGKWVLCNYDFQARNSSELSVKQRDVLEVLDDSRKWWKVRDPAGQEGYVPYNILTPYPGPRLHHSQSPARSLNSTPPPPPAPAPAPPPALARPRWDRPRWDSCDSLNGLDPSEKEKFSQMLIVNEELQARLAQGRSGPSRAVPGPRAPEPQLSPGSDASEVRAWLQAKGFSSGTVDALGVLTGAQLFSLQKEELRAVSPEEGARVYSQVTVQRSLLEDKEKVSELEAVMEKQKKKVEGEVEMEVI

SEQ ID NO: 8853 - protein, 1232 aa, Homo sapiens
MNTKKRGSPARTHSMMSLSVRPQRRLLSARVNRSQSFAGVLGSHERGPRSFPVFSPPGPPRKPPALSRVSRMFSVAHPAAKVPQPERLDLVYTALKRGLTAYLEVHQQEQEKLQGQIRESKRNSRLGFLYDLDKQVKSIERFLRRLEFHASKIDELYEAYCVQRRLRDGAYNMVRAYTTGSPGSREARDSLAEATRGHREYTESMCLLESELEAQLGEFHLRMKGLAGFARLCVGDQYEICMKYGRQRWKLRGRIEGSGKQVWDSEETIFLPLLTEFLSIKVTELKGLANHVVVGSVSCETKDLFAALPQVVAVDINDLGTIKLSLEVTWSPFDKDDQPSAASSVNKASTVTKRFSTYSQSPPDTPSLREQAFYNMLRRQEELENGTAWSLSSESSDDSSSPQLSGTARHSPAPRPLVQQPEPLPIQVAFRRPETPSSGPLDEEGAVAPVLANGHAPYSRTLSHISEASVDAALAEASVEAVGPESLAWGPSPPTHPAPTHGEHPSPVPPALDPGHSATSSTLGTTGSVPTSTDPAPSAHLDSVHKSTDSGPSELPGPTHTTTGSTYSAITTTHSAPSPLTHTTTGSTHKPIISTLTTTGPTLNIIGPVQTTTSPTHTMPSPTHTTASPTHTSTSPTHTPTSPTHKTSMSPPTTTSPTPSGMGLVQTATSPTHPTTSPTHPTTSPILINVSPSTSLELATLSSPSKHSDPTLPGTDSLPCSPPVSNSYTQADPMAAAPHPSPAHSSRKPLTSPAPDPSESTVQSLSPTPSPPTPAPQHSDLCLAMAVQTPVPTAAGGSGDRSLEEALGALMAALDDYRGQFPELQGLEQEVTRLESLLMQRQGLTRSRASSLSITVEHALESFSFLNEDEDEDNDVPGDRPPSSPEAGAEDSIDSPSARPLSTGCPALDAALVRHLYHCSRLLLKLGTFGPLRCQEAWALERLLREARVLEAVCEFSRRWEIPASSAQEVVQFSASRPGFLTFWDQCTERLSCFLCPVERVLLTFCNQYGARLSLRQPGLAEAVCVKFLEDALGQKLPRRPQPGPGEQLTVFQFWSFVETLDSPTMEAYVTETAEEVLLVRNLNSDDQAVVLKALRLAPEGRLRRDGLRALSSLLVHGNNKVMAAVSTQLRSLSLGPTFRERALLCFLDQLEDEDVQTRVAGCLALGCIKAPEGIEPLVYLCQTDTEAVREAARQSLQQCGEEGQSAHRRLEESLDALPRIFGPGSMASTAF

SEQ ID NO: 8854 - protein, 475 aa, Homo sapiens
MDQMVQHPAAKMIVMASHMQEQEVGDGTNFVLVFAGALLELAEELLRIGLSVSEVIEGYEIACRKAHEILPNLVCCSAKNLRDIDEVSSLLRTSIMSKQYGNEVFLAKLIAQACVSIFPDSGHFNVDNIRVCKILGSGISSSSVLHGMVFKKETEGDVTSVKDAKIAVYSCPFDGMITETKGTVLIKTAEELMNFSKGEENLMDAQVKAIADTGANVVVTGGKVADMALHYANKYNIMLVRLNSKWDLRRLCKTVGATALPRLTPPVLEEMGHCDSVYLSEVGDTQVVVFKHEKEDGAISTIVLRGSTDNLMDDIERAVDDGVNTFKVLTRDKRLVPGGGATEIELAKQITSYGETCPGLEQYAIKKFAEAFEAIPRALAENSGVKANEVISKLYAVHQEGNKNVGLDIEAEVPAVKDMLEAGILDTYLGKYWAIKLATNAAVTVLRVDQIIMAKPAGGPKPPSGKKDWDDDQND

SEQ ID NO: 8855 - protein, 541 aa, Homo sapiens
MRALLHKPEMIKQILPEHSVLQNINFVEAFQDELLVTEVYDLPQRPNDVQLFYGSMCKIILSVIGEFRDCISSREFLQPSSKASLESTSDLGASGKHGGNVSLDVLPVKGPQGSPLLSRAARPPLDQLASEEPWTVLPEHLILVAPSPCDMAKTGRFQIVNNSVRLLRFELCWPAHCLTVTPQHGCVAPESKLQILVSPNSSLSTKQSMFPWSGLIYIHCDDGQKKIVKVQIREDLTQVELLTRLTSKPFGILSPVSEPSVSHLVKPMTKPPSTKVEIRNKSITFPTTEPGETSESCLELENHGTTDVKWHLSSLAPPYVKGVDESGDVFRATYAAFRCSPISGLLESHGIQKVSITFLPRGRGDYAQFWDVECHPLKEPHMKHTLRFQLSGQSIEAENEPENACLSTDSLIKIDHLVKPRRQAVSEASARIPEQLDVTARGVYAPEDVYRFRPTSVGESRTLKVNLRNNSFITHSLKFLSPREPFYVKHSKYSLRAQHYINMPVQFKPKSAGKFEALLVIQTDEGKSIAIRLIGEALGKN

SEQ ID NO: 8856 - protein, 578 aa, Homo sapiens
MSSKGSSTDGRTDLANGSLSSSPEEMSGAEEGRETSSGIEVEASDLSLSLTGDDGGPNRTSMEDTGHYSINDENRVHDRSEEEEEEEEEEEEEQPRRRVQRKRANRDQDSSDDERALEDWVSSETSALPRPRWQALPALRERELGSSARFVYEACGARVFVQRFRLQHGLEGHTGCVNTLHFNQRGTWLASGSDDLKVVVWDWVRRQPVLDFESGHKSNVFQAKFLPNSGDSTLAMCARDGQVRVAELSATQCCKNTKRVAQHKGASHKLALEPDSPCTFLSAGEDAVVFTIDLRQDRPASKLVVTKEKEKKVGLYTIYVNPANTHQFAVGGRDQFVRIYDQRKIDENENNGVLKKFCPHHLVNSESKANITCLVYSHDGTELLASYNDEDIYLFNSSHSDGAQYVKRYKGHRNNATVKGVNFYGPKSEFVVSGSDCGHIFLWEKSSCQIIQFMEGDKGGVVNCLEPHPHLPVLATSGLDHDVKIWAPTAEASTELTGLKDVIKKNKRERDEDSLHQTDLFDSHMLWFLMHHLRQRRHHRRWREPGVGATDADSDESPSSSDTSDEEEGPDRVQCMPS

SEQ ID NO: 8857 - protein, 140 aa, Homo sapiens
MGGKPRHSLYFIGYQDDFLLYLDPHYCQPTVDVSQADFPLESFHCTSPRKMAFAKMDPSCTVGFYAGDRKEFETLCSELTRVLSSSSATERYPMFTLAEGHAQDHSLDDLCSQLAQPTLRLAAGRLLRAKRPSSEDFVFL

SEQ ID NO: 8858 - protein, 189 aa, Homo sapiens
MVLLHVKRGDESQFLLQAPGSTELEELTVQVARVYNGRLKVQRLCSAPNEKMKQVLKKTIEEAKAIISKKQVEAGVCVTMEMVKDALDQLRGAVMIVYPMGLPPYDPIRMEFENKEDLSGTQAGLNVIKEAEAQLWWAAKELRRTKKLSDYVGKNEKTKIIAKIQQVSTFCFNVSVVFVISLQTDKNVQ

SEQ ID NO: 8859 - protein, 676 aa, Homo sapiens
MAAIQHGHEAVVRLLMEWGADPNHAARTVGWSPLMLAALTGRLGVAQQLVEKGANPDHLSVLEKTAFEVALDCKHRDLVDYLDPLTTVRPKTDEEKRRPDIFHALKMGNFQLVKEIADEDPSHVNLVNGDGATPLMLAAVTGQLALVQLLVERHADVDKQDSVHGWTALMQATYHGNKEIVKYLLNQGADVTLRAKNGYTAFDLVMLLNDPDTELVRLLASVCMQVNKDKGRPSHQPPLPHSKVRQPWSIPVLPDDKGGLKSWWNRMSNRFRKLKLMQTLPRGLSSNQPLPFSDEPEPALDSTMRAAPQDKTSRSALPDAAPVTKDNGPGSTRGEKEDTLLTTMLRNGAPLTRLPSDKLKAVIPPFLPPSSFELWSSDRSRTRHNGKADPMKTALPQRASRGHPVGGGGTDTTPVRPVKFPSLPRSPASSANSGNFNHSPHSSGGSSGVGVSRHGGELLNRSGGSIDNVLSQIAAQRKKAAGLLEQKPSHRSSPVGPAPGSSPSELPASPAGGSAPVGKKLETSKRPPSGTSTTSKSTSPTLTPSPSPKGHTAESSVSSSSSHRQSKSSGGSSSGTITDEDELTGILKKLSLEKYQPIFEEQEVDMEAFLTLTDGDLKELGIKTDGSRQQILAAISELNAGKGRERQILQETIHNFHSSFESSASNTRAPGNSPCA

SEQ ID NO: 8860 - protein, 771 aa, Homo sapiens
MRHQKRNVYHCNKCRLQFLFAKDKIEHKLQHHKTFRKPKQLEGLKPGTKVTIRASRGQAAVPVSSNDTPPSALQEAAPLTSSMDPLPVFLYPPVQRSIQKRAVRKMSVMGRQTCLECSFEIPDFPNHFPTYVHCSLCRYSTCCSRAYANHMINNHVPRKSPKYLALFKNSVSGIKLACTSCTFVTSVGDAMAKHLVFNPSHRSSSILPRGLTWIAHSRHGQTRDRVHDRNVKNMYPPPSFPTNKAATVKSAGATPAEPEELLTPLAPALPSPASTATPPPTPTHPQALALPPLATEGAECLNVDDQDEGSPVTQEPELASGGGGSGGVGKKEQLSVKKLRVVLFALCCNTEQAAEHFRNPQRRIRRWLRRFQASQGENLEGKYLSFEAEEKLAEWVLTQREQQLPVNEETLFQKATKIGRSLEGGFKISYEWAVRFMLRHHLTPHARRAVAHTLPKDVAENAGLFIDFVQRQIHNQDLPLSMIVAIDEISLFLDTEVLSSDDRKENALQTVGTGEPWCDVVLAILADGTVLPTLVFYRGQMDQPANMPDSILLEAKESGYSDDEIMELWSTRVWQKHTACQRSKGMLVMDCHRTHLSEEVLAMLSASSTLPAVVPAGCSSKIQPLDVCIKRTVKNFLHKKWKEQAREMADTACDSDVLLQLVLVWLGEVLGVIGDCPELVQRSFLVASVLPGPDGNINSPTRNADMQEELIASLEEQLKLSGEHSESSTPRPRSSPEETIEPESLHQLFEGESETESFYGFEEADLDLMEI

SEQ ID NO: 8861 - protein, 94 aa, Homo sapiens
MAMTAGTTTTFPMSNHTRERVTVAKLTLENFYSNLILQHEERETRQKKLEVAMEEEGLADEEKKLRRSQHARKETEFLRLKRTRLGLDDFESLK

SEQ ID NO: 8862 - protein, 348 aa, Homo sapiens; identical to SEQ ID NO: 5338

SEQ ID NO: 8863 - protein, 295 aa, Homo sapiens; identical to SEQ ID NO: 4796

SEQ ID NO: 8864 - protein, 85 aa, Homo sapiens
MPYNEAENKRSYHLCDLCDRIIIGDREWAAHIKSKSHLNQLKKRRRLDSDAVNTIESQSVSPDHNKEPKEKGSPGQNDQELKCSV

SEQ ID NO: 8865 - protein, 131 aa, Homo sapiens
MAMTAGTTTTFPMSNHTRERVTVAKLTLENFYSNLILQHEERETRQKKLEVAMEEEGLADEEKKLRRSQHARKETEFLRLKRTRLGLDDFESLKVIGRGAFGEVRLVQKKDTGHIYAMKILRKSDMLEKEQ

SEQ ID NO: 8866 - protein, 6 aa, Homo sapiens
MAHEMI

SEQ ID NO: 8867 - protein, 732 aa, Homo sapiens
MGFRDEAAGYFHKAVKLNPDFSDAKENFYRVANWLVERWHFIMLNDTKRNTIYNAAIQKAVCLGSKSVLDIGAGTGILSMFAKKAGAHSVYACELSKTMYELACDVVAANKMEAGIKLLHTKSLDIEIPKHIPERVSLVVTETVDAGLFGEGIVESLIHAWEHLLLQPKTKGESANCEKYGKVIPASAVIFGMAVECAEIRRHHRVGIKDIAGIHLPTNVKFQSPAYSSVDTEETIEPYTTEKMSRVPGGYLALTECFEIMTVDFNNLQELKSLATKKPDKIGIPVIKEGILDAIMVWFVLQLDDEHSLSTSPSEETCWEQAVYPVQDLADYWIKPGDHVMMEVSCQDCYLRIQSISVLGLECEMDVAKSFTQNKDLLSLGNEAELCSALANLQTSKPDAVEQTCILESTEIALLNNIPYHEGFKMAMSKVLSSLTPEKLYQTMDTHCQNEMSSGTGQSNTVQNILEPFYVLDVSEGFSVLPVIAGTLGQVKPYSSVEKDQHRIALDLISEANHFPKETLEFWLRHVEDESAMLQRPKSDKLWSIIILDVIEPSGLIQQEIMEKAAISRCLLQSGGKIFPQYVLMFGLLVESQTLLEENAVQGTERTLGLNIAPFINQFQVPIRVFLDLSSLPCIPLSKPVELLRLDLMTPYLNTSNREVKVYVCKSGRLTAIPFWYHMYLDEEIRLDTSSEASHWKQAAVVLDNPIQVEMGEELVLSIQHHKSNVSITVKQ

SEQ ID NO: 8868 - protein, 517 aa, Homo sapiens
MCSLASGATGGRGAVENEEDLPELSDSGDEAAWEDEDDADLPHGKQQTPCLFCNRLFTSAEETFSHCKSEHQFNIDSMVHKHGLEFYGYIKLINFIRLKNPTVEYMNSIYNPVPWEKEEYLKPVLEDDLLLQFDVEDLYEPVSVPFSYPNGLSENTSVVEKLKHMEARALSAEAALARAREDLQKMKQFAQDFVMHTDVRTCSSSTSVIADLQEDEDGVYFSSYGHYGIHEEMLKDKIRTESYRDFIYQNPHIFKDKVVLDVGCGTGILSMFAAKAGAKKVLGVDQSEILYQAMDIIRLNKLEDTITLIKGKIEEVHLPVEKVDVIISEWMGYFLLFESMLDSVLYAKNKYLAKGGSVYPDICTISLVAVSDVNKHADRIAFWDDVYGFKMSCMKKAVIPEAVVEVLDPKTLISEPCGIKHIDCHTTSISDLEFSSDFTLKITRTSMCTAIAGYFDIYFEKNCHNRVVFSTGPQSTKTHWKQTVFLLEKPFSVKAGEALKGKVTVHKNKREVLIVGI

SEQ ID NO: 8869 - protein, 519 aa, Homo sapiens
MEQEKFDLQKQHTENIQELLEDTNVRLNKMESEYMAQTQSTNHMIKELEARVQQLTGEAENSNLQRQKLIQEKAELERCYQITCSELQEVKARRNTLHKEKDHLVNDYEQNMKLLQTKYDADINLLKQEHALSASKASSMIEELEQNVCQLKQQLQESELQRKQQLRDQENKFQMEKSHLKHIYEKKAHDLQSELDKGKEDTQKKIHKFEEALKEKEEQLTRVTEVQRLQAQQADAALEEFKRQVELNSEKVYAEMKEQMEKVEADLTRSKSLREKQSKEFLWQLEDIRQRYEQQIVELKLEHEQEKTHLLQQHNAEKDSLVRDHEREIENLEKQLRAANMEHENQIQEFKKRDAQVIADMEAQVHKLREELINVNSQRKQQLVELGLLREEEKQRATREHEIVVNKLKAESEKMKIELKKTHAAETEMTLEKVLQDELENRSNQVRCAEKKLQHKELESQEQITYIRQEYETKLKGLMPASLRQELEDTISSLKSQVNFLQKRASILQEELTTYQGRR

SEQ ID NO: 8870 - protein, 579 aa, Homo sapiens
MNNIHVENESLDNFLKETNKENLLDILTEPERKPDPKLYTRSKPKTDSYNQTKNSLVPKQALGKSSVNSAVLKDRVNKQFVGETQSRTFPVKSQQLSRGADLARPGVKPSRTVPSHFIRTLSKVQSSKKPVVKNIKDIKVNRSQYERPNETKIRSYPVTEQRVKHTKAAYPSLLQGEYNNRHPNIKQDQKSSQVCIPQTSCVLQKSKAISQRPNLTVGRFNSAIPSTPSIRPNGTSGNKHNNNGFQQKAQTLDSKLKKAVPQNHFLNKTAPKTQADVTTVNGTQTNPNIKKKATAEDRRKQLEEWQKSKGKTYKRPPMELKTKRKVIKEMNISFWKSIEKEEEEKKAQLELSSKINNTLTECLNLIEGGVPSNEILNILSSIPEAEKFAKFWICKAKLLASKGTFDVIGLYEEAIKNGATPIQELRKVVLNILQDSNRTTEGITSDSLVAETSITSVEELAKKMESVKSCLSPKEREQVTATPRIAKAEQHNYPGIKLQIGPIPRINGMPEVQDMKFITPVRRSSRIERAVSRYPEMLQEHDLVVASLDELLEVEETKCFIFRRNEALPVTLGFQTPES

SEQ ID NO: 8871 - protein, 234 aa, Homo sapiens
MYMDLVDGIFLNQIMLQIDPRPTNQRINKHVNNDVNLRIQNLTILVRNIKTYYQEVLQQLIVMNLPNVLMIGRDPLSGKSMEEIKKVLLLVLGCAVQCERKEEFIERIKQLDIETQAGIVAHIQEVTHNQENVFDLQWLELPDVAPEELEALSRSMVLHLRRLIDQRDECTELIVDLTQERDYLQAQHPPSPIKSSSADSTPSPTSSLSSEDKQHLAVELADTKARLRRVRQEL

SEQ ID NO: 8872 - protein, 386 aa, Homo sapiens
MTDIRKIRLGERLVEVFSAEKVYMVRLRNPLGRQEWSGPWSEISEEWQQLTASDRKNLGLVMSDDGEFWMSLEDFCRNFHKLNVCRNVNNPIFGRKELESVLGCWTVDDDPLMNRSGGCYNNRDTFLQNPQYIFTVPEDGHKVIMSLQQKDLRTYRRMGRPDNYIIGFELFKVEMNRKFRLHHLYIQERAGTSTYIDTRTVFLSKYLKKGNYVLVPTMFQHGRTSEFLLRIFSEVPVQLRELTLDMPKMSCWNLARGYPKVVTQITVHSAEDLEKKYANETVNPYLVIKCGKEEVRSPVQKNTVHAIFDTQAIFYRRTTDIPIIVQVWNSRKFCDQFLGQVTLDADPSDCRDLKSLYLRKKGGPTAKVKQGHISFKVISSDDLTEL

SEQ ID NO: 8873 - protein, 321 aa, Homo sapiens
MTELSLQKEQLQLKIIEIEDEAEKWQKEKDRIKSFTTNEKAILEQNFRDLVRDLEKQKEEVRAALEQREQDAVDQVKVIMDALDERAKVLHEDKQTREQLHSISDSVLFLQEFGALMSNYSLPPPLPTYHVLLEGEGLGQSLGNFKDDLLNVCMRHVEKMCKADLSRNFIERNHMENGGDHRYVNNYTNSFGGEWSAPDTMKRYSMYLTPKGGVRTSYQPSSPGRFTKETTQKNFNNLYGTKGNYTSRVWEYSSSIQNSDNDLPVVQGSSSFSLKGYPSLMRSQSPKAQPQTWKSGKQTMLSHYRPFYVNKGNGIGSNEAP

SEQ ID NO: 8874 - protein, 227 aa, Homo sapiens
MYRQRFLYSLYRHTHWVRCAKFSPDGRLIVSCSEDKTIKIWDTTNKQCVNNFSDSVGFANFVDFNPSGTCIASAGSDQTVKVWDVRVNKLLQHYQVHSGGVNCISFHPSGNYLITASSDGTLKILDLLEGRLIYTLQGHTGPVFTVSFSKGGELFASGGADTQVLLWRTNFDELHCKGLTKRNLKRLHFDSPPHLLDIYAAPHPHEEKVETVEDFFLHLLRLIQSLR

SEQ ID NO: 8875 - protein, 561 aa, Homo sapiens
MRAVRRHLFPQHSAPGRGVVWEWLSDDGSWTAYEASVCDYLEQQVARGNQLVDLAPLGYNYTVNYTTHTQTNKTSSFCRSVRRQAGPPYPVTTIIAPPGHTGVACSCHQCLSGSRTGPVSGRYRHSMTNLPAYPVPQHPPHRTASVFGTHQAFAPYNKPSLSGARSAPRLNTTNAWGAAPPSLGSQPLYRSSLSHLGPQHLPPGSSTSGAVSASLPSGPSSSPGSVPATVPMQMPKPSRVQQALAGMTSVLMSAIGLPVCLSRAPQPTSPPASRLASKSHGSVKRLRKMSVKGATPKPEPEPEQVIKNYTEELKVPPDEDCIICMEKLSTASGYSDVTDSKAIGSLAVGHLTKCSHAFHLLCLLAMYCNGNKDGSLQCPSCKTIYGEKTGTQPQGKMEVLRFQMSLPGHEDCGTILIVYSIPHGIQGPEHPNPGKPFTARGFPRQCYLPDNAQGRKVLELLKVAWKRRLIFTVGTSSTTGETDTVVWNEIHHKTEMDRNITGHGYPDPNYLQNVLAELAAQGVTEDCLEQQHARLWWPPRCPMAGWVARQEVPSPRGWEVC

SEQ ID NO: 8876 - protein, 854 aa, Homo sapiens
MKVEACTWAGYSGLYEAIESWDFKKIEKLEEYRLLLKRLQPEFKTRIIPTDIISDLSECLINQECEEILQICSTKGMMAGAEKLVECLLRSDKENWPKTLKLALEKERNKFSELWIVEKGIKDVETEDLEDKMETSDIQIFYQEDPECQNLSENSCPPSEVSDTNLYSPFKPRNYQLELALPAMKGKNTIICAPTGCGKTFVSLLICEHHLKKFPQGQKGKVVFFANQIPVYEQQKSVFSKYFERHGYRVTGISGATAENVPVEQIVENNDIIILTPQILVNNLKKGTIPSLSIFTLMIFDECHNTSKQHPYNMIMFNYLDQKLGGSSGPLPQVIGLTASVGVGDAKNTDEALDYICKLCASLDASVIATVKHNLEELEQVVYKPQKFFRKVESRISDKFKYIIAQLMRDTESLAKRICKDLENLSQIQNREFGTQKYEQWIVTVQKACMVFQMPDKDEESRICKALFLYTSHLRKYNDALIISEHARMKDALDYLKDFFSNVRAAGFDEIEQDLTQRFEEKLQELESVSRDPSNENPKLEDLCFILQEEYHLNPETITILFVKTRALVDALKNWIEGNPKLSFLKPGILTGRGKTNQNTGMTLPAQKCILDAFKASGDHNILIATSVADEGIDIAQCNLVILYEYVGNVIKMIQTRGRGRARGSKCFLLTSNAGVIEKEQINMYKEKMMNDSILRLQTWDEAVFREKILHIQTHEKFIRDSQEKPKPVPDKENKKLLCRKCKALACYTADVRVIEECHYTVLGDAFKECFVSRPHPKPKQFSSFEKRAKIFCARQNCSHDWGIHVKYKTFEIPVIKIESFVVEDIATGVQTLYSKWKDFHFEKIPFDPAEMSK

SEQ ID NO: 8877 - protein, 270 aa, Homo sapiens
MQIEHIIENIVAVTKGLSEKLPEKWESVKLLFVKTEKSAALPIFSSFVSNWDEATKRSLLNKKKKEARRKRRERNFEKQKERKKKRQQARKTASVLSKDDVAPESGDTTVKKPESKKEQTPEHGKKKRGRGKAQVKATNESEDEIPQLVPIGKKTPANEKVEIQKHATGKKSPAKSPNPSTPRGKKRKALPASETPKAAESETPGKSPEKKPKIKEEAVKEKSPSLGKKDARQTPKKPEAKFFTTPSKSVRKASHTPKKWPKKPKVPQST

SEQ ID NO: 8878 - protein, 352 aa, Homo sapiens
MSSRKLSGPKGRRLSIHVVTWNVASAAPPLDLSDLLQLNNRNLNLDIYVIGLQELNSGIISLLSDAAFNDSWSSFLMDVLSPLSFIKVSHVRMQGILLLVFAKYQHLPYIQILSTKSTPTGLFGYWLSIAKKHDPLLREFQEGRLLFPPTYKFDRNSNDYDTSEKKRKPAWTDRILWRLKRQPCAGPDTPIPPASHFSLSLRGYSSHMTYGISDHKPVSGTFDLELKPLVSAPLIVLMPEDLWTVENDMMVSYSSTSDFPSSPWDWIGLYKVGLRDVNDYVSYAWVGDSKVSCSDNLNQVYIDISNIPTTEDEFLLCYYSNSLRSVVGISRPFQIPPGSLREDPLGEAQPQI

SEQ ID NO: 8879 - protein, 124 aa, Homo sapiens
MTGSCCGSTFSSLSYGGGCCQPCCCRDPCCCRPVTCQTTVCRPVTCVPRCTRPICEPCRRPVCCDPCSLQEGCCRPITCCPSSCTAVVCRPCCWATTCCQPPVSVQSPCGQPTPCSTTCRTSSC

SEQ ID NO: 8880 - protein, 308 aa, Homo sapiens; identical to SEQ ID NO: 5666

SEQ ID NO: 8881 - protein, 980 aa, Homo sapiens
MTEGRHCQVHLLDDRRLELLVQPKLLARELLDLVASHFNLKEKEYFGITFIDDTGQQNWLQLDHRVLDHDLPKKPGPTILHFAVRFYIESISFLKDKTTVELFFLNAKACVHKGQIEVESETIFKLAAFILQSPKVSLTHDENARKDLKTLPAFPTKTLQEHPSLAYCEDRVIEHYLKIKGLTRGQAVVQYMKIVEALPTYGVHYYAVKDKQGLPWWLGISYKGIGQYDIQDKVKPRKLFQWKQLENLYFREKKFAVEVHDPRRISVSRRTFGQSGLFVQTWYANSSLIKSIWVMAISQHQFYLDRKQSKAKIPSARSLDEIAMDLTETGTQRASKLVTLETKSQFIMASNGSLISSGSQDSEVSEEQKREKILELKKKEKLLQEKLLKKVEELKKICLREAELTGKMPKEYPLNIGEKPPQVRRRVGTAFKLDDNLLPSEEDPALQELESNFLIQQKLVEAAKKLANEPDLCKTVKKKRKQDYTDAMKKLQEIENAINEYRIRCGKKPSQKATVLPEDIIPSESSSLSDTTTYDDPSDAFTFPGQRSSSVPHSPRILPPKSLGIERIHFRKSSINEQFVDTRQSREMLSTHSSPYKTLERRPQGGRSMPTTPVLTRNAYSSSHLEPESSSQHCRQRSGSLESQSHLLSEMDSDKPFFSLSKSQRSSSTEILDDGSSYTSQSSTEYYCVTPVTGPYYTTQTLDTRTRGRRRSKKQNVSTSNSGSMPNLAQKDSLRNGVYSKSQEPPSSSYYIAGYTPYAECDFYYSGGYVYENDTEGQYSVNPSYRSSAHYGYERQRDYSRSFHEDEVDRVPHNPYATLRLPRKAAAKSEHITKNIHKALVAEHLRGWYQRASGQKDQGHSPQTSFDSDRGSQRCLGFAGLQVPCSPSSRASSYSSVSSTNASGNWRTQLTIGLSDYETPAHSSYTSCYGNVYNPLPSPSRQYTEISQLDGTDGNQLEDNLESSEQRLFWHEDSKPGTLV

SEQ ID NO: 8882 - protein, 992 aa, Homo sapiens
MYGSARSVGKVEPSSQSPGRSPRLPRSPRLGHRRTNSTGGSSGSSVGGGSGKTLSMENIQSLNAAYATSGPMYLSDHENVGSETPKSTMTLGRSGGRLPYGVRMTAMGSSPNIASSGVASDTIAFGEHHLPPVSMASTVPHSLRQARDNTIMDLQTQLKEVLRENDLLRKDVEVKESKLSSSMNSIKTFWSPELKKERALRKDEASKITIWKEQYRVVQEENQHMQMTIQALQDELRIQRDLNQLFQQDSSSRTGEPCVAELTEENFQRLHAEHERQAKELFLLRKTLEEMELRIETQKQTLNARDESIKKLLEMLQSKGLSAKATEEDHERTRRLAEAEMHVHHLESLLEQKEKENSMLREEMHRRFENAPDSAKTKALQTVIEMKDSKISSMERGLRDLEEEIQMLKSNGALSTEEREEEMKQMEVYRSHSKFMKNKIGQVKQELSRKDTELLALQTKLETLTNQFSDSKQHIEVLKESLTAKEQRAAILQTEVDALRLRLEEKETMLNKKTKQIQDMAEEKGTQAGEIHDLKDMLDVKERKVNVLQKKIENLQEQLRDKEKQMSSLKERVKSLQADTTNTDTALTTLEEALAEKERTIERLKEQRDRDEREKQEEIDNYKKDLKDLKEKVSLLQGDLSEKEASLLDLKEHASSLASSGLKKDSRLKTLEIALEQKKEECLKMESQLKKAHEAALEARASPEMSDRIQHLEREITRYKDESSKAQAEVDRLLEILKEVENEKNDKDKKIAELESLTSRQVKDQNKKVANLKHKEQVEKKKSAQMLEEARRREDNLNDSSQQLQDSLRKKDDRIEELEEALRESVQITAEREMVLAQEESARTNAEKQVEELLMAMEKVKQELESMKAKLSSTQQSLAEKETHLTNLRAERRKHLEEVLEMKQEALLAAISEKDANIALLELSSSKKKTQEEVAALKREKDRLVQQLKQQTQNRMKLMADNYEDDHFKSSHSNQTNHKPSPDQDEEEGIWA

SEQ ID NO: 8883 - protein, 1045 aa, Homo sapiens
MLTVQVKTSSAIELPDSLAFLWIIPMWYCEGKELENSPDIHIVQAGNLHSLTIAEAFEEDTGRYSCFASNIYGTDSTSAEIYIEGVSSSDSEGDPNKEEMNRIQKPNEVSSPPTTSAVIPPAVPQAQHLVAQPRVATIQQCQSPTNYLQGLDGKPIIAAPVFTKMLQNLSASEGQLVVFECRVKGAPSPKVEWYREGTLIEDSPDFRILQKRPVCMEHIEEICTLVIAEVFAEDSGCFTCTASNKYGTVSSIAQLHVRGNEDLSNNGSLHSANSTTNLAAIEPQPSPPHSEPPSVEQPPKPKLEGVLVNHNEPRSSSRIGLRVHFNLPEDDKGSEASSEAGVVTTRQTRPDSFQERFNGQATKTPEPSSPVKEPPPVLAKPKLDSTQLQQLHNQVLLEQHQLQNPPPSSPKEFPFSMTVLNSNAPPAVTTSSKQVKAPSSQTFSLARPKYFFPSTNTTAATVAPSSSPVFTLSSTPQTIQRTVSKESLLVSHPSVQTKSPGGLSIQNEPLPPGPTEPTPPPFTFSIPSGNQFQPRCVSPIPVSPTSRIQNPVAFLSSVLPSLPAIPPTNAMGLPRSAPSMPSQGLAKKNTKSPQPVNDDNIRETKNAVIRDLGKKITFSDVRPNQQEYKISSFEQRLMNEIEFRLERTPVDESDDEIQHDEIPTGKCIAPIFDKRLKHFRVTEGSPVTFTCKIVGIPVPKVYWFKDGKQISKRNEHCKMRREGDGTCSLHIESTTSDDDGNYTIMAANPQGRISCSGHLMVQSLPIRSRLTSAGQSHRGRSRVQERDKEPLQERFFRPHFLQAPGDMVAHEGRLCRLDCKVSGLPPPELTWLLNGQPVLPDASHKMLVRETGVHSLLIDPLTQRDAGTYKCIATNKTGQNSFSLELSVVAKEVKKAPVILEKLQNCGVPEGHPVRLECRVIGMPPPVFYWKKDNETIPCTRERISMHQDTTGYACLLIQPAKKSDAGWYTLSAKNEAGIVSCTARLDIYAQWHHQIPPPMSVRPSGSRYGSLTSKGLDIFSAFSSMESTMVYSCSSRSVVESDEL

SEQ ID NO: 8884 - protein, 23 aa, Homo sapiens
VRLAWGFVSALGSFHTADPEGAA

SEQ ID NO: 8885 - protein, 535 aa, Homo sapiens
MEAPTVETPPDPSPPSAPAPALVPLRAPDVARLREEQEKVVTNCQERIQHWKKVDNDYNALRERLSTLPDKLSYNIMVPFGPFAFMPGKLVHTNEVTVLLGDNWFAKCSAKQAVGLVEHRKEHVRKTIDDLKKVMKNFESRVEFTEDLQKMSDAAGDIVDIREEIKCDFEFKAKHRIAHKPHSKPKTSDIFEADIANDVKSKDLLADKELWARLEELERQEELLGELDSKPDTVIANGEDTTSSEEEKEDRNTNVNAMHQVTDSHTPCHKDVASSEPFSGQVNSQLNCSVNGSSSYHSDDDDDDDDDDDDDNIDDDDGDNDHEALGVGDNSIPTIYFSHTVEPKRVRINTGKNTTLKFSEKKEEAKRKRKNSTGSGHSAQELPTIRTPADIYRAFVDVVNGEYVPRKSILKSRSRENSVCSDTSESSAAEFDDRRGVLRSISCEEATCSDTSESILEEEPQENQKKLLPLSVTPEAFSGTVIEKEFVSPSLTPPPAIAHPALPTIPERKEVLLEASEETGKRVSKFKAARLQQKD

SEQ ID NO: 8886 - protein, 576 aa, Homo sapiens
MEGLRRRRGREAGPPQPMVPLAVENQAGGEGAGGELGISLNMCLLGALVLLGLGVLLFSGGLSESETGPMEEVERQVLPDPEVLEAVGDRQDGLREQLQAPVPPDSVPSLQNMGLLLDKLAKENQDIRLLQAQLQAQKEELQSLMHQPKGLEEENAQLRGALQQGEAFQRALESELQQLRARLQGLEADCVRGPDGVCLSGGRGPQGDKAIREQGPREQEPELSFLKQKEQLEAEAQALRQELERQRRLLGSVQQDLERSLQDASRGDPAHAGLAELGHRLAQKLQGLENWGQDPGVSANASKAWHQKSHFQNSREWSGKEKWWDGQRDRKAEHWKHKKEESGRERKKNWGGQEDREPAGRWKEGRPRVEESGSKKEGKRQGPKEPPRKSGSFHSSGEKQKQPRWREGTKDSHDPLPSWAELLRPKYRAPQGCSGVDECARQEGLTFFGTELAPVRQQELASLLRTYLARLPWAGQLTKELPLSPAFFGEDGIFRHDRLRFRDFVDALEDSLEEVAVQQTGDDDEVDDFEDFIFSHFFGDKALKKRSGKKDKHSQSPRAAGPREGHSHSHHHHHRG

SEQ ID NO: 8887 - protein, 747 aa, Homo sapiens
MAKYNTGGNPTEDVSVNSRPFRVTGPNSSSGIQARKNLFNNQGNASPPAGPSNVPKFGSPKPPVAVKPSSEEKPDKEPKPPFLKPTGAGQRFGTPASLTTRDPEAKVGFLKPVGPKPINLPKEDSKPTFPWPPGNKPSLHSVNQDHDLKPLGPKSGPTPPTSENEQKQAFPKLTGVKGKFMSASQDLEPKPLFPKPAFGQKPPLSTENSHEDESPMKNVSSSKGSPAPLGVRSKSGPLKPAREDSENKDHAGEISSLPFPGVVLKPAASRGGPGLSKNGEEKKEDRKIDAAKNTFQSKINQEELASGTPPARFPKAPSKLTVGGPWGQSQEKEKGDKNSATPKQKPLPPLFTLGPPPPKPNRPPNVDLTKFHKTSSGNSTSKGQTSYSTTSLPPPPPSHPASQPPLPASHPSQPPVPSLPPRNIKPPFDLKSPVNEDNQDGVTHSDVVIPLDHEQDSEGETYEDIEASKEREKKREKEEKKRLELEKKEQKEKEKKEQEIKKKFKLTGPIQVIHLAKACCDVKGGKNELSFKQGEQIEIIRITDNPEGKWLGRTARGSYGYIKTTAVEIDYDSLKLKKDSLGAPSRPIEDDQEVYDDVAEQDDISSHSQSGSGGIFPPPPDDDIYDGIEEEDADDGSTLQVQEKSNTWSWGILKMLKGKDDRKKSIREKPKVSDSDNNEGSSFPAPPKQLDMGDEVYDDVDTSDFPVSSAEMSQGTNVGKAKTEEKDLKKLKKQEKEEKDFRKKFKK

SEQ ID NO: 8888 - protein, 521 aa, Homo sapiens; identical to SEQ ID NO: 8023

SEQ ID NO: 8889 - protein, 569 aa, Homo sapiens
MLRDMTGLPHNRKCFDCDQRGPTYVNMTVGSFVCTSCSGSLRGLNPPHRVKSISMTTFTQQEIEFLQKHGNEVCKQIWLGLFDDRSSAIPDFRDPQKVKEFLQEKYEKKRWYVPPEQAKVVASVHASISGSSASSTSSTPEVKPLKSLLGDSAPTLHLNKGTPSQSPVVGRSQGQQQEKKQFDLLSDLGSDIFAAPAPQSTATANFANFAHFNSHAAQNSANADFANFDAFGQSSGSSNFGGFPTASHSPFQPQTTAFRMLSSSCSFGEFTSAFPLQATHSGSAASVNANFAHFDNFPKSSSADFGTFNTSQSHQTASAVSKVSTNKAGLQTADKYAALANLDNIFSAGQGGDQGSGFGTTGKAPVGSVVSVPSQSSASSDKYAALAELDSVFSSAATSSNAYTSTSNASSNVFGTVPVVASAQTQPASSSVPAPFGATPSTNPFVAAAGPSVASSTNPFQTNARGATAATFGTASMSMPTGFGTPAPYSLPTSFSGSFQQPAFPAQAAFPQQTAFSQQPNGFAAFGQTKPVVTPFGQVAAAGVSSNPFMTGAPTGQFPTGSSSTNPFL

SEQ ID NO: 8890 - protein, 668 aa, Homo sapiens
MSKLAAAHRGAIRALQMFVTQFTDRGEHPLPARCKELGSLIRQLSLCSVKLDADPSVPDVVIDILQQIEALESLLEKKLSPKKVKKCFSEIRSRFPIGSQKALERWPSTSPKGERRPLTAKDTFPQETSRPSVAKQLLADKYQPDTELPETQRLQSELDVLDADIVLEEGPFILDQSASFKDEVLAVAKTKAGKKKPVTENVPFRKKDTLAPARQQGLRKAERGRQSQPHSKSRVQQTTVSSRLKMNRQPVKDRKAPWIPPNPTSPPASPKCAAWLKVKTSPRDATKEPLQQEDPQEESHLTGAVEHEAARLAWLDAETSKRLKELEELKAKEIDSMQKQRLDWLDAETSRRTKELNELKAEEMYRLQQLSVSATHLADKVEEAVLDRLKPLLVKAQRVNSTTEANIHLKDGSSVNTAKAQPAQEVAAVDFESNNIRQLDDFLEDCASELWAVTHAKILGSETLATVEDSKDSPDLEIMMRRMEEMEKYQESVRQRYNKIAYADPRLWMQEENNDQKISAISEKPLSPHPIRITKTVDRKDPAVNIMLERPCNGNSLDESVGTEEGSEKREAPLLSLAEDSQQKEGRAPLFVPPGMQHSIGDYCSRFEQYLRIISHEAVGSFNPWLIAESFSEELVDEALGAVAAELQDMCEDYAEAVFTSEFLEAAT

SEQ ID NO: 8891 - protein, 1202 aa, Homo sapiens
MPARIGYYEIDRTIGKGNFAVVKRATHLVTKAKVAIKIIDKTQLDEENLKKIFREVQIMKMLCHPHIIRLYQVMETERMIYLVTEYASGGEIFDHLVAHGRMAEKEARRKFKQIVTAVYFCHCRNIVHRDLKAENLLLDANLNIKIADFGFSNLFTPGQLLKTWCGSPPYAAPELFEGKEYDGPKVDIWSLGVVLYVLVCGALPFDGSTLQNLRARVLSGKFRIPFFMSTECEHLIRHMLVLDPNKRLSMEQICKHKWMKLGDADPNFDRLIAECQQLKEERQVDPLNEDVLLAMEDMGLDKEQTLQAEQAGTAMNISVPQVQLINPENQIVEPDGTLNLDSDEGEEPSPEALVRYLSMRRHTVGVADAAEVMEDLQKLLPGFPGVNPQAPFLQVAPNVNFMHNLLPMQNLQPTGQLEYKEQSLLQPPTLQLLNGMGPLGRRASDGGANIQLHAQQLLKRPRGPSPLVTMTPAVPAVTPVDEESSDGEPDQEAVQRYLANRSKRHTLAMTNPTAEIPPDLQRQLGQQPFRSRVWPPHLVPDQHRSTYKDSNTLHLPTERFSPVRRFSDGAASIQAFKAHLEKMGNNSSIKQLQQECEQLQKMYGGQIDERTLEKTQQQHMLYQQEQHHQILQQQIQDSICPPQPSPPLQAACENQPALLTHQLQRLRIQPSSPPPNHPNNHLFRQPSNSPPPMSSAMIQPHGAASSSQFQGLPSRSAIFQQQPENCSSPPNVALTCLGMQQPAQSQQVTIQVQEPVDMLSNMPGTAAGSSGRGISISPSAGQMQMQHRTNLMATLSYGHRPLSKQLSADSAEAHSAHQQPPHYTTSALQQALLSPTPPDYTRHQQVPHILQGLLSPRHSLTGHSDIRLPPTEFAQLIKRQQQQRQQQQQQQQQQEYQELFRHMNQGDAGSLAPSLGGQSMTERQALSYQNADSYHHHTSPQHLLQIRAQECVSQASSPTPPHGYAHQPALMHSESMEEDCSCEGAKDGFQDSKSSSTLTKGCHDSPLLLSTGGPGDPESLLGTVSHAQELGIHPYGHQPTAAFSKNKVPSREPVIGNCMDRSSPGQAVELPDHNGLGYPARPSVHEHHRPRALQRHHTIQNSDDAYVQLDNLPGMSLVAGKALSSARMSDAVLSQSSLMGSQQFQDGENEECGASLGGHEHPDLSDGSQHLNSSCYPSTCITDILLSYKHPEVSFSMEQAGV

SEQ ID NO: 8892 - protein, 681 aa, Homo sapiens
MIEKMQGSRMDEQRCSFPPPLKTEEDYIPYPSVHEVLGREGPFPLILLPQFGGYWIEGTNHEITSIPETEPLQSPTTKVKLECNPTARIYRKHFLGKEHFNYYSLDAALGHLVFSLKYDVIGDQEHLRLLLRTKCRTYHDVIPISCLTEFPNVVQMAKLVCEDVNVDRFYPVLYPKASRLIVTFDEHVISNNFKFGVIYQKLGQTSEEELFSTNEESPAFVEFLEFLGQKVKLQDFKGFRGGLDVTHGQTGTESVYCNFRNKEIMFHVSTKLPYTEGDAQQLQRKRHIGNDIVAVVFQDENTPFVPDMIASNFLHAYVVVQAEGGGPDGPLYKVSVTARDDVPFFGPPLPDPAVFRKGPEFQEFLLTKLINAEYACYKAEKFAKLEERTRAALLETLYEELHIHSQSMMGLGGDEDKMENGSGGGGFFESFKRVIRSRSQSMDAMGLSNKKPNTVSTSHSGSFAPNNPDLAKAAGISLLIPGKSASRFGRRGSAIGIGTVEESLIVPGKSPTRKKSGPFGSRRSSAIGIENIQEVQEKRESPPAGQKTPDSGHVSQEPKSENSSTQSSPEMPTTKNRAETAAQRAEALKDFSRSSSSASSFASVVEETEGVDGEDTGLESVSSSGTPHKRDSFIYSTWLEDSVSTTSGGSSPDAGKLGDPACPEIKIQLEASEQHMPQLGC

SEQ ID NO: 8893 - protein, 224 aa, Homo sapiens
MSVGYANGIRVMSMTHTGEPGFMLYIPIEYALHVYNEVMSVGQKYGIRNAGYYALRSLRIEKFFAFWGQDINNLTTPLECGRESRVKLEKGMDFIGRDALLQQKQNGVYKRLTMFILDDHDSDLDLWPWWGEPIYRNGQYVGKTTSSAYSYSLERHVCLGFVHNFSEDTGEEQVVTADFINRGEYEIDIAGYRFQAKAKLYPVASLFTQKRRKDDMELSDLHGK

SEQ ID NO: 8894 - protein, 529 aa, Homo sapiens
MHFSGLEEAVYRNIQACKELAQTTRTAYGPNGMNKMVINHLEKLFVTNDAATILRELEVQHPAAKMIVMASHMQEQEVGDGTNFVLVFAGALLELAEELLRIGLSVSEVIEGYEIACRKAHEILPNLVCCSAKNLRDIDEVSSLLRTSIMSKQYGNEVFLAKLIAQACVSIFPDSGHFNVDNIRVCKILGSGISSSSVLHGMVFKKETEGDVTSVKDAKIAVYSCPFDGMITETKGTVLIKTAEELMNFSKGEENLMDAQVKAIADTGANVVVTGGKVADMALHYANKYNIMLVRLNSKWDLRRLCKTVGATALPRLTPPVLEEMGHCDSVYLSEVGDTQVVVFKHEKEDGAISTIVLRGSTDNLMDDIERAVDDGVNTFKVLTRDKRLVPGGGATEIELAKQITSYGETCPGLEQYAIKKFAEAFEAIPRALAENSGVKANEVISKLYAVHQEGNKNVGLDIEAEVPAVKDMLEAGILDTYLGKYWAIKLATNAAVTVLRVDQIIMAKPAGGPKPPSGKKDWDDDQND

SEQ ID NO: 8895 - protein, 730 aa, Homo sapiens; identical to SEQ ID NO: 4837

SEQ ID NO: 8896 - protein, 756 aa, Homo sapiens
MVAPVLETSHVFCCPNRVRGVLNWSSGPRGLLAFGTSCSVVLYDPLKRVVVTNLNGHTARVNCIQWICKQDGSPSTELVSGGSDNQVIHWEIEDNQLLKAVHLQGHEGPVYAVHAVYQRRTSDPALCTLIVSAAADSAVRLWSKKGPEVPILACGNDDCRIHIFAQQNDQFQKVLSLCGHEDWIRGVEWAAFGRDLFLASCSQDCLIRIWKLYIKSTSLETQDDDNIRLKENTFTIENESVKIAFAVTLETVLAGHENWVNAVHWQPVFYKDGVLQQPVRLLSASMDKTMILWAPDEESGVWLEQREWTPEIVISGHFDGVQDLVWDPEGEFIITVGTDQTTRLFAPWKRKDQSQVTWHEIARPQIHGYDLKCLAMINRFQFVSGADEKVLRVFSAPRNFVENFCAITGQSLNHVLCNQDSDLPEGATVPALGLSNKAVFQGDIASQPSDEEELLTSTGFEYQQVAFQPSILTEPPTEDHLLQNTLWPEVQKLYGHGYEIFCVTCNSSKTLLASACKAAKKEHAAIILWNTTSWKQVQNLVFHSLTVTQMAFSPNEKFLLAVSRDRTWSLWKKQDTISPEFEPVFSLFAFTNKITSVHSRIIWSCDWSPDSKYFFTGSRDKKVVVWGECDSTDDCIEHNIGPCSSVLDVGGAVTAVSVCPVLHPSQRYVVAVGLECGKICLYTWKKTDQVPEINDWTHCVETSQSQSHTLAIRKLCWKNCSGKTEQKEAEGAEWLHFASCGEDHTVKIHRVNKCAL

SEQ ID NO: 8897 - protein, 423 aa, Homo sapiens
MNRQPVKDRKAPWIPPNPTSPPASPKCAAWLKVKTSPRDATKEPLQQEDPQEESHLTGAVEHEAARLAWLDAETSKRLKELEELKAKEIDSMQKQRLDWLDAETSRRTKELNELKAEEMYRLQQLSVSATHLADKVEEAVLDRLKPLLVKAQRVNSTTEANIHLKDGSSVNTAKAQPAQEVAAVDFESNNIRQLDDFLEDCASELWAVTHAKILGSETLATVEDSKDSPDLEIMMRRMEEMEKYQESVRQRYNKIAYADPRLWMQEENNDQKISAISEKPLSPHPIRITKTVDRKDPAVNIMLERPCNGNSLDESVGTEEGSEKREAPLLSLAEDSQQKEGRAPLFVPPGMQHSIGDYCSRFEQYLRIISHEAVGSFNPWLIAESFSEELVDEALGAVAAELQDMCEDYAEAVFTSEFLEAAT

SEQ ID NO: 8898 - protein, 258 aa, Homo sapiens
MARLQEEHGDQLLSIRCQHQEQVEDLTASHDAALLEMENNHTVAITILQDDHDHKVQELMSTHELEKKELEENFEKLRLSLQDQVDTLTFQSQSLRDRARRFEEALRKNTEEQLEIALAPYQHLEEDMKSLKQVLEMKNQQIHEQEKKILELEKLAEKNIILEEKIQVLQQQNEDLKARIDQNTVVTRQLSEENANLQEYVEKETQEKKRLSRTNEELLWKLQTGDPTSPIKLSPTSPVYRGSSSGPSSPARVSTTPR

SEQ ID NO: 8899 - protein, 350 aa, Homo sapiens
MCPTTTWPRGRRWSRNLRDTQAVRHYKIWRRAGGRLHLNEAVSFLSLPELVNYHRAQSLSHGLRLAAPCRKHEPEPLPHWDDWERPREEFTLCRKLGSGYFGEVFEGLWKDRVQVAIKVISRDNLLHQQMLQSEIQAMKKLRHKHILALYAVVSVGDPVYIITELMAKGSLLELLRDSDEKVLPVSELLDIAWQVAEGMCYLESQNYIHRDLAARNILVGENTLCKVGDFGLARLIKEDVYLSHDHNIPYKWTAPEALSRGHYSTKSDVWSFGILLHEMFSRGQVPYPGMSNHEAFLRVDAGYRMPCPLECPPSVHKLMLTCWCRDPEQRPCFKALRERLSSFTSYENPT

SEQ ID NO: 8900 - protein, 1159 aa, Homo sapiens
MVSSSPSTPSNIPQKPSQPAAKEPSATPPISNLTKTASESISNLSEAGSIKKGERELKIGDRVLVGGTKAGVVRFLGETDFAKGEWCGVELDEPLGKNDGAVAGTRYFQCQPKYGLFAPVHKVTKIGFPSTTPAKAKANAVRRVMATTSASLKRSPSASSLSSMSSVASSVSSRPSRTGLLTETSSRYARKISGTTALQEALKEKQQHIEQLLAERDLERAEVAKATSHVGEIEQELALARDGHDQHVLELEAKMDQLRTMVEAADREKVELLNQLEEEKRKVEDLQFRVEEESITKGDLETQTKLEHARIKELEQSLLFEKTKADKLQRELEDTRVATVSEKSRIMELEKDLALRVQEVAELRRRLESNKPAGDVDMSLSLLQEISSLQEKLEVTRTDHQREITSLKEHFGAREETHQKEIKALYTATEKLSKENESLKSKLEHANKENSDVIALWKSKLETAIASHQQAMEELKVSFSKGLGTETAEFAELKTQIEKMRLDYQHEIENLQNQQDSERAAHAKEMEALRAKLMKVIKEKENSLEAIRSKLDKAEDQHLVEMEDTLNKLQEAEIKKEKFAEASEEAVSVQRSMQETVNKLHQKEEQFNMLSSDLEKLRENLADMEAKFREKDEREEQLIKAKEKLENDIAEIMKMSGDNSSQLTKMNDELRLKERDVEELQLKLTKANENASFLQKSIEDMTVKAEQSQQEAAKKHEEEKKELERKLSDLEKKMETSHNQCQELKARYERATSETKTKHEEILQNLQKTLLDTEDKLKGAREENSGLLQELEELRKQADKAKAAQTAEDAMQIMEQMTKEKTETLASLEDTKQTNAKLQNELDTLKENNLKNVEELNKSKELLTVENQKMEEFRKEIETLKQAAAQKSQQLSALQEENVKLAEELGRSRDEVTSHQKLEEERSVLNNQLLEMKKRESKFIKDADEEKASLQKSISITSALLTEKDAELEKLRNEVTVLRGENASAKSLHSVVQTLESDKVKLELKVKNLELQLKENKRQLSSSSGNTDTQADEDERAQESQNQIDFLNSVIVDLQRKNQDLKMKVEMMSEAALNGNGDDLNNYDSDDQEKQSKKKPRLFCDICDCFDLHDTEDCPTQAQMSEDPPHSTHHGSRGEERPYCEICEMFGHWATNCNDDETF

SEQ ID NO: 8901 - protein, 251 aa, Homo sapiens
MTTEQRRSLQAFQDYIRKTLDPTYILSYMAPWFREEEVQYIQAEKNNKGPMEAATLFLKFLLELQEEGWFRGFLDALDHAGYSGLYEAIESWDFKKIEKLEEYRLLLKRLQPEFKTRIIPTDIISDLSECLINQECEEILQICSTKGMMAGAEKLVECLLRSDKENWPKTLKLALEKERNKFSELWIVEKGIKDVETEDLEDKMETSDIQIFYQEDPECQNLSENSCPPSEVSDTNLYSPFKPIKKKKKKK

SEQ ID NO: 8902 - protein, 1062 aa, Homo sapiens; identical to SEQ ID NO: 7983

SEQ ID NO: 8903 - protein, 120 aa, Homo sapiens [sequence omitted]

SEQ ID NO: 8904 - protein, 311 aa, Homo sapiens
MYHLDNHPEKQFSTDVLKQAIELSPDNQYVKVLLGLKLQKMNKEAEGEQFVEEALEKSPCQTDVLRSAAKFYRRKGDLDKAIELFQRVLESTPNNGYLYHQIGCCYKAKVRQMQNTGESEASGNKEMIEALKQYAMDYSNKALEKGLNPLNAYSDLAEFLETECYQTPFNKEVPDAEKQQSHQRYCNLQKYNGKSEDTAVQHGLEGLSISKKSTDKEEIKDQPQNVSENLLPQNAPNYWYLQGLIHKQNGDLLQAAKCYEKELGRLLRDAPSGIGSIFLSASELEDGSEEMGQGAVSSSPRELLSNSEQLN

SEQ ID NO: 8905 - protein, 1088 aa, Homo sapiens
MYGSARSVGKVEPSSQSPGRSPRLPRSPRLGHRRTNSTGGSSGSSVGGGSGKTLSMENIQSLNAAYATSGPMYLSDHENVGSETPKSTMTLGRSGGRLPYGVRMTAMGSSPNIASSGVASDTIAFGEHHLPPVSMASTVPHSLRQARDNTIMDLQTQLKEVLRENDLLRKDVEVKESKLSSSMNSIKTFWSPELKKERALRKDEASKITIWKEQYRVVQEENQHMQMTIQALQDELRIQRDLNQLFQQDSSSRTGEPCVAELTEENFQRLHAEHERQAKELFLLRKTLEEMELRIETQKQTLNARDESIKKLLEMLQSKGLSAKATEEDHERTRRLAEAEMHVHHLESLLEQKEKENSMLREEMHRRFENAPDSAKTKALQTVIEMKDSKISSMERGLRDLEEEIQMLKSNGALSTEEREEEMKQMEVYRSHSKFMKNKIGQVKQELSRKDTELLALQTKLETLTNQFSDSKQHIEVLKESLTAKEQRAAILQTEVDALRLRLEEKETMLNKKTKQIQDMAEEKGTQAGEIHDLKDMLDVKERKVNVLQKKIENLQEQLRDKEKQMSSLKERVKSLQADTTNTDTALTTLEEALAEKERTIERLKEQRDRDEREKQEEIDNYKKDLKDLKEKVSLLQGDLSEKEASLLDLKEHASSLASSGLKKDSRLKTLEIALEQKKEECLKMESQLKKAHEAALEARASPEMSDRIQHLEREITRYKDESSKAQAEVDRLLEILKEVENEKNDKDKKIAELERQVKDQNKKVANLKHKEQVEKKKSAQMLEEARRREDNLNDSSQQLQDSLRKKDDRIEELEEALRESVQITAEREMVLAQEESARTNAEKQVEELLMAMEKVKQELESMKAKLSSTQQSLAEKETHLTNLRAERRKHLEEVLEMKQEALLAAISEKDANIALLELSSSKKKTQEEVAALKREKDRLVQQLKQQTQNRMKLMADNYEDDHFKSSHSNQTNHKPSPDQIIQPLLELDQNRSKLKLYIGHLTTLCHDRDPLILRGLTPPASYNLDDDQAAWENELQKMTRGQLQDELEKGERDNAELQEFANAILQQIADHCPDILEQVVNALEESS

SEQ ID NO: 8906 - protein, 494 aa, Homo sapiens
MKLVNLYKGAVLYLLRGRKTFLIPVLFNNYITAALKLLEKLYKVNLKVKHVEYDTFYIPEISNLVDIQEDYLMWFLHQAGMKARPSIIQDTVTLCSYPFIFDAQAKTKMLQTDAELQMQVAVNGANLQNVFMLLTLEPLLARSPFLVLHVRRNNLVGDALRELSIHSDIDLKKPLKVIFDGEEAVDAGGVTKEFFLLLLKELLNPIYGMFTYYQDSNLLWFSDTCFVEHNWFHLIGITCGLAIYNSTVVDLHFPLALYKKLLNVKPGLEDLKELSPTEGRSLQELLDYPGEDVEETFCLNFTICRESYGVIEQKKLIPGGDNVTVCKDNRQEFVDAYVNYVFQISVHEWYTAFSSGFLKVCGGKVLELFQPSELRAMMVGNSNYNWEELEETAIYKGDYSATHPTVKLFWETFHEFPLEKKKKFLLFLTGSDRIPIYGMASLQIVIQSTASGEEYLPVAHTCYNLLDLPKYSSKEILSARLTQALDNYEGFSLA

SEQ ID NO: 8907 - protein, 789 aa, Homo sapiens
MCPSSQSPRPPLLRPPCSYREVPSSVQSPAQQQVPARPGAPSVQVPSPFLLQNQYEPVQPHWFYCKEVEYKQLWMPFSVFDSLNLEEIYNSVQPDPESVVLGTDGGRYDVYLYDRIRKAAYWEEEPAEVRRCTWFYKGDTDSRFIPYTEEFSEKLEAEYKKAVTTNQWHRRLEFPSGETIVMHNPKVIVQFQPSSVPDEWGTTQDGQTRPRVVKRGIDDNLDEIPDGEMPQVDHLVFVVHGIGPVCDLRFRSIIECVDDFRVVSLKLLRTHFKKSLDDGKVSRVEFLPVHWHSSLGGDATGVDRNIKKITLPSIGRFRHFTNETLLDILFYNSPTYCQTIVEKVGMEINHLHALFMSRNPDFKGGVSVAGHSLGSLILFDILSNQKDLNLSKCPGPLAVANGVVKQLHFQEKQMPEEPKLTLDESYDLVVENKEVLTLQETLEALSLSEYFSTFEKEKIDMESLLMCTVDDLKEMGIPLGPRKKIANFVEHKAAKLKKAASEKKAVAATSTKGQEQSAQKTKDMASLPSESNEPKRKLPVGACVSSVCVNYESFEVGAGQVSVAYNSLDFEPEIFFALGSPIAMFLTIRGVDRIDENYSLPTCKGFFNIYHPLDPVAYRLEPMIVPDLDLKAVLIPHHKGRKRLHLELKESLSRMGSDLKQGFISSLKSAWQTLNEFARAHTSSTQLQEELEKVANQIKEEEEKQVVEAEKVVESPDFSKDEDYLGKVGMLNGGRRIDYVLQEKPIESFNEYLFALQSHLCYWESEDTALLLLKEIYRTMNISPEQPQH

SEQ ID NO: 8908 - protein, 275 aa, Homo sapiens; identical to SEQ ID NO: 4746

SEQ ID NO: 8909 - protein, 78 aa, Homo sapiens
MNGTLDHPDQPDLDAIKMFVGQVAAWSEKDLRELFEQYGAVYEINVLRDRSQNPPQSKGCCFVTFYTRKAALEAQNAL

SEQ ID NO: 8910 - protein, 245 aa, Homo sapiens
MVLLHVKRGDESQFLLQAPGSTELEELTVQVARVYNGRLKVQRLCSEMEELAEHGIFLPPNMQGLTDDQIEELKLKDEWGEKCVPSGGAVFKKDDIGRRNGQAPNEKMKQVLKKTIEEAKAIISKKQVEAGVCVTMEMVKDALDQLRGAVMIVYPMGLPPYDPIRMEFENKEDLSGTQAGLNVIKEAEAQLWWAAKELRRTKKLSDYVGKNEKTKIIAKIQQVSTFCFNVSVVFVISLQTDKNVQ

SEQ ID NO: 8911 - protein, 131 aa, Homo sapiens; identical to SEQ ID NO: 8865

SEQ ID NO: 8912 - protein, 838 aa, Homo sapiens; identical to SEQ ID NO: 5559

SEQ ID NO: 8913 - protein, 404 aa, Homo sapiens
MDFNMKKLASDAGIFFTRAVQFTEEKFGQAEKTELDAHFENLLARADSTKNWTEKILRQTEVLLQPNPSARVEEFLYEKLDRKVPSRVTNGELLAQYMADAASELGPTTPYGKTLIKVAEAEKQLGAAERDFIHTASISFLTPLRNFLEGDWKTISKERRLLQNRRLDLDACKARLKKAKAAEAKATAEGPTVPDFQETRPRNYILSASASALWNDEVDKAEQELRVAQTEFDRQAEVTRLLLEGISSTHVNHLRCLHEFVKSQTTYYAQCYRHMLDLQKQLGSSQGAIFPGTFVGTTEPASPPLSSTSPTTAAATMPVVPSVASLAPPGEASLCLEEVAPPASGTRKARVLYDYEAADSSELALLADELITVYSLPGMDPDWLIGERGNKKGKVPVTYLELLS

SEQ ID NO: 8914 - protein, 164 aa, Homo sapiens
MTCCQTSFCGYPSFSISGTCGSSCCQPSCCETSCCQPRSCQTSFCGFPSFSTSGTCSSSCCQPSCCETSCCQPSCCQISSCGTGCGIGGGISYGQEGSSGAVSTRIRWCRPDSRVEGTYLPPCCVVSCTPPSCCQLHHAQASCCRPSYCGQSCCRPVCCCEPTC

SEQ ID NO: 8915 - protein, 281 aa, Homo sapiens
MLTKLQIKQMMEAATRQIEERKKQLSFISPPTPQPKTPSSSQPERLPIGNTIQPSQAATFMNDAIEKARKAAELQARIQAQLALKPGLIGNANMVGLANLHAMGIAPPKVELKDQTKPTPLILDEQGRTVDATGKEIELTHRMPTLKANIRAVKREQFKQQLKEKPSEDMESNTFFDPRVSIAPSQRQRRTFKFHDKGKFEKIAQRLRTKAQLEKLQAEISQAARKTGIHTSTRLALIAPKKELKEGDIPEIEWWDSYIIPNGFDLGKSQERRLFWNHKSC

SEQ ID NO: 8916 - protein, 230 aa, Homo sapiens
MRGHESSVFSISVHASGKYAITTSSDTAQLWDLDTFQRKRKLNIRQSVGIQKVFFLPLSNTILSCFKDNSIFAWECDTLFCKYQLPAPPESSSILYKVFAVTRDGRILAAGGKSNHLHLWCLEARQLFRIIQMPTKVRAIRHLEFLPDSFDAGSNQVLGVLSQDGIMRFINMQTCKLLFEIGSLDEGISSSAISPHGRYIASIMENGSLNIYSVQALTQEINKEEVRAQN

SEQ ID NO: 8917 - protein, 403 aa, Homo sapiens
MDSTMDDAVAGDFALINKLDIQCDLKTLSDDIKESLESEGKNSKKEEPQELLQSQDFVGEKLGSGEPSHSVKVHTVPKPGKGADLSKPPCRKAKEIRKERKRLKLMQQNPAGELEGFQAQGHPPSLFPPKAKSNQPKSLEDLIFESLPENASHKLEVRVVRSSPPSSQFKATLLESYQVYKRYQMVIHKNPPDTPTESQFTRFLCSSPLEAETPPNGPDCGYGSFHQQYWLDGKIIAVGVIDILPNCVSSVYLYYDPDYSFLSLGVYSALREIAFTRQLHEKTSQLSYYYMGFYIHSCPKMKYKGQYRPSDLLCPETYVWVPIEQCLPSLENSKYCRFNQDPEAVDEDRSTEPDRLQVFHKRAIMPYGVYKKQQKDPSEEAAVLQYASLVGQKCSERMLLFRN

SEQ ID NO: 8918 - protein, 302 aa, Homo sapiens
MPLYEGLGSGGEKTAVVIDLGEAFTKCGFAGETGPRCIIPSVIKRAGMPKPVRVVQYNINTEELYSYLKEFIHILYFRHLLVNPRDRRVVIIESVLCPSHFRETLTRVLFKYFEVPSVLLAPSHLMALLTLGINSAMVLDCGYRESLVLPIYEGIPVLNCWGALPLGGKALHKELETQLLEQCTVDTSVAKEQSLPSVMGSVPEGVLEDIKARTCFVSDLKRGLKIQAAKFNIDGNNERPSPPPNVDYPLDGEKILHILGSIRDSVVEILFEQDNEEQSVATLILDSLIQCCSCCPGWSAMA

SEQ ID NO: 8919 - protein, 125 aa, Homo sapiens
MSSCVSSQPSSNRAAPQDELGGRGSSSSESQKPCEALRGLSSLSIHLGMESFIVVTECEPGCAVDLGLARDRPLEADGQEVPLDTSGSQARPHLSGRKLSLQERSQGGLAAGGSLDMNGRCICPS

SEQ ID NO: 8920 - protein, 386 aa, Homo sapiens
MADSLESTPLPSPEDRLAKLHPSKELLEYYQKKMAECEAENEDLLKKLELYKEACEGQHKLECDLQQREEEIAELQKALSDMQVCLFQEREHVLRLYSENDRLRIRELEDKKKIQNLLALVGTDAGEVTYFCKEPPHKVTILQKTIQAVGECEQSESSAFKADPKISKRRPSRERKESSEHYQRDIQTLILQVEALQAQLGEQTKLSREQIEGLIEDRRIHLEEIQVQHQRNQNKIKELTKNLHHTQELLYESTKDFLQLRSENQNKEKSWMLEKDNLMSKIKQYRVQCKKKEDKIGKVLPVMHESHHAQSEYIKSLKDKLVQEKKLSNMYQEQCISLEEELARIREEEGMRREIFKDRTNKMGKRLQIMTKRYEALERRRILEVE

SEQ ID NO: 8921 - protein, 332 aa, Homo sapiens; identical to SEQ ID NO: 8670

SEQ ID NO: 8922 - protein, 507 aa, Homo sapiens
MEEVERQVLPDPEVLEAVGDRQDGLREQLQAPVPPDSVPSLQNMGLLLDKLAKENQDIRLLQAQLQAQKEELQSLMHQPKGLEEENAQLRGALQQGEAFQRALESELQQLRARLQGLEADCVRGPDGVCLSGGRGPQGDKAIREQGPREQEPELSFLKQKEQLEAEAQALRQELERQRRLLGSVQQDLERSLQDASRGDPAHAGLAELGHRLAQKLQGLENWGQDPGVSANASKAWHQKSHFQNSREWSGKEKWWDGQRDRKAEHWKHKKEESGRERKKNWGGQEDREPAGRWKEGRPRVEESGSKKEGKRQGPKEPPRKSGSFHSSGEKQKQPRWREGTKDSHDPLPSWAELLRPKYRAPQGCSGVDECARQEGLTFFGTELAPVRQQELASLLRTYLARLPWAGQLTKELPLSPAFFGEDGIFRHDRLRFRDFVDALEDSLEEVAVQQTGDDDEVDDFEDFIFSHFFGDKALKKRSGKKDKHSQSPRAAGPREGHSHSHHHHHRG

SEQ ID NO: 8923 - protein, 823 aa, Homo sapiens
MTLLSSQSSSLVAPSGSVSAENPEQRMLEKRAKVIEELLQTERDYIRDLEMCIERIMVPMQQAQVPNIDFEGLFGNMQMVIKVSKQLLAALEISDAVGPVFLGHRDELEGTYKIYCQNHDEAIALLEIYEKDEKIQKHLQDSLADLKSLYNEWGCTNYINLGSFLIKPVQRVMRYPLLLMELLNSTPESHPDKVPLTNAVLAVKEINVNINEYKRRKDLVLKYRKGDEDSLMEKISKLNIHSIIKKSNRVSSHLKHLTGFAPQIKDEVFEETEKNFRMQERLIKSFIRDLSLYLQHIRESACVKVVAAVSMWDVCMERGHRDLEQFERVHRYISDQLFTNFKERTERLVISPLNQLLSMFTGPHKLVQKRFDKLLDFYNCTERAEKLKDKKTLEELQSARNNYEALNAQLLDELPKFHQYAQGLFTNCVHGYAEAHCDFVHQALEQLKPLLSLLKVAGREGNLIAIFHEEHSRVLQQLQVFTFFPESLPATKKPFERKTIDRQSARKPLLGLPSYMLQSEELRASLLARYPPEKLFQAERNFNAAQDLDVSLLEGDLVGVIKKKDPMGSQNRWLIDNGVTKGFVYSSFLKPYNPRRSHSDASVGSHSSTESEHGSSSPRFPRQNSGSTLTFNPSSMAVSFTSGSCQKQPQDASPPPKECDQGTLSASLNPSNSESSPSRCPSDPDSTSQPRSGDSADVARDVKQPTATPRSYRNFRHPEIVGYSVPGRNGQSQDLVKGCARTAQAPEDRSTEPDGSEAEGNQVYFAVYTFKARNPNELSVSANQKLKILEFKDVTGNTEWWLAEVNGKKGYVPSNYIRKTEYT

SEQ ID NO: 8924 - protein, 162 aa, Homo sapiens
  VARIANT 1: note = X can be any amino acid
XDKFRASPDCITILCKPNGQAIAWYTPIHWKQAWEKLDADVEFNRCSVVSPTFRKRVFQWTASTATITKEKQDQPKKDISNYQVEQAQVLLKREKEIPPTVFPNRSPWCQNPYVSAHPYCPLIEPHNTSTAGGRLDRQAARSTRPNRASGSKKKKTSESQKQ

SEQ ID NO: 8925 - protein, 256 aa, Homo sapiens; identical to SEQ ID NO: 5641

SEQ ID NO: 8926 - protein, 930 aa, Homo sapiens
MSEFRIHHDVNELLSLLRVHGGDGAEVYIDLLQKNRTPYVTTTVSAHSAKVKIAEFSRTPEDFLKKYDELKSKNTRNLDPLVYLLSKLTEDKETLQYLQQNAKERAELAAAAVGSSTTSINVPAAASKISMQELEELRKQLGSVATGSTLQQSLELKRKMLRDKQNKKNSGQHLPIFPAWVYERPALIGDFLIGAGISTDTALPIVLLRWNLALSPRLKCSGVISAHCNLHLPGTLPLASQESAVVEDLLYVLVGVDGRYVSAQPLAGRQSRTFLVDPNLDLSIRELVHRILPVAASYSAVTRFIEEKSSFEYGQVNHALAAAMRTLVKEHLILVSQLEQLHRQGLLSLQKLWFYIQPAMRTMDILASLATSVDKGECLGGSTLSLLHDRSFSYTGDSQAQELCLYLTKAASAPYFEVLEKWIYRGIIHDPYSEFMVEEHELRKERIQEDYNDKYWDQRYTIVQQQIPSFLQKMADKILSTGKYLNVVRECGHDVTCPVAKEIIYTLKERAYVEQIEKAFNYASKVLLDFLMEEKELVAHLRSIKRYFLMDQGDFFVHFMDLAEEELRKPVEDITPPRLEALLELALRMSTANTDPFKDDLKIDLMPHDLITQLLRVLAIETKQEKAMAHADPTELALSGLEAFSFDYIVKWPLSLIINRKALTRYQMLFRHMFYCKHVERQLCSVWISNKTAKQHSLHSAQWFAGAFTLRQRMLNFVQNIQYYMMFEVMEPTWHILEKNLKSASNIDDVLGHHTGFLDTCLKDCMLTNPELLKVFSKLMSVCVMFTNCMQKFTQSMKLDGELGGQTLEHSTVLGLPAGAEERARKELARKHLAEHADTVQLVSGFEATINKFDKNFSAHLLDLLARLSIYSTSDCEHGMASVISRLDFNGFYTERLERLSAERSQKATPQVPVLRGPPAPAPRVAVTAQ

SEQ ID NO: 8927 - protein, 42 aa, Homo sapiens
MCLLPIRVKEAEEVCRQKKGKSLYKIKPRHDSGIKAKISMKT

SEQ ID NO: 8928 - protein, 151 aa, Homo sapiens
MDCREMDLYEDYQSPFDFDAGVNKSYLYLSPSGNSSPPGSPTLQKFGLLRTDPVPEEGEDVAATISATETLSEEEQEELRRELAKVEEEIQTLSQVLAAKEKHLAEIKRKLGINSLQELKQNIAKGWQDVTATSARSKLLAAETELLCLLY

SEQ ID NO: 8929 - protein, 208 aa, Homo sapiens; identical to SEQ ID NO: 5090

SEQ ID NO: 8930 - protein, 524 aa, Homo sapiens
MKRSSVSSGGAGRLSMQELRSQDVNKQGLYTPQTKEKPTFGKLSINKPTSERKVSLFGKRTSGHGSRNSQLGIFSSSEKIKDPRPLNDKAFIQQCIRQLCEFLTENGYAHNVSMKSLQAPSVKDFLKIFTFLYGFLCPSYELPDTKFEEEVPRIFKDLGYPFALSKSSMYTVGAPHTWPHIVAALVWLIDCIKIHTAMKESSPLFDDGQPWGEETEDGIMHNKLFLDYTIKCYESFMSGADSFDEMNAELQSKLKDLFNVDAFKLESLEAKNRALNEQIARLEQEREKEPNRLESLRKLKASLQGDVQKYQAYMSNLESHSAILDQKLNGLNEEIARVELECETIKQENTRLQNIIDNQKYSVADIERINHERNELQQTINKLTKDLEAEQQKLWNEELKYARGKEAIETQLAEYHKLARKLKLIPKGAENSKGYDFEIKFNPEAGANCLVKYRAQVYVPLKELLNETEEEINKALNKKMGLEDTLEQLNAMITESKRSVRTLKEEVQKLDDLYQQKIKKERKK

SEQ ID NO: 8931 - protein, 415 aa, Homo sapiens; identical to SEQ ID NO: 5668

SEQ ID NO: 8932 - protein, 503 aa, Homo sapiens
MASNHKSSAARPVSRGGVGLTGRPPSGIRPLSGNIRVATAMPPGTARPGSRGCPIGTGGVLSSQIKVAHRPVTQQGLTGMKTGTKGPQRQILDKSYYLGLLRSKISELTTEVNKLQKGIEMYNQENSVYLSYEKRAETLAVEIKELQGQLADYNMLVDKLNTNTEMEEVMNDYNMLKAQNDRETQSLDVIFTERQAKEKQIRSVEEEIEQEKQATDDIIKNMSFENQVKYLEMKTTNEKLLQELDTLQQQLDSQNMKKESLEAEIAHSQVKQEAVLLHEKLYELESHRDQMIAEDKSIGSPMEEREKLLKQIKDDNQEIASMERQLTDTKEKINQFIEEIRQLDMDLEEHQGEMNQKYKELKKREEHMDTFIETFEETKNQELKRKAQIEANIVALLEHCSRNINRIEQISSITNQELKMMQDDLNFKSTEVQKSQSTAQNLTSDIQRLQLDLQKMELLESKMTEEQHSLKSKIKQMTTDLEIYNDLPALKSSGEKKKKKKKK

SEQ ID NO: 8933 - protein, 486 aa, Homo sapiens; identical to SEQ ID NO: 5136

SEQ ID NO: 8934 - protein, 336 aa, Homo sapiens
MCTMHKDEKAKREVSSWTVEGDINTDPWAGYRYTGKLRPHYPLMPTRPVPSYIQRPDYADHPLGMSESEQALKGTSQIKLLSSEDIEGMRLVCRLAREVLDVAAGMIKPGVTTEEIDHAVHLACIARNCYPSPLNYYNFPKSCCTSVNEVICHGIPDRRPLQEGDIVNVDITLYRNGYHGDLNETFFVGEVDDGARKLVQTTYECLMQAIDAVKPGVRYRELGNIIQKHAQANGFSVVRSYCGHGIHKLFHTAPNVPHYAKNKAVGVMKSGHVFTIEPMICEGGWQDETWPDGWTAVTRDGKRSAQFEHTLLVTDTGCEILTRRLDSARPHFMSQF

SEQ ID NO: 8935 - protein, 1032 aa, Homo sapiens
MAGMIDRFSPANTGIRSWDVDPGVCNLDEQLKVFVSRHSATFSSIVKGQRSLHHRGDNLETLVLLNPSDKSLYDELRNLLLDPASHKLLVLAGPCLEETGELLLQTGGFSPHHFLQVLKDREIRDILATTPPPVQPPILTITCPTFGDWAQLAPAVPGLQGALRLQLRLNPPAQLPNSEGLCEFLEYVAESLEPPSPFELLEPPTSGGFLRLGRPCCYIFPGGLGDAAFFAVNGFTVLVNGGSNPKSSFWKLVRHLDRVDAVLVTHPGADSLPGLNSLLRRKLAERSEVAAGGGSWDDRLRRLISPNLGVVFFNACEAASRLARGEDEAELALSLLAQLGITPLPLSRGPVPAKPTVLFEKMGVGRLDMYVLHPPSAGAERTLASVCALLVWHPAGPGEKVVRVLFPGCTPPACLLDGLVRLQHLRFLREPVVTPQDLEGPGRAESKESVGSRDSSKREGLLATHPRPGQERPGVARKEPARAEAPRKTEKEAKTPRELKKDPKPSVSRTQPREVRRAASSVPNLKKTNAQAAPKPRKAPSTSHSGFPPVANGPRSPPSLRCGEASPPSAACGSPASQLVATPSLELGPIPAGEEKALELPLAASSIPRAAPSPESHRSPAEGSERLSLSPLRGGEAGPDASPTVTTPTVTTPSLPAEVGSPHSTEVDESLSVSFEQVLPPSAPTSEAGLSLPLRGPRARRSASPHDVDLCLVSPCEFEHRKAVPMAPAPASPGSSNDSSARSQERAGGLGAEETPPTSVSESLPTLSDSDPVPLAPGAADSDEDTEGFGVPRHDPLPDPLKVPPPLPDPSSICMVDPEMLPPKTARQTENVSRTRKPLARPNSRAAAPKATPVAAAKTKGLAGGDRASRPLSARSEPSEKGGRAPLSRKSSTPKTATRGPSGSASSRPGVSATPPKSPVYLDLAYLPSGSSAHLVDEEFFQRVRALCYVISGQDQRKEEGMRAVLDALLASKQHWDRDLQVTLIPTFDSVAMHTWYAETHARHQALGITVLGSNSMVSMQDDAFPACKVEF

SEQ ID NO: 8936 - protein, 740 aa, Homo sapiens
MRDLEGYRETRYQLLQLRPAQRASWIGYAIAYHLLEDYEMAAKILEEFRKTQQTSPDKVDYEYSELLLYQNQVLREAGLYREALEHLCTYEKQICDKLAVEETKGELLLQLCRLEDAADVYRGLQERNPENWAYYKGLEKALKPANMLERLKIYEEAWTKYPRGLVPRRLPLNFLSGEKFKECLDKFLRMNFSKGCPPVFNTLRSLYKDKEKVAIIEELVVGYETSLKSCRLFNPNDDGKEEPPTTLLWVQYYLAQHYDKIGQPSIALEYINTAIESTPTLIELFLVKAKIYKHAGNIKEAARWMDEAQALDTADRFINSKCAKYMLKANLIKEAEEMCSKFTREGTSAVENLNEMQCMWFQTECAQAYKAMNKFGEALKKCHEIERHFIEITDDQFDFHTYCMRKITLRSYVDLLKLEDVLRQHPFYFKAARIAIEIYLKLHDNPLTDENKEHEADTANMSDKELKKLRNKQRRAQKKAQIEEEKKNAEKEKQQRNQKKKKDDDDEEIGGPKEELIPEKLAKVETPLEEAIKFLTPLKNLVKNKIETHLFAFEIYFRKEKFLLMLQSVKRAFAIDSSHPWLHECMIRLFNTAVCESKDLSDTVRTVLKQEMNRLFGATNPKNFNETFLKRNSDSLPHRLSAAKMVYYLDPSSQKRAIELATTLDESLTNRNLQTCMEVLEALYDGSLGDCKEAAEIYRANCHKLFPYALAFMPPGYEEDMKITVNGDSSAEAEELANEI

SEQ ID NO: 8937 - protein, 60 aa, Homo sapiens
MSCTIEKALADAKALVERLRDHDDAAESLIEQTTALNKRVEAMKQYQEEIQELNEVARHR

SEQ ID NO: 8938 - protein, 472 aa, Homo sapiens
MGKEQELLEAARTGHLPAVEKLLSGKRLSSGFGGGGGGGSGGGGGGSGGGGGGLGSSSHPLSSLLSMWRGPNVNCVDSTGYTPLHHAALNGHKDVVEVLLRNDALTNVADSKGCYPLHLAAWKGDAQIVRLLIHQGPSHTRVNEQNNDNETALHCAAQYGHTEVVKVLLEELTDPTMRNNKFETPLDLAALYGRLEVVKMLLNAHPNLLSCNTKKHTPLHLAARNGHKAVVQVLLDAGMDSNYQTEMGSALHEAALFGKTDVVQILLAAGTDVNIKDNHGLTALDTVRELPSQKSQQIAALIEDHMTGKRSTKEVDKTPPPQPPLISSMDSISQKSQGDVEKAVTELIIDFDANAEEEGPYEALYNAISCHSLDSMASGRSSDQDSTNKEAEAAGVKPAGVRPRERPPPPAKPPPDEEEEDHIDKKYFPLTASEVLSMRPRIHGSAAREEDEHPYELLLTAETKKKKKKKKK

SEQ ID NO: 8939 - protein, 463 aa, Homo sapiens
MSGGTPYIGSKISLISKAEIRYEGILYTIDTENSTVALAKVRSFGTEDRPTDRPIPPRDEVFEYIIFRGSDIKDLTVCEPPKPQCSLPQDPAIVQSSLGSSTSSFQSMGSYGPFGRMPTYSQFSPSSLVGQQFGAVGVAGSSLTSFGTETSNSGTLPQSSAVGSAFTQDTRSLKTQLSQGRSSPQLDPLRKSPTMEQAVQTASAHLPAPAAVGRRSPVSTRPLPSASQKAGENQEHRRAEVHKVSRPENEQLRNDNKRQVAPGAPSAPRRGRGGHRGGRGRFGIRRDGPMKFEKDFDFESANAQFNKEEIDREFHNKLKLKEDKLEKQEKPVNGEDKGDSGVDTQNSEGNADEEDPLGPNCYYDKTKSFFDNISCDDNRERRPTWAEERRLNAETFGIPLRPNRGRGGYRGRGGLGFRGGRGRGGGRGGTFTAPRGFRGGFRGGRGGREFADFEYRKDNKVAA

SEQ ID NO: 8940 - protein, 428 aa, Homo sapiens [sequence omitted]

SEQ ID NO: 8941 - protein, 218 aa, Homo sapiens
MDAEHPELRSYAQSQGWWTGEGEFNFSEVFSPVEDHLDCGAGKDSLEKQEESITVQTMMNTLRDKASGVCIDSEFFLTTASGVSVLPQNRSSPCIHYFTGTPDPSRSIFKPFIFVDDVKLVPKTQSPCFGDDDPAKKEPRFQEKPDRRHELYKAHEWARAIIESDQEQGRKLRSTMLELEKQGLEAMEEILTSSEPLDPAEVGDLFYDCVDTEIKFFK

SEQ ID NO: 8942 - protein, 190 aa, Homo sapiens
MALLAEHLLKPLPADKQIETGPFLEAVSHLPPFFDCLGSPVFTPIKADISGNITKIKAVYDTNPAKFRTLQNILEVEKEIGLRFIQVFLQSICDGERDENHPNLIRVNATKAYEMALKKYHGWIVQKIFQAALYAAPYKSDFLKALSKGQNVTEEECLEKIRLFLVNYTATIDVIYEMYTQMNAELNYKV

SEQ ID NO: 8943 - protein, 253 aa, Homo sapiens
MSICSSLARKFPKLTIIGEEDLPSEEVDQELIEDSQWEEILKQPCPSQYSAIKEEDLVVWVDPLDGTKEYTEGLLDNVTVLIGIAYEGKAIAGVINQPYYNYEAGPDAVLGRTIWGVLGLGAFGFQLKEVPAGKHIITTTRSHSNKLVTDCVAAMNPDAVLRVGGAGNKIIQLIEGKASAYVFASPGCKKWDTCAPEVILHAVGGKLTDIHGNVLQYHKDVKHMNSAGVLATLRNYDYYASRVPESIKNALVP

SEQ ID NO: 8944 - protein, 529 aa, Homo sapiens
MGAYLSQPNTVKCSGDGVGVSMEDAHNCIPELDSETAMFSVYDGHGGEEVALYCAKYLPDIIKDQKAYKEGKLQKALEDAFLAIDAKLTTEEVIKELAQIAGRPTEDEDEKEKVADEDDVDNEEAALLHEEATMTIEELLTRYGQNCHKGPPHSKSGGGTGEEPGSQGLNGEAGPEDSTRETPSQENGPTAKAYTGFSSNSERGTEAGQVGEPGIPTGEAGPSCSSASDKLPRVAKSKFFEDSEDESDEAEEEEEDSEECSEEEDGYSSEEAENEEDEDDTEEAEEDDEEEEEEMMVPGMEGKEEPGSDSGTTAVVALIRGKQLIVANAGDSRCVVSEAGKALDMSYDHKPEDEVELARIKNAGGKVTMDGRVNGGLNLSRAIGDHFYKRNKNLPPEEQMISALPDIKVLTLTDDHEFMVIACDGIWNVMSSQEVVDFIQSKISQRDENGELRLLSSIVEELLDQCLAPDTSGDGTGCDNMTCIIICFKPRNTAELQPESGKRKLEEVLSTEGAEENGNSDKKKKAKRD

SEQ ID NO: 8945 - protein, 430 aa, Homo sapiens
MTFELYDEWIQASNVQEQDKKLQALWNACEKLPKANHNNIRYLIKFLSKLSEYQDVNKMTPSNMAIVLGPNLLWPQAEGNITEMMTTVSLQIVGIIEPIIQHADWFFPGEIEFNITGNYGSPVHVNHNANYSSMPSPDMDPADRRQPEQARRPLSVATDNMMLEFYKKDGMGVRVMDTNWVARRGSSAGRKVSCAPPSMQPPAPPAELAAPLPSPLPEQPLDSPAAPALSPSGLGLQPGPERTSTTKSKELSPGSAQKGSPGSSQGTACAGTQPGAQPGAQPGASPSPSQPPADQSPHTLRKVSKKLAPIPPKVPFGQPGAMADQSAGQPSPVSLSPTPPSTPSPYGLSYPQGYSLASGQLSPAAAPPLASPSVFTSTLSKSRPTPKPRQRPTLPPPQPPTVNLSASSPQSTEAPMLDGMSPGESMSTAV

SEQ ID NO: 8946 - protein, 281 aa, Homo sapiens
MPGPRRLRSPGGSGCSSRGSGPRLSTRRWRPCCYCGGSGVWLLRTPPSPSAWPARRCPRHRFEFCEPAFVVGNCLQIASDSHQYDRIYCGAGVQKDHENYMKILLKVGGILVMPIEDQLTQIMRTGQNTWESKNILAVSFAPLVQPSKNDNGKPDSVGLPPCAVRNLQDLARIYIRRTLRNFINDEMQAKGIPQRAPPKRKRKRVKQRINTYVFVGNQLIPQPLDSEEDEKMEEDNKEEEEKDHNEAMKPEEPPQNLLREKIMKLPLPESLKAYLTYFRDK

SEQ ID NO: 8947 - protein, 416 aa, Homo sapiens
MSPAMLSVLVKMMLAQAQESVFEKISLPGIRNEFFMLVKVAQEAAKVGEVYQQLHAAMSQAPVKENIPYSWASLACVKAHHYAALAHYFTAILLIDHQVKPGTDLDHQEKCLSQLYDHMPEGLTPLATLKNDQQRRQLGKSHLRRAMAHHEESVREASLCKKLRSIEVLQKVLCAAQERSRLTYAQHQEEDDLLNLIDAPSVVAKTEQEVDIILPQFSKLTVTDFFQKLGPLSVFSANKRWTPPRSIRFTAEEGDLGFTLRGNAPVQVHFLDPYCSASVAGAREGDYIVSIQLVDCKWLTLSEVMKLLKSFGEDEIEMKVVSLLDSTSSMHNKSATYSVGMQKTYSMICLAIDDDDKTDKTKKISKKLSFLSWGTNKNRQKSASTLCLPSVGAARPQVKKKLPSPFSLLNSDSSWY

SEQ ID NO: 8948 - protein, 2066 aa, Homo sapiens
MCSTPGMPAPGASLALRVSFVDVHPDVIPVQLWGLVGERRGEYLRLSREIQEAAATRGQWALGSASASPGELCLVQVGLLWHRCRVVSRQAQESRVFLLDEGRTITAGAGSLAPGRREFFNLPSEVLGCVLAGLVPAGCGAGSGEPPQHWPADAVDFLSNLQGKEVHGCVLDVLLLHRLVLLEVPDVFQQMRELGLARRVPDSLFRSLLERYLTAATASVGSGVPVLSRVPLKQKQPGLDYFYPQLQLGVTEAVVITQVCHPHRIHCQLRSVSQEIHRLSESMAQVYRGSTGTGDENSTSATWEEREESPDKPGSPCASCGLDGHWYRALLLETFRPQRCAQVLHVDYGRKELVSCSSLRYLLPEYFRMPVVTYPCALYGLWDGGRGWSRSQVGDLKTLILGKAVNAKIEFYCSFEHVYYVSLYGEDGINLNRVFGVQSCCLADRVLQSQATEEEEPETSQSQSPAEEVDEEISLPALRSIRLKMNAFYDAQVEFVKNPSEFWIRLRKHNVTFSKLMRRMCGFYSSASKLDGVVLKPEPDDLCCVKWKENGYYRAIVTKLDDKSVDVFLVDRGNSENVDWYDVRMLLPQFRQLPILAVKCTLADIWPLGKTWSQEAVSFFKKTVLHKELVIHILDKQDHQYVIEILDESRTGEENISKVIAQAGYAKYQEFETKENILVNAHSPGHVSNHFTTESNKIPFAKTGEGEQKAKRENKTTSVSKALSDTTVVTNGSTELVVQEKVKRASVYFPLMQNCLEIKPGSSSKGELEVGSTVEVRVSYVENPGYFWCQLTRNIQGLKTLMSDIQYYCKNTAAPHQRNTLACLAKRTVNRQWSRALISGIQSVEHVNVTFVDYGDREMVSVKNIYSISEEFLKVKAQAFRCSLYNLIQPVGQNPFVWDVKAIQAFNEFIDNAWQKNLELKCTIFALASINEELFNIVDLLTPFQSACHFLVEKRLARPVKLQKPLESSVQLHSYFYSTHDMKIGSEELVYITHIDDPWTFYCQLARNANILEQLSCSITQLSKVLLNLKTSPLNPGTLCLAKYTDGNWYRGIVIEKEPKKVFFVDFGNIYVVTSDDLLPIPSDAYDVLLLPMQAVRCSLSDIPDHIPEEVVVWFQETILDKSLKALVVAKDPDGTLIIELYGDNIQISASINKKLGLLSYKDRIRKKESEVLCSTTETLEEKNENMKLPCTEYLSKSVGYKLPNKEILEESYKPQINSSYKELKLLQSLTKTNLVTQYQDSVGNKNSQVFPLTTEKKEEISAETPLKTARVEATLSERKIGDSCDKDLPLKFCEFPQKTIMPGFKTTVYVSHINDLSDFYVQLIEDEAEISHLSERLNSVKTRPEYYVGPPLQRGDMICAVFPEDNLWYRAVIKEQQPNDLLSVQFIDYGNVSVVHTNKIGRLDLVNAILPGLCIHCSLQGFEVPDNKNSKKMMHYFSQRTSEAAIRCEFVKFQDRWEVILADEHGIIADDMISRYALSEKSQVELSTQVIKSASSKSVNKSDIDTSVFLNWYNPEKKMIRAYATVIDGPEYFWCQFADTEKLQCLEVEVQTAGEQVADRRNCIPCPYIGDPCIVRYREDGHYYRALITNICEDYLVSVRLVDFGNIEDCVDPKALWAIPSELLSVPMQAFPCCLSGFNISEGLCSQEGNDYFYEIITEDVLEITILEIRRDVCDIPLAIVDLKSKGKSINEKMEKYSKTGIKSALPYENIDSEIKQTLGSYNLDVGLKKLSNKAVQNKIYMEQQTDELAEITEKDVNIIGTKPSNFRDPKTDNICEGFENPCKDKIDTEELEGELECHLVDKAEFDDKYLITGFNTLLPHANETKEILELNSLEVPLSPDDESKEFLELESIELQNSLVVDEEKGELSPVPPNVPLSQECVTKGAMELFTLQLPLSCEAEKQPELELPTAQLPLDDKMDPLSLGVSQKAQESMCTEDMRKSSCVESFDDQRRMSLHLHGADCDPKTQNEMNICEEEFVEYKNRDAISALMPLFSEEESSDGSKHNNGLPDHISAQLQNTYTLKAFTVGSKCVVWSSLRNTWSKCEILETAEEGTRKRGLEVMEI

SEQ ID NO: 8949 - protein, 87 aa, Homo sapiens
MSSCVSSQPSSNRAAPQDELGGRGSSSSESQKPCEALRGLSSLSIHLGMESFIVVTECEPGCAVDLGLARDRPLEADGQEVPLDTSG

SEQ ID NO: 8950 - protein, 822 aa, Homo sapiens
MAAEGDPEWGPTPPSTSATTAARRAVNKVVYDDHESEEEEEEEDMVSEEEEEEDGDAEETQDSEDDEEDEMEEDDDDSDYPEEMEDDDDDASYCTESSFRSHSTYSSTPGRRKPRVHRPRSPILEEKDIPPLEFPKSSEDLMVPNEHIMNVIAIYEVLRNFGTVLRLSPFRFEDFCAALVSQEQCTLMAEMHVVLLKAVLREEDTSNTTFGPADLKDSVNSTLYFIDGMTWPEVLRVYCESDKEYHHVLPYQEAEDYPYGPVENKIKVLQFLVDQFLTTNIAREELMSEGVIQYDDHCRVCHKLGDLLCCETCSAVYHLECVKPPLEEVPEDEWQCEVCVAHKVPGVTDCVAEIQKNKPYIRHEPIGYDRSRRKYWFLNRRLIIEEDTENENEKKIWYYSTKVQLAELIDCLDKDYWEAELCKILEEMREEIHRHMDITEDLTNKARGSNKSFLAAANEEILESIRAKKGDIDNVKSPEETEKDKNETENDSKDAEKNREEFEDQSLEKDSDDKTPDDDPEQGKSEEPTEVGDKGNSVSANLGDNTTNATSEETSPSEGRSPVGCLSETPDSSNMAEKKVASELPQDVPEEPNKTCESSNTSATTTSIQPNLENSNSSSELNSSQSESAKAADDPENGERESHTPVSIQEEIVGDFKSEKSNGELSESPGAGKGASGSTRIITRLRNPDSKLSQLKSQQVAAAAHEANKLFKEGKEVLVVNSQGEISRLSTKKEVIMKGNINNYFKLGQEGKYRVYHNQYSTNSFALNKHQHREDHDKRRHLAHKFCLTPAGEFKWNGSVHGSKVLTISTLRLTITQYGENL

SEQ ID NO: 8951 - protein, 183 aa, Homo sapiens
MLQQTWTSRCLMKFYAVVATSPASWESHKIAERIEQRILNSNPVMEAFGNACTLRNNNSSRFGKFIQLQLNRAQQMTGAAVQTYLLEKTRVACQASSERNFHIFYQICKGASEDERLQWHLPEGAAFSWLPNPERSLEEDCFEVTREAMLHLGIDTPTQNNIFKVRRKATPLKFGRDDGQPFA

SEQ ID NO: 8952 - protein, 247 aa, Homo sapiens; identical to SEQ ID NO: 6456

SEQ ID NO: 8953 - protein, 326 aa, Homo sapiens
MLGGVGEENEKLWSFTKKASHIQLDSLPEVPLLVDVPCLSAQLDDSILNIVKDHIFKHGTVASRPPVQIEELIEKPGGIIVRWCKVDDDFTAQDYRLQFRKCTSNHFEDVYVGSETEFIVLHIDPNVDYQFRVCARGDGRQEWSPWSVPQIGHSTLVPHEWTAGFEGYSLSSRRNIALRNDSESSGVLYSRAPTYFCGQTLTFRVETVGQPDRRDSIGVCAEKQDGYDSLQRDQAVCISTNGAVFVNGKEMTNQLPAVTSGSTVTFDIEAVTLGTTSNNEGGHFKLRVTISSNNREVVFDWLLDQSCGSLYFGCSFFYPGWKVLVF

SEQ ID NO: 8954 - protein, 811 aa, Homo sapiens
MVSEEEEEEDGDAEETQDSEDDEEDEMEEDDDDSDYPEEMEDDDDDASYCTESSFRSHSTYSSTPGRRKPRVHRPRSPILEEKDIPPLEFPKSSEDLMVPNEHIMNVIAIYEVLRNFGTVLRLSPFRFEDFCAALVSQEQCTLMAEMHVVLLKAVLREEDTSNTTFGPADLKDSVNSTLYFIDGMTWPEVLRVYCESDKEYHHVLPYQEAEDYPYGPVENKIKVLQFLVDQFLTTNIAREELMSEGVIQYDDHCRVCHKLGDLLCCETCSAVYHLECVKPPLEEVPEDEWQCEVCVAHKVPGVTDCVAEIQKNKPYIRHEPIGYDRSRRKYWFLNRRLIIEEDTENENEKKIWYYSTKVQLAELIDCLDKDYWEAELCKILEEMREEIHRHMDITEDLTNKARGSNKSFLAAANEEILESIRAKKGDIDNVKSPEETEKDKNETENDSKDAEKNREEFEDQSLEKDSDDKTPDDDPEQGKSEEPTEVGDKGNSVSANLGDNTTNATSEETSPSEGRSPVGCLSETPDSSNMAEKKVASELPQDVPVGDFKSEKSNGELSESPGAGKGASGSTRIITRLRNPDSKLSQLKSQQVAAAAHEANKLFKEGKEVLVVNSQGEISRLSTKKEVIMKGNINNYFKLGQEGKYRVYHNQYSTNSFALNKHQHREDHDKRRHLAHKFCLTPAGEFKWNGSVHGSKVLTISTLRLTITQLENNIPSSFLHPNWASHRANWIKAVQMCSKPREFALALAILECAVKPVVMLPIWRESLGHTRLHRMTSIEREEKEKVKKREETGRRRNDAASDMGKIHISS

SEQ ID NO: 8955 - protein, 583 aa, Homo sapiens
MAPELTPEEEQATKQFLEEINKWTVQYNVSPLSWNVAVKFLMARKFDVLRAIELFHSYRETRRKEGIVKLKPHEEPLRSEILSGKFTILNVRDPTGASIALFTARLHHPHKSVQHVVLQALFYLLDRAVDSFETQRNGLVFIYDMCGSNYANFELDLGKKVLNLLKGAFPARLKKVLIVGAPIWFRVPYSIISLLLKDKVRERIQILKTSEVTQHLPRECLPENLGGYVKIDLATWNFQFLPQVNGHPDPFDEIILFSLPPALDWDSVHVPGPHAMTIQELVDYVNARQKQGIYEEYEDIRRENPVGTFHCSMSPGNLEKNRYGDVPCLDQTRVKLTKRSGHTQTDYINASFMDGYKQKNAYIGTQGPLENTYRDFWLMVWEQKVLVIVMTTRFEEGGRRKCGQYWPLEKDSRIRFGFLTVTNLGVENMNHYKKTTLEIHNTEERQKRQVTHFQFLSWPDYGVPSSAASLIDFLRVVRNQQSLAVSNMGARSKGQCPEPPIVVHCSAGIGRTGTFCSLDICLAQLEELGTLNVFQTVSRMRTQRAFSIQTPEQYYFCYKAILEFAEKEGMVSSGQNLLAVESQ

SEQ ID NO: 8956 - protein, 131 aa, Homo sapiens; identical to SEQ ID NO: 8865

SEQ ID NO: 8957 - protein, 144 aa, Homo sapiens
MASVAAARAVPVGSGLRGLQRTLPLVVILGATGTGKSTLALQLGQRLGGEIVSADSMQVYEGLDIITNKVSAQEQRICRHHMISFVDPLVTNYTVVDFRNRATALIEDIFARDKIPIVVGGTNYYIESLLWKVLVNTKVSLVHS

SEQ ID NO: 8958 - protein, 460 aa, Homo sapiens
MAASSLEQKLSRLEAKLKQENREARRRIDLNLDISPQRPRPTLQLPLANDGGSRSPSSESSPQHPTPPARPRHMLGLPSTLFTPRSMESIEIDQKLQEIMKQTGYLTIGGQVPPSLWRGEGGGPARLDPSWERQWGAGGGGRPGTLQPSLSSQRYQAEINDLENLGEMGSGTCGQVWKMRFRKTGHVIAVKQMRRSGNKEENKRILMDLDVVLKSHDCPYIVQCFGTFITNTDVFIAMELMGTCAEKLKKRMQGPIPERILGKMTVAIVKALYYLKEKHGVIHRDVKPSNILLDERGQIKLCDFGISGRLVDSKAKTRSAGCAAYMAPERIDPPDPTKPDYDIRADVWSLGISLVELATGQFPYKNCKTDFEVLTKVLQEEPPLLPGHMGFSGDFQSFVKDCLTKDHRKRPKYNKLLEHSFIKRYETLEVDVASWFKDVMAKTESAASGVLSQPHLPFFR

SEQ ID NO: 8959 - protein, 536 aa, Homo sapiens
METSDIQIFYQEDPECQNLSENSCPPSEVSDTNLYSPFKPRNYQLELALPAMKGKNTIICAPTGCGKTFVSLLICEHHLKKFPQGQKGKVVFFANQIPVYEQQKSVFSKYFERHGYRVTGISGATAENVPVEQIVENNDIIILTPQILVNNLKKGTIPSLSIFTLMIFDECHNTSKQHPYNMIMFNYLDQKLGGSSGPLPQVIGLTASVGVGDAKNTDEALDYICKLCASLDASVIATVKHNLEELEQVVYKPQKFFRKVESRISDKFKYIIAQLMRDTESLAKRICKDLENLSQIQNREFGTQKYEQWIVTVQKACMVFQMPDKDEESRICKALFLYTSHLRKYNDALIISEHARMKDALDYLKDFFSNVRAAGFDEIEQDLTQRFEEKLQELESVSRDPSNENPKLEDLCFILQEEYHLNPETITILFVKTRALVDALKNWIEGNPKLSFLKPGILTGRGKTNQNTGMTLPAQKCILDAFKASGDHNILIATSVADEGIDIAQCNLVILYEYVGNVIKMIQTREEEQEVASASF

SEQ ID NO: 8960 - protein, 960 aa, Homo sapiens; identical to SEQ ID NO: 4904

SEQ ID NO: 8961 - protein, 221 aa, Homo sapiens
MLAAGLLEELRDFHRRYNQKNVSENSQDYQHGIFQSIGFKEFHEYLITEGKCTLETSNQLLKKGIEALKQVTKRYARKQNRWVKNRFLSRPGPIVPPVYGLEVSDVSKWEESVLEPALEIVQSFIQGHKPTATPIKMPYNEAENKRSYHLCDLCDRIIIGDREWAAHIKSKSHLNQLKKRRRLDSDAVNTIESQSVSPDHNKEPKEKGSPGQNDQELKCSV

SEQ ID NO: 8962 - protein, 882 aa, Homo sapiens
MPRVKPKLEKQLQKDKEKVEEFKSIPAKSNNIINETTTRNNALEKEKEKEEKKLKEVMDSLKQETQGLQKEKESREKELMGFSKSVNEARSKMDVAQSELDIYLSRHNTAVSQLTKAKEALIAASETLKERKAAIRDIEGKLPQTEQELKEKEKELQKLTQEETNFKSLVHDLFQKVEEAKSSLAMNRSRGKVLDAIIQEKKSGRIPGIYGRLGDLGAIDEKYDVAISSCCHALDYIVVDSIDIAQECVNFLKRQNIGVATFIGLDKMAVWAKKMTEIQTPENTPRLFDLVKVKDEKIRQAFYFALRDTLVADNLDQATRVAYQKDRRWRVVTLQGQIIEQSGTMTGGGSKVMKGRMGSSLVIEISEEEVNKMESQLQNDSKKAMQIQEQKVQLEERVVKLRHSEREMRNTLEKFTASIQRLIEQEEYLNVQVKELEANVLATAPDKKKQKLLEENVSAFKTEYDAVAEKAGKVEAEVKRLHNTIVEINNHKLKAQQDKLDKINKQLDECASAITKAQVAIKTADRNLQKAQDSVLRTEKEIKDTEKEVDDLTAELKSLEDKAAEVVKNTNAAEESLPEIQKEHRNLLQELKVIQENEHALQKDALSIKLKLEQIDGHIAEHNSKIKYWHKEISKISLHPIEDNPIEEISVLSPEDLEAIKNPDSITNQIALLEARCHEMKPNLGAIAEYKKKEELYLQRVAELDKITYERDSFRQAYEDLRKQRLNEFMAGFYIITNKLKENYQMLTLGGDAELELVDSLDPFSEGIMFSVRPPKKSWKKIFNLSGGEKTLSSLALVFALHHYKPTPLYFMDEIDAALDFKNVSIVAFYIYEQTKNAQFIIISLRNNMFEISDRLIGIYKTYNITKSVAVNPKEIASKGLC

SEQ ID NO: 8963 - protein, 345 aa, Homo sapiens
MFLTRPKVCVDLNRRVTLYGVFTIHFSPNVPSRCLLLELLDVSVSELLLYSSHQGCSMWMIQHCARDVLEALAFLHHEGYVHADLKPRNILWSAENECFKLIDFGLSFKEGNQDVKYIQTDGYRAPEAELQNCLAQAGLQSDTECTSAVDLWSLGIILLEMFSGMKLKHTVRSQEWKANSSAIIDHIFASKAVVNAAIPAYHLRDLIKSMLHDDPSRRIPAEMALCSPFFSIPFAPHIEDLVMLPTPVLRLLNVLDDDYLENEEEYEDVVEDVKEECQKYGPVVSLLVPKENPGRGQVFVEYANAGDSKAAQKLLTGRMFDGKFVVATFYPLSAYKRGYLYQTLL

SEQ ID NO: 8964 - protein, 317 aa, Homo sapiens
MWLAREGIVAPLPGEWKPCQDITGDIYYFNFANGQSMWDHPCDEHYRSLVIQERAKLSTSGAIKKKKKKKEKKDKKDRDPPKSSLETQPEEGLLPPSSFLCSLSPPSAPGLADLDLDQEMQAISEGSYNKGKSPGMLGDTPWRFMGALPRKLQPLSKGQPSQIHQVFADMEKILGRAPAQCRRELGDQQGLEKLQKATEKIYLGFSDPETEELEMRSRQQKLGTPAPQNTGLLQNMQDVVESRNQASVHSKLSEAIKGLPLKGEQHSHSLAKLSPTGPGGDKGQSPIPMWICCRLRASNCRNTSAAWRLKLKRSSTC

SEQ ID NO: 8965 - protein, 53 aa, Homo sapiens
MGNSDSQYTLQGSKNHSNTITGAKQIPCSLKIRGIHAKEEKSLHGWGHGSNGA

SEQ ID NO: 8966 - protein, 400 aa, Homo sapiens
AWLQSAGELPSDGGCSRLRWQAHLEFTHNHDVGDLTWDKIAVSLPRSEKLRSLVLAGIPHGMRPQLWMRLSGALQKKRNSELSYREIVKNSSNDETIAAKQIEKDLLRTMPSNACFASMGSIGVPRLRRVLRALAWLYPEIGYCQGTGMVAACLLLFLEEEDAFWMMSAIIEDLLPASYFSTTLLGVQTDQRVLRHLIVQYLPRLDKLLQEHDIELSLITLHWFLTAFASVVDIKLLLRIWDLFFYEGSRVLFQLTLGMLHLKEEELIQSENSASIFNTLSDIPSQMEDAELLLGVAMRLAGSLTDVAVETQRRKHLAYLIADQGQLLGAGTLTNLSQVAQDGGPHLDPQHTGRRGHLEVQSAGAAENKPALPALPPSLAQSDHSCGVIQASSGFVHLRF

SEQ ID NO: 8967 - protein, 97 aa, Homo sapiens
MLRGTKEMDNMSPRLRAFLSEPIGEKDVCWVDGISHELAINLVTKGINKAYILLGQFLLMHKNEAEFQRWLICCFGATECEAQQTSHCLKEWCACFL

SEQ ID NO: 8968 - protein, 336 aa, Homo sapiens
MEYLGGGSALDLLKPGPLEETYIATILREILKGLDYLHSERKIHRDIKAANVLLSEQGDVKLADFGVAGQLTDTQIKRNTFVGTPFWMAPEVIKQSAYDFKADIWSLGITAIELAKGEPPNSDLHPMRVLFLIPKNSPPTLEGQHSKPFKEFVEACLNKDPRFRPTAKELLKHKFITRYTKKTSFLTELIDRYKRWKSEGHGEESSSEDSDIDGEAEDGEQGPIWTFPPTIRPSPHSKLHKGTALHSSQKPAEPVKRQPRSQCLSTLVRPVFGEVFSQLKEKHKQSGGSVGALEELENAFSLAEESCPGISDKLMVHLVERVQRFSHNRNHLTSTR

SEQ ID NO: 8969 - protein, 484 aa, Homo sapiens
MVHETSYSAQFKGEASKPTTADNKVIDRRRIRSLYSEPFKEPPKVEKPSVQSSKPKKTSASHKPTRKAKDKQAVSGQAAKKKSAEGPSTTKPDDKEQSKEMNNKLAEAKESLAQPVSDSSKTQGPVATEPDKDQGSVVPGLLKGQGPMVQEPLKKQGSVVPGPPKDLGPMIPLPVKDQDHTVPEPLKNESPVISAPVKDQGPSVPVPPKNQSPMVPAKVKDQGSVVPESLKDQGPRIPEPVKNQAPMVPAPVKDEGPMVSASVKDQGPMVSAPVKDQGPIVPAPVKGEGPIVPAPVKDEGPMVSAPIKDQDPMVPEHPKDESAMATAPIKNQGSMVSEPVKNQGLVVSGPVKDQDVVVPEHAKVHDSAVVAPVKNQGPVVPESVKNQDPILPVLVKDQGPTVLQPPKNQGRIVPEPLKNQVPIVPVPLKDQDPLVPVPAKDQGPAVPEPLKTQGPRDPQLPTVSPLPRVMIPTAPHTEYIESSP

SEQ ID NO: 8970 - protein, 699 aa, Homo sapiens
MALGEEKAEAEASEDTKAQSYGRGSCREQPPRLEAEGGLISPVWGAEGIPAPTCWIGTDPGGPSRAHQPQASDANREPVAERSEPALSGLPPATMGSGDLLLSGESQVEKTKLSSSEEFPQTLSLAATTICSGHDADTEDDPSLADLPQALDLSQQPHSSGLSCLSQWKSVLSPGSAAQPSSCSISASSTGSSLQGHQERAEPRGGSLAKVSSSLEPVVPQEPSSVVGLGPRPQWSPQPVFSGGDASGLGRRRLSFQAEYWACVLPDSLPPSPDRHSPLWNPNKEYEDLLDYTYPLRPGPQLPKHLDSRVPADPVLQDSGVDLDSFSVSPASTLKSPTNVSPNCPPAEATALPFSGPREPSLKQWPSRVPQKQGGMGLASWSQLASTPRAPGSRDARWERREPALRGAKDRLTIGKHLDMGSPQLRTRDRGWPSPRPEREKRTSQSARRPTCTESRWKSEEEVESDDEYLALPARLTQVSSLVSYLGSISTLVTLPTGDIKGQSPLEVSDSDGPASFPSSSSQSQLPPGAALQGSGDPEGQNPCFLRSFVRAHDSAGEGSLGSSQALGVSSGLLKTRPSLPARLDRWPFSDPDVEGQLPRKGGEQGKESLVQCVKTFCCQLEELICWLYNVADVTDHGTAARSNLTSLKSSLQLYRVICGPGSGLFPHKSVAKLLDYKVKSQITNVWYVIAQLTIIPEI

SEQ ID NO: 8971 - protein, 541 aa, Homo sapiens
MKSYVSETMASPGKDNYRMKSYKNNALNPEEMRRRREEEGIQLRKQKREQQLFKRRNVELINEEAAMFDSLLMDSYVSSTTGESVITREMVEMLFSDDSDLQLATTQKFRKLLSKEPSPPIDEVINTPRVVDRFVEFLKRNENCTLQFEAAWALTNIASGTSQQTKIVIEAGAVPIFIELLNSDFEDVQEQAVWALGNIAGDSSVCRDYVLNCSILNPLLTLLTKSTRLTMTRNAVWALSNLCRGKNPPPEFAKVSPCLPVLSRLLFSSDSDLLADACWALSYLSDGPNEKIQAVIDSGVCRRLVELLMHNDYKVASPALRAVGNIVTGDDIQTQVILNCSALPCLLHLLSSPKESIRKEACWTISNITAGNRAQIQAVIDANIFPVLIEILQKAEFRTRKEAAWAITNATSGGTPEQIRYLVSLGCIKPLCDLLTVMDSKIVQVALNGLENILRLGEQEGKRSGSGVNPYCGLIEEAYGLDKIEFLQSHENQEIYQKAFDLIEHYFGVEDDDSSLAPQVDETQQQFIFQQPEAPMEGFQL

SEQ ID NO: 8972 - protein, 571 aa, Homo sapiens
MLDCGMHMGFNDDRRFPDFSYITQNGRLTDFLDCVIISHFHLDHCGALPYFSEMVGYDGPIYMTHPTQAICPILLEDYRKIAVDKKGEANFFTSQMIKDCMKKVVAVHLHQTVQVDDELEIKAYYAGHVLGAAMFQIKVGSESVVYTGDYNMTPDRHLGAAWIDKCRPNLLITESTYATTIRDSKRCRERDFLKKVHETVERGGKVLIPVFALGRAQELCILLETFWERMNLKVPIYFSTGLTEKANHYYKLFIPWTNQKIRKTFVQRNMFEFKHIKAFDRAFADNPGPMVVFATPGMLHAGQSLQIFRKWAGNEKNMVIMPGYCVQGTVGHKILSGQRKLEMEGRQVLEVKMQVEYMSFSAHADAKGIMQLVGQAEPESVLLVHGEAKKMEFLKQKIEQELRVNCYMPANGETVTLPTSPSIPVGISLGLLKREMAQGLLPEAKKPRLLHGTLIMKDSNFRLVSSEQALKELGLAEHQLRFTCRVHLHDTRKEQETALRVYSHLKSVLKDHCVQHLPDGSVTVESVLLQAAAPSEDPGTKVLLVSWTYQDEELGSFLTSLLKKGLPQAPS

SEQ ID NO: 8973 - protein, 742 aa, Homo sapiens
MEAAAVTVTRSATRRRRRQLQGLAAPEAGTQEEQEDQEPRPRRRRPGRSIKDEEEETVFREVVSFSPDPLPVRYYDKDTTKPISFYLSSLEELLAWKPRLEDGFNVALEPLACRQPPLSSQRAALLCHDMMGGYLDDRFIQGSVVQTPYAFYHWQCIDVFVYFSHHTVTIPPVGWTNTAHRHGVCVLGTFITEWNEGGRLCEAFLAGDERSYQAVADRLVQITQFFRFDGWLINIENSLSLAAVGNMPPFLRYLTTQLHRQVPGGLVLWYDSVVQSGQLKWQDELNQHNRVFFDSCDGFFTNYNWREEHLERMLGQAGERRADVYVGVDVFARGNVVGGRFDTDKSLELIRKHGFSVALFAPGWVYECLEKKDFFQNQDKFWGRLERYLPTHSICSLPFVTSFCLGMGARRVCYGQEEAVGPWYHLSAQEIQPLFGEHRLGGDGRGWVRTHCCLEDAWHGGSSLLVRGVIPPEVGNVAVRLFSLQAPVPPKIYLSMVYKLEGPTDVTVALELTTGDAGSCHIGGISVLNAETSSRHSLRPLRVPPTKLARWVGRCGRQLSGGWVQHCYEVSLRGCLLLDLLVCFSRPPGSREEESFTCRLGEIQVVDAASLLAPLPQVQAVTISHIRWQPSASEREGPPALLQLSCTLHWSFLLSQVRCFRIHCWGGMSDDSPGRELPRPEMPMFLGLAFATQYRIVDLLVEAAGPGQDRRMEFLVEPVPKEGFRVPQAEWGRAVLLYSAPA

SEQ ID NO: 8974 - protein, 131 aa, Homo sapiens
MELRVHMVSHTGEMPYKVRLGLSPGPGLGGPRILPAEPFTWGAVRHLPHSSCQGACLPCLPCLSSAPLSRQGLSAASPPRSLLGPCFFPWRTGLASSGQLSPEALLCTILHTRSGVLPESSHRGLPLVPAL

SEQ ID NO: 8975 - protein, 302 aa, Homo sapiens
MEHGIVKDWNDMERIWQYVYSKDQLQTFSEEHPVLLTEAPLNPRKNRERAAEVFFETFNVPALFISMQAVLSLYATGRTTGVVLDSGDGVTHAVPIYEGFAMPHSIMRIDIAGRDVSRFLRLYLRKEGYDFHSSSEFEIVKAIKERACYLSINPQKDETLETEKAQYYLPDGSTIEIGPSRFRAPELLFRPDLIGEESEGIHEVLVFAIQKSDMDLRRTLFSNIVLSGGSTLFKGFGDRLLSEVKKLAPKDVKIRISAPQERLYSTWIGGSILASLDTFKKMWVSKKEYEEDGARSIHRKTF

SEQ ID NO: 8976 - protein, 259 aa, Homo sapiens
MLRCGQMMLAQALICRHLGRDWSWEKQKEQPKEYQRILQCFLDRKDCCYSIHQMAQMGVGEGKSIGEWFGPNTVAQVLKKLALFDEWNSLAVYVSMDNTVVIEDIKKMCRVLPLSADTAGDRPPDSLTASNQSDELIFLDPHTTQTFVDTEENGTVNDQTFHCLQSPQRMNILNLDPSVALGFFCKEEKDFDNWCSLVQKEILKENLRMFELVQKHPSHWPPFVPPAKPEVTTTGAEFIDSTEQLEEFDLEEDFEILSV

SEQ ID NO: 8977 - protein, 318 aa, Homo sapiens
MRAQSDELEKIEKHGRSSKDKENAKSLDKPEQFLYELSLIPNFSERVFCILFQSTFSESICSIRRKLELLQKLCETLKNGPGVMQVLGLVLAFGNYMNGGNKTRGQADGFGLDILPKLKDVKSSDNSRSLLSYIVSYYLRNFDEDAGKEQCLFPLPEPQDLFQASQMKFEDFQKDLRKLKKDLKACEVEAGKVYQVSSKEHMQPFKENMEQFIIQAKIDQEAEENSLTETHKCFLETTAYFFMKPKLGEKEVSPNAFFSIWHEFSSDFKDFWKKENKLLLQERVKEAEEVCRQKKGKSLYKIKPRHDSGIKAKISMKT

SEQ ID NO: 8978 - protein, 114 aa, Homo sapiens
MSSSMWYIMQSIQSKYSLSERLIRTIAAIRSFPHDNVEDLIRGGADVNCTHGTLKPLHCACMVSDADCVELLLEKGAEVNALDGYNRTALHYAAEKDEACVEVLLEYGANPNAL

SEQ ID NO: 8979 - protein, 454 aa, Homo sapiens; identical to SEQ ID NO: 5206

SEQ ID NO: 8980 - protein, 348 aa, Homo sapiens; identical to SEQ ID NO: 5338

SEQ ID NO: 8981 - protein, 720 aa, Homo sapiens
MYGSARSVGKVEPSSQSPGRSPRLPRSPRLGHRRTNSTGGSSGSSVGGGSGKTLSMENIQSLNAAYATSGPMYLSDHENVGSETPKSTMTLGRSGGRLPYGVRMTAMGSSPNIASSGVASDTIAFGEHHLPPVSMASTVPHSLRQARDNTIMDLQTQLKEVLRENDLLRKDVEVKESKLSSSMNSIKTFWSPELKKERALRKDEASKITIWKEQYRVVQEENQVDALRLRLEEKETMLNKKTKQIQDMAEEKGTQAGEIHDLKDMLDVKERKVNVLQKKIENLQEQLRDKEKQMSSLKERVKSLQADTTNTDTALTTLEEALAEKERTIERLKEQRDRDEREKQEEIDNYKKDLKDLKEKVSLLQGDLSEKEASLLDLKEHASSLASSGLKKDSRLKTLEIALEQKKEECLKMESQLKKAHEAALEARASPEMSDRIQHLEREITRYKDESSKAQAEVDRLLEILKEVENEKNDKDKKIAELESLTSRQVKDQNKKVANLKHKEQVEKKKSAQMLEEARRREDNLNDSSQQLQDSLRKKDDRIEELEEALRESVQITAEREMVLAQEESARTNAEKQVEELLMAMEKVKQELESMKAKLSSTQQSLAEKETHLTNLRAERRKHLEEVLEMKQEALLAAISEKDANIALLELSSSKKKTQEEVAALKREKDRLVQQLKQQTQNRMKLMADNYEDDHFKSSHSNQTNHKPSPDQDEEEGIWA

SEQ ID NO: 8982 - protein, 255 aa, Homo sapiens
MAASTMSVCSSACSDSWQVDACPESCCEPHCCALSCCAPAPCLTLVCTPVSRVSSPCCQAACEPSPCQSGCTSSCTPSCCQQSSCQPACCTSSPCQQACCVPVCCKPVCCLPTCSKDSSSCCQQSSCQPTCCASSSSQQSCCVPVCCKPVCYVPTCSEDSSSCCQQSSCHPACCTSSPCQQACCVPVRCKPVCCKPICCVPVCSGASTSCCQQSSCQPACCTTSCCRPSSSVSLLCRPVCRPACCSLCSGQESSC

SEQ ID NO: 8983 - protein, 853 aa, Homo sapiens; identical to SEQ ID NO: 4744

SEQ ID NO: 8984 - protein, 418 aa, Homo sapiens
MVHGRKANAQVMESEEFMLLPANQLIDIISSDELNVRSEEQVFNAVMAWVKYSIQERRPQLPQVLQHVRLPLLSPKFLVGTVGSDPLIKSDEECRDLVDEAKNYLLLPQERPLMQGAARPRKPIRCGEVLFAVGGWCSGDAISSVERYDPQTNEWRMVASMSKRRCGVGVSVLDDLLYAVGGHDGSSYLNSVERYDPKTNQWSSDVAPTSTCRTSVGVAVLGGFLYAVGGQDGVSCLNIVERYDPKENKWTRVASMSTRRLGVAVAVLGGFLYAVGGSDGTSPLNTVERYNPQENRWHTIAPMGTRRKHLGCAVYQDMIYAVGGRDDTTELSSAERYNAANQWSPVVAMTSRRSGVGLAVVNGQLMAVGGFDGTTYLKTIEVFDPDANTWRLYGGMNYRRLGGGVGVIKMTHCESHIW

SEQ ID NO: 8985 - protein, 172 aa, Homo sapiens
MSCTIEKALADAKALVERLRDHDDAAESLIEQTTALNKRVEAMKQYQEEIQELNEVARHRPRSTLVMGIQQENRQIRELQQENKELRTSLEEHQSALELIMSKYREQMFRLLMASKKDDPGIIMKLKEQHSKIDMVHRNKSEGFFLDASRHILEAPQHGLERRHLEANQNVH

SEQ ID NO: 8986 - protein, 270 aa, Homo sapiens
MLFIFPLSLPWRPSCWKESCSTGQRQAGRSREDSVTPPPSSPWPTPPAGAMSTKQEARRDEGEARTRGQEAQLRDRAHLSLHKDSADLLPLDSLKRLGTSKDLQPRSVIQRRLVEGNPNWLQGEPPRMQDLIHGQESRRKTSRTEIPALLVNCKCQDQLLRVAVDTGTQYNRISAGCLSRLGLEKRVLKASAGDLAPGPPTQVEQLELQLGQETVVCSAQVVDAESPEFCLGLQTLLSLKCCIDLEHGVLRLKAPFSELPFLPLYQEPGQ

SEQ ID NO: 8987 - protein, 80 aa, Homo sapiens
TSCCRPSSSVSLLCHPVCSCSPACQPTCCIHSPCQASCYVPVSCQPIIYVTPSCQSSGCCQPPCTTALCRPISCSTPSCC

SEQ ID NO: 8988 - protein, 669 aa, Homo sapiens
MALGEEKAEAEASEDTKAQSYGRGSCRERELDIPGPMSGEQPPRLEAEGGLISPVWGAEGIPAPTCWIGTDPGGPSRAHQPQASDANREPVAERSEPALSGLPPATMGSGDLLLSGESQVEKTKLSSSEEFPQTLSLAATTICSGHDADTEDDPSLADLPQALDLSQQPHSSGLSCLSQWKSVLSPGSAAQPSSCSISASSTGSSLQGHQERAEPRGGSLAKVSSSLEPVVPQEPSSVVGLGPRPQWSPQPVFSGGDASGLGRRRLSFQAEYWACVLPDSLPPSPDRHSPLWNPNKEYEDLLDYTYPLRPGPQLPKHLDSRVPADPVLQDSGVDLDSFSVSPASTLKSPTNVSPNCPPAEATALPFSGPREPSLKQWPSRVPQKQGGMGLASWSQLASTPRAPGSRDARWERREPALRGAKDRLTIGKHLDMGSPQLRTRDRGWPSPRPEREKRTSQSARRPTCTESRWKSEEEVESDDEYLALPARLTQVSSLVSYLGSISTLVTLPTGDIKGQSPLEVSDSDGPASFPSSSSQSQLPPGAALQGSGDPEGQNPCFLRSFVRAHDSAGEGSLGSSQALGVSSGLLKTRPSLPARLDRWPFSDPDVEGQLPRKGGEQGKESLVQCVKTFCCQLEELICWLYNVADVTDHGTAARSNLTSLKSSLQLYRF

SEQ ID NO: 8989 - protein, 233 aa, Homo sapiens
MKQLIEDTEKNKVYVAMVTDYGAFIKIPGCRKQGLVHRTHMSSCRVDKPSEIVDVGDKVWVKLIGREMKNDRIKVSLSMKVVNQGTGKDLDPNNVIIEQEERRRRSFQDYTGQKITLEAVLNTTCKKCGCKGHFAKDCFMQPGGTKYSLIPDEEEEKEEAKSAEFEKPDPTRNPSRKRKKEKKKKKHRDRKSSDSDSSDSESDTGKRARHTSKDSKAAKKKKKKKKHKKKHKE

SEQ ID NO: 8990 - protein, 163 aa, Homo sapiens
MGWRLLTQDEGPALVPGGRLGDLWDYHQHRYLQGVPEGVRDLPPGVALPLESNLAFMNGVSFTKGCYIGQELTARTHHMGVIRKRLFPVRFLDPLPTSGITPGATVLTASGQTVGKFRAGQGNVGLALLWSEKIKGPLHIRASEGAQVALAASVPDWWPTVSK

SEQ ID NO: 8991 - protein, 267 aa, Homo sapiens
MAMEMRLPVARKPLSERLGRDTKKHLVVPGDTITTDTGFMRGHGTYMGEEKLIASVAGSVERVNKLICVKALKTRYIGEVGDIVVGRITEVQQKRWKVETNSRLDSVLLLSSMNLPGGELRRRSAEDELAMRGFLQEGDLISGVLVQVSPSLVKRQKTHFHDLPCGASVILGNNGFIWIYPTPEHKEEEAGGFIANLEPVSLADREVISRLRNCIISLVTQRMMLYDTSILYCYEASLPHQIKDILKPEIMEEIVMETRQRLLEQEG

SEQ ID NO: 8992 - protein, 1036 aa, Homo sapiens
MPVFKEVKVHLLEDAGIEKDAVTQETRISPSGIDSATTVAAATAAAIATAAPLIKVQSDLEAKVNSVTELLSKLQETDKHLQRVTEQQTSIQRKQEKLHCHDHEKQMNVFMEQHIRHLEKLQQQQIDIQTHFISAALKTSSFQPVSMPSSRAVEKYSVKPEHPNLGSCNPSLYNTFASKQAPLKEVEDTSFDKQKSPLETPAPRRFAPVPVSRDDELSKRENLLEEKENMEVSCHRGNVRLLEQILNNNDSLTRKSESSNTTSLTRSKIGWTPEKTNRFPSCEELETTKVTMQKSDDVLHDLGQKEKETNSMVQPKESLSMLKLPDLPQNSVKLQTTNTTRSVLKDAEKILRGVQNNKKVLEENLEAIIRAKDGAAMYSLINALSTNREMSEKIRIRKTVDEWIKTISAEIQDELSRTDYEQKRFDQKNQRTKKGQNMTKDIRTNTQDKTVNKSVIPRKHSQKQIEEHFRNLPMRGMPASSLQKERKEGLLKATTVIQDEDYMLQVYGKPVYQGHRSTLKKGPYLRFNSPSPKSRPQRPKVIERVKGTKVKSIRTQTDFYATKPKKMDSKMKHSVPVLPHGDQQYLFSPSREMPTFSGTLEGHLIPMAILLGQTQSNSDTMPPAGVIVSKPHPVTVTTSIPPSSRKVETGVKKPNIAIVEMKSEKKDPPQLTVQVLPSVDIDSISNSSADVLSPLSSPKEASLPPVQTWIKTPEIMKVDEEEVKFPGTNFDEIIDVIQEEEKCDEIPDSEPILEFNRSVKADSTKYNGPPFPPVASTFQPTADILDKVIERKETLENSLIQWVEQEIMSRIISGLFPVQQQIAPSISVSVSETSEPLTSDIVEGTSSGALQLFVDAGVPVNSNVIKHFVNEALAETIAVMLGDREAKKQGPVATGVSGDASTNETYLPARVCTPLPTPQPTPPCSPSSPAKECVLVKTPDSSPCDSDHDMAFPVKEICAEKGDDMPAIMLVNTPTVTPTTTPPPAAAVFTPTLSDISIDKLKVSSPELPKPWGDGDLPLEEENPNSPQEELHPRAM

SEQ ID NO: 8993 - protein, 1116 aa, Homo sapiens; identical to SEQ ID NO: 6025

SEQ ID NO: 8994 - protein, 271 aa, Homo sapiens
MRQLHPEAIAAIQSKALFSKAEEQLLSKVGSTSQPTLETFQDLLHRHPDAFYLARTAKALQAHWQLMKQYYLLEDQTVQPLPKGDQVLNFSDAEDLIDDSKLKDMRDEVLEHELMVADRRQKREIRQLEQELHKWQVLVDSITGMSSPDFDNQTLAVLRGRMVRYLMRSREITLGRATKDNQIDVDLSLEGPAWKISRKQGVIKLKNNGDFFIANEGRRPIYIDGRPVLCGSKWRLSNNSVVEIASLRFVFLINQDLIALIRAEAAKITPQ

SEQ ID NO: 8995 - protein, 916 aa, Homo sapiens
MEMPLPPDDQELRNVIDKLAQFVARNGPEFEKMTMEKQKDNPKFSFLFGGEFYSYYKCKLALEQQQLICKQQTPELEPAATMPPLPQPPLAPAAPIPPAQGAPSMDELIQQSQWNLQQQEQHLLALRQEQVTAAVAHAVEQQMQKLLEETQLDMNEFDNLLQPIIDTCTKDAISAGKNWMFSNAKSPPHCELMAGHLRNRITADGAHFELRLHLIYLINDVLHHCQRKQARELLAALQKVVVPIYCTSFLAVEEDKQQKIARLLQLWEKNGYFDDSIIQQLQSPALGLGQYQATLINEYSSVVQPVQLAFQQQIQTLKTQHEEFVTSLAQQQQQQQQQQQQLQMPQMEAEVKATPPPPAPPPAPAPAPAIPPTTQPDDSKPPIQMPGSSEYEAPGGVQDPAAAGPRGPGPHDQIPPNKPPWFDQPHPVAPWGQQQPPEQPPYPHHQGGPPHCPPWNNSHEGMWGEQRGDPGWNGQRDAPWNNQPDAAWNSQFEGPWNSQHEQPPWGGGQREPPFRMQRPPHFRGPFPPHQQHPQFNQPPHPHNFNRFPPRFMQDDFPPRHPFERPPYPHRFDYPQGDFPAEMGPPHHHPGHRMPHPGINEHPPWAGPQHPDFGPPPHGFNGQPPHMRRQGPPHINHDDPSLVPNVPYFDLPAGLMAPLVKLEDHEYKPLDPKDIRLPPPMPPSERLLAAVEAFYSPPSHDRPRNSEGWEQNGLYEFFRAKMRARRRKGQEKRNSGPSRSRSRSKSRGRSSSRSNSRSSKSSGSYSRSRSRSCSRSYSRSRSRSRSRSRSSRSRSRSQSRSRSKSYSPGRRRRSRSRSPTPPSSAGLGSNSAPPIPDSRLGEENKGHQMLVKMGWSGSGGLGAKEQGIQDPIKGGDVRDKWDQYKGVGVALDDPYENYRRNKSYSFIARMKARDECK

SEQ ID NO: 8996 - protein, 320 aa, Homo sapiens
MSKSESPKEPEQLRKLFIGGLSFETTDESLRSHFEQWGTLTDCVVMRDPNTKRSRGFGFVTYATVEEVDAAMNARPHKVDGRVVEPKRAVSREDSQRPGAHLTVKKIFVGGIKEDTEEHHLRDYFEQYGKIEVIEIMTDRGSGKKRGFAFVTFDDHDSVDKIVIQKYHTVNGHNCEVRKALSKQEMASASSSQRGRSGSGNFGGGRGGGFGGNDNFGRGGNFSGRGGFGGSRGGGGYGGSGDGYNGFGNDGSNFGGGGSYNDFGNYNNQSSNFGPMKGGNFGGRSSGPYGGGGQYFAKPRNQGGYGGSSSSSSYGSGRRF

SEQ ID NO: 8997 - protein, 244 aa, Homo sapiens; identical to SEQ ID NO: 5556

SEQ ID NO: 8998 - protein, 1376 aa, Homo sapiens
MTSAAEIKKPPVAPKPKFVVANNKPAPPPIAPKPDIVISSVPQSTKKMKPAIAPKPKVLKTSPVREIGQSPSRKIMLNLEGHKQELAESTDNFNCKYEGNQSNDYISPMCSCSSECIHKLGHRENLCVKQLVLEPLEMNENLENSKIDETLTIKTRSKCDLYGEKAKNQGGVVLKASVLEEELKDALIHQMPPFISAQKHRPTDSPEMNGGCNSNGQFRIEFADLSPSPSSFEKVPDHHSCHLQLPSDECEHFETCQDDSEKSNNCFQSSELEALENGKRSTLISSDGVSKKSEVKDLGPLEIHLVPYTPKFPTPKPRKTRTARLLRQKCVDTPSESTEEPGNSDSSSSCLTENSLKINKISVLHQNVLCKQEQVDKMKLGNKSELNMESNSDAQDLVNSQKAMCNETTSFEKMAPSFDKDSNLSSDSTTVDGSSMSLAVDEGTGFIRCTVSMSLPKQLKLTCNEHLQSGRNLGVSAPQMQKESVIKEENSLRIVPKKPQRHSLPATGVLKKAASEELLEKSSYPSSEEKSSEKSLERNHLQHLCAQNRGVSSSFDMPKRASEKPVWKLPHPILPFSGNPEFLKSVTVSSNSEPSTALTKPRAKSLSAMDVEKCTKPCKDSTKKNSFKKLLSMKLSICFMKSDFQKFWSKSSQLGDTTTGHLSSGEQKGIESDWQGLLVGEEKRSKPIKAYSTENYSLESQKKRKKSRGQTSAANGLRAESLDDQMLSRESSSQAPYKSVTSLCAPEYENIRHYEEIPEYENLPFIMAIRKTQELEWQNSSSMEDADANVYEVEEPYEAPDGQLQLGPRHQHSSSGASQEEQNDLGLGDLPSDEEEIINSSDEDDVSSESSKGEPDPLEDKQDEDNGMKSKVHHIAKEIMSSEKVFVDVLKLLHIDFRDAVAHASRQLGKPVIEDRILNQILYYLPQLYELNRDLLKELEERMLHWTEQQRIADIFVKKGPYLKMYSTYIKEFDKNIALLDEQCKKNPGFAAVVREFEMSPRCANLALKHYLLKPVQRIPQYRLLLTDYLKNLIEDAGDYRDTQDALAVVIEVANHANDTMKQGDNFQKLMQIQYSLNGHHEIVQPGRVFLKEGILMKLSRKVMQPRMFFLFNDALLYTTPVQSGMYKLNNMLSLAGMKVRKPTQEAYQNELKIESVERSFILSASSATERDEWLEAISRAIEEYAKKRITFCPSRSLDEADSENKEEVSPLGSKAPIWIPDTRATMCMICTSEFTLTWRRHHCRACGKIVCQACSSNKYGLDYLKNQPARVCEHCFQELQKLDHQHSPRIGSPGNHKSPSSALSSVLHSIPSGARGSQKKIPAALKEVSANTEDSSMSGYLYRSKGNKKPWKHFWFVIKNKVLYTYAASEVRSEI

SEQ ID NO: 8999 - protein, 481 aa, Homo sapiens; identical to SEQ ID NO: 6507

SEQ ID NO: 9000 - protein, 155 aa, Homo sapiens
MDTMMLNVRNLFEQLVRRVEILSEGNEVQFIQLAKDFEDFRKKWQRTDHELGKYKDLLMKAETERSALDVKLKHARNQVDVEIKRRQRAEADCEKLERQIQLIREMLMCDTSGSIQLSEEQKSALAFLNRGQPSSSNAGNKRLSTIDESGSILSD

SEQ ID NO: 9001 - protein, 139 aa, Homo sapiens
MDTMMLNVRNLFEQLVRRVEILSEGNEVQFIQLAKDFEDFRKKWQRTDHELGKYKDLLMKAETERSALDVKLKHARNQVDVEIKRRQRAEADCEKLERQIQLIREMLMCDTSGSIQLSEEQKSALAFLNRGQPSSSNAG

SEQ ID NO: 9002 - protein, 1093 aa, Homo sapiens
MGGKAWPRRAVGTAGGPCAEQISAPFQTLLMPHLPLASFRPPFWGLRHSRGLPRFHSVSTQSEPHGSPISRRNREAKQKRLREKQATLEAEIAGESKSPAESIKAWRPKELVLYEIPTKPGEKKDVSGPLPPAYSPRYVEAAWYPWWVREGFFKPEYQARLPQATGETFSMCIPPPNVTGSLHIGHALTVAIQDALVRWHRMRGDQVLWVPGSDHAGIATQAVVEKQLWKERGVRRHELSREAFLREVWQWKEAKGGEICEQLRALGASLDWDRECFTMDVGSSVAVTEAFVRLYKAGLLYRNHQLVNWSCALRSAISDIEVENRPLPGHTQLRLPGCPTPVSFGLLFSVAFPVDGEPDAEVVVGTTRPETLPGDVAVAVHPDDSRYTHLHGRQLRHPLMGQPLPLITDYAVQPHVGTGAVKVTPAHSPADAEMGARHGLSPLNVIAEDGTMTSLCGDWLQGLHRFVAREKIMSVLSEWGLFRGLQNHPMVLPICSRSGDVIEYLLKNQWFVRCQEMGARAAKAVESGALELSPSFHQKNWQHWFSHIGDWCVSRQLWWGHQIPAYLVVEDHAQGEEDCWVVGRSEAEAREVAAELTGRPGAELTLERDPDVLDTWFSSALFPFSALGWPQETPDLARFYPLSLLETGSDLLLFWVGRMVMLGTQLTGQLPFSKVLLHPMVRDRQGRKMSKSLGNVLDPRDIISGVEMQVLQEKLRSGNLDPAELAIVAAAQKKDFPHGIPECGTDALRFTLCSHGVQAGDLHLSVSEVQSCRHFCNKIWNALRFILNALGEKFVPQPAEELSPSSPMDAWILSRLALAAQECERGFLTRELSLVTHALHHFWLHNLCDVYLEAVKPVLWHSPRPLGPPQVLFSCADLGLRLLAPLMPFLAEELWQRLPPRPGCPPAPSISVAPYPSACSLEHWRQPELERRFSRVQEVVQVLRALRATYQLTKARPRVLLQSSEPGDQGLFEAFLEPLGTLGYCGAVGLLPPGAAAPSGWAQAPLSDTAQVYMELQGLVDPQIQLPLLAARRYKLQKQLDSLTARTPSEGEAGTQRQQKLSSLQLELSKLDKAASHLRQLMDEPPAPGSPEL

SEQ ID NO: 9003 - protein, 76 aa, Homo sapiens
MNSVGEACTDMKREYDQCFNRWFAEKFLKGDSSGDPCTDLFKRYQQCVQKAIKEKEIPIEGLEFMGHGKEKPENSS

SEQ ID NO: 9004 - protein, 244 aa, Homo sapiens; identical to SEQ ID NO: 5556

SEQ ID NO: 9005 - protein, 257 aa, Homo sapiens
MPHLPLASFRPPFWGLRHSRGLPRFHSVSTQSEPHGSPISRRNREAKQKRLREKQATLEAEIAGESKSPAESIKAWRPKELVLYEIPTKPGEKKDVSGPLPPAYSPRYVEAAWYPWWVREGFFKPEYQARLPQATGETFSMCIPPPNVTGSLHIGHALTVAIQDALVRWHRMRGDQVLWVPGSDHAGIATQAVVEKQLWKERGVRRHELSREAFLREVWQWKEAKGGEICEQLRALGASLDWDRVFYHGCWLLSGCD

SEQ ID NO: 9006 - protein, 267 aa, Homo sapiens
MSKSESPKEPEQLRKLFIGGLSFETTDESLRSHFEQWGTLTDCVVMRDPNTKRSRGFGFVTYATVEEVDAAMNARPHKVDGRVVEPKRAVSREDSQRPGAHLTVKKIFVGGIKEDTEEHHLRDYFEQYGKIEVIEIMTDRGSGKKRGFAFVTFDDHDSVDKIVIQKYHTVNGHNCEVRKALSKQEMASASSSQRGRSGSGNFGGGSYNDFGNYNNQSSNFGPMKGGNFGGRSSGPYGGGGQYFAKPRNQGGYGGSSSSSSYGSGRRF

SEQ ID NO: 9007 - protein, 176 aa, Homo sapiens
MNESKPGDSQNLACVFCRKHDDCPNKYGEKKTKEKWNLTVHYYCLLMSSGIWQRGKEEEGVYGFLIEDIRKEVNRASKLKCCVCKKNGASIGCVAPRCKRSYHFPCGLQRECIFQFTGNFASFCWDHRPVQIITSNNYRESLPCTICLEFIEPIPSYNILRSPCCKNAWFHRDCLQ

SEQ ID NO: 9008 - protein, 1056 aa, Homo sapiens
MLSVVENGLDPQAAIPVIKKKLVGSVKALQKQYVSLDTVVTSEDGDANTMCSALEAVFIHGLHAKHIRAEAGGKRKKSAHQKPLPQPVFWPLLKAVTHKHIISELEHLTFVNTDVGRCRAWLRLALNDGLMECYLKLLLQEQARLHEYYQPTALLRDAEEGEFLLSFLQGLTSLSFELSYKSAILNEWTLTPLALSGLCPLSELDPLSTSGAELQRKESLDSISHSSGSEDIEVHHSGHKIRRNQKLTASSLSLDTASSSQLSCSLNSDSCLLQENGSKSPDHCEEPMSCDSDLGTANAEDSDRSLQEVLLEFSKAQVNSVPTNGLSQETEIPTPQASLSLHGLNTSTYLHCEAPAEPLPAQAASGTQDGVHVQEPRPQAPSPLDLQQPVESTSGQQPSSTVSETAREVGQGNGLQKAQAHDGAGLKLVVSSPTSPKNKSWISEDDFYRPSREQPLESASDHPIASYRGTPGSRPGLHRHFSQEPRKNCSLGALDQACVPSPGRRQAQAAPSQGHKSFRVVHRRQMGLSNPFRGLMKLGTVERRGAMGIWKELFCELSPLEFRLYLSNEEHTCVENCSLLRCESVGPAHSDGRFELVFSGKKLALRASSQDEAEDWLDRVREALQKVRPQQEDEWVNVQYPDQPEEPPEAPQGCLSPSDLLSEPAALQGTQFDWSSAQVPEPDAIKESLLYLYMDRTWMPYIFSLSLEALKCFRIRNNEKMLSDSHGVETIRDILPDTSLGGPSFFKIITAKAVLKLQAGNAEEAALWRDLVRKVLASYLETAEEAVTLGGSLDENCQEVLKFATRENGFLLQYLVAIPMEKGLDSQGCFCAGCSRQIGFSFVRPKLCAFSGLYYCDICHQDDASVIPARIIHNWDLTKRPICRQALKFLTQIRAQPLINLQMVNASLYEHVERMHLIGRRREQLKLLGDYLGLCRSGALKELSKRLNHRNYLLESPHRFSVADLQQIADGVYEGFLKALIEFASQHVYHCDLCTQRGFICQICQHHDIIFPFEFDTTVRCAECKTVFHQSCQAVVKKGCPRCARRRKYQEQNIFA

SEQ ID NO: 9009 - protein, 129 aa, Homo sapiens; identical to SEQ ID NO: 6440

SEQ ID NO: 9010 - protein, 115 aa, Homo sapiens [sequence omitted]

SEQ ID NO: 9011 - protein, 631 aa, Homo sapiens; identical to SEQ ID NO: 5339

SEQ ID NO: 9012 - protein, 129 aa, Homo sapiens; identical to SEQ ID NO: 6440

SEQ ID NO: 9013 - protein, 1739 aa, Homo sapiens
MMEGNGTENSCSRTRGWLQQDNDAKPWLWKFSNCFSRPEQTLPHSPQTKEYMENKKVAVELKDVPSPLHAGSKLFPAVPLPDIRSLQQPKIQLSSVPKVSCCAHCPNEPSTSPMRFGGGGGGSGGTSSLIHPGALLDSQSTRTITCQVGSGFAFQSASSLQNASARNNLAGIASDFPSMCLESNLSSCKHLPCCGKLHFQSCHGNVHKLHQFPSLQGCTSAGYFPCSDFTSGAPGHLEEHISQSELTPHLCTNSLHLNVVPPVCLKGSLYCEDCLNKPARNSIIDAAKVWPNIPPPNTQPAPLAVPLCNGCGTKGTGKETTLLLATSLGKAASKFEVAVAGQVLENLPPIGVFWDIENCSVPSGRSATAVVQRIREKFFKGHREAEFICVCDISKENKEVIQELNNCQVTVAHINATAKNAADDKLRQSLRRFANTHTAPATVVLVSTDVNFALELSDLRHRHGFHIILVHKNQASEALLHHANELIRFEEFISDLPPRLPLKMPQCHTLLYVYNLPANKDGKSVSNRLRRLSDNCGGKVLSITGCSAILRFINQDSAERAQKRMENEDVFGNRIIVSFTPKNRELCETKSSNAIADKVKSPKKLKNPKLCLIKDASEQSSSAKATPGKGSQANSGSATKNTNVKSLQELCRMESKTGHRNSEHQQGHLRLVVPTHGNSSAAVSTPKNSGVAEPVYKTSQKKENLSARSVTSSPVEKKDKEETVFQVSYPSAFSKLVASRQVSPLLASQSWSSRSMSPNLLNRASPLAFNIANSSSEADCPDPFANGADVQVSNIDYRLSRKELQQLLQEAFARHGKVKSVELSPHTDYQLKAVVQMENLQDAIGAVNSLHRYKIGSKKILVSLATGAASKSLSLLSAETMSVLQDAPACCLPLFKFTDIYEKKFGHKLNVSDLYKLTDTVAIREQGNGRLVCLLPSSQARQSPLGSSQSHDGSSTNCSPIIFEELEYHEPVCRQHCSNKDFSEHEFDPDSYKIPFVILSLKTFAPQVHSLLQTHEGTVPLLSFPDCYIAEFGDLEVVQENQGGVPLEHFITCVPGVNIATAQNGIKVVKWIHNKPPPPNTDPWLLRSKSPVGNPQLIQFSREVIDLLKSQPSCVIPISHFIPSYHHHFAKQCRVSDYGYSKLIELLEAVPHVLQILGMGSKRLLTLTHRAQVKRFTQDLLKLLKSQASKQVIVREFSQAYHWCFSKDWDVTEYGVCELIDIVSEIPDTTICLSQQDNEMVICIPKRERTQDEIERTKQFSKDVVDLLRHQPHFRMPFNKFIPSYHHHFGRQCKLAYYGFTKLLELFEAIPDTLQVLECGEEKILTLTEVERFKALAAQFVKLLRSQKDNCLMMTDLLTEYAKTFGYTFRLQDYDVSSISALTQKLCHVVKVADIESGRQIQLINRKSLRSLTAQLLVLLMSWEGTTHLSVEELKRHYESTHNTPLNPCEYGFMTLTELLKSLPYLVEVFTNDKMEECVKLTSLYLFAKNVRSLLHTYHYQQIFLHEFSMAYTKYVGETLQPKTYGHSSVEELLGAIPQVVWIKGHGHKRIVVLKNDMKSRLSSLSLSPANHENQPSEGERILEVPESHTASELKLGADGSGPSHTEQELLRLTDDSPVDLLCAPVPSCLPSPQLRPDPVILQSADLIQFEERPQEPSEIMILNQEEKMEIPIPGKSKTLTSDSSSSCISAAVPVPPCPSSETSESLLSKDPVESPAKKQPKNRVKLAANFSLAPITKL

SEQ ID NO: 9014 - protein, 129 aa, Homo sapiens; identical to SEQ ID NO: 6440

SEQ ID NO: 9015 - protein, 143 aa, Homo sapiens
MTLRCLEPSGNGGEGTRSQWGTAGSAEEPSPQAARLAKALRELGQTGWYWGSMTVNEAKEKLKEAPEGTFLIRDSSHSDYLLTISVKTSAGPTNLRIEYQDGKFRLDSIICVKSKLKQFDSVVHLIDYYVQMCKDKRTGPEAP

SEQ ID NO: 9016 - protein, 51 aa, Homo sapiens
MSSSMWYIMQSIQSKYSLSERLIRTIAAIRSFPHDNVEDLIRGGADVNCTH

SEQ ID NO: 9017 - protein, 633 aa, Homo sapiens
MEESPLSRAPSRGGVNFLNVARTYIPNTKVECHYTLPPGTMPSASDWIGIFKVEAACVRDYHTFVWSSVPESTTDGSPIHTSVQFQASYLPKPGAQLYQFRYVNRQGQVCGQSPPFQFREPRPMDELVTLEEADGGSDILLVVPKATVLQNQLDESQQERNDLMQLKLQLEGQVTELRSRVQELERALATARQEHTELMEQYKGISRSHGEITEERDILSRQQGDHVARILELEDDIQTISEKVLTKEVELDRLRDTVKALTREQEKLLGQLKEVQADKEQSEAELQVAQQENHHLNLDLKEAKSWQEEQSAQAQRLKDKVAQMKDTLGQAQQRVAELEPLKEQLRGAQELAASSQQKATLLGEELASAAAARDRTIAELHRSRLEVAEVNGRLAELGLHLKEEKCQWSKERAGLLQSVEAEKDKILKLSAEILRLEKAVQEERTQNQVFKTELAREKDSSLVQLSESKRELTELRSALRVLQKEKEQLQEEKQELLEYMRKLEARLEKVADEKWNEDATTEDEEAAVGLSCPAALTDSEDESPEDMRLPPYGLCERGDPGSSPAGPREASPLVVISQPAPISPHLSGPAEDSSSDSEAEDEKSVLMAAVQSGGEEANLLLPELGSAFYDMAR

SEQ ID NO: 9018 - protein, 269 aa, Homo sapiens; identical to SEQ ID NO: 7726

SEQ ID NO: 9019 - protein, 205 aa, Homo sapiens
MDKDSQGLLDSSLMASGTASRSEDEESLAGQKRASSQALGTIPKRRSSSRFIKRKKFDDELVESSLAKSSTRAKGASGVEPGRCSGSEPSSSEKKKVSKAPSTPVPPSPAPAPGLTKRVKKSKQPLQVTKDLGRWKPADDLLLINAVLQTNDLTSVHLGVKFSCRFTLREVQERWYALLYDPVISKLACQAMRQLHPEAIAAIQS

SEQ ID NO: 9020 - protein, 179 aa, Homo sapiens
MDWTPRLPSRHIISELEHLTFVNTDVGRCRAWLRLALNDGLMECYLKLLLQEQARLQLQRKESLDSISHSSGSEDIEVHHSGHKIRRNQKLTASSLSLDTASSSQLSCSLNSDSCLLQENGSKSPDHCEEPMSCDSDLGTANAEDSDRSLQEKTRAGSQRMTSTGLPGSNPWRVLQTTQ

SEQ ID NO: 9021 - protein, 244 aa, Homo sapiens; identical to SEQ ID NO: 5556

SEQ ID NO: 9022 - protein, 185 aa, Homo sapiens
MDKDSQGLLDSSLMASGTASRSEDEESLAGQKRASSQALGTIPKRRSSSRFIKRKKFDDELVESSLAKSSTRAKGASGVEPGRCSGSEPSSSEKKKVSKAPSTPVPPSPAPAPGLTKRVKKSKQPLQVTKDLGRWKPADDLLLINAVLQTNDLTSVHLGVKFSCRFTLREVQERWYALLYDPVIS

SEQ ID NO: 9023 - protein, 1000 aa, Homo sapiens
MVECFESGGTRLSLSSFNVSCDSLREQLREWRCFQWWRMDWTPRLPSRHIISELEHLTFVNTDVGRCRAWLRLALNDGLMECYLKLLLQEQARLHEYYQPTALLRDAEEGEFLLSFLQGLTSLSFELSYKSAILNEWTLTPLALSGLCPLSELDPLSTSGAELQRKESLDSISHSSGSEDIEVHHSGHKIRRNQKLTASSLSLDTASSSQLSCSLNSDSCLLQENGSKSPDHCEEPMSCDSDLGTANAEDSDRSLQEVLLEFSKAQVNSVPTNGLSQETEIPTPQASLSLHGLNTSTYLHCEAPAEPLPAQAASGTQDGVHVQEPRPQAPSPLDLQQPVESTSGQQPSSTVSETAREVGQGNGLQKAQAHDGAGLKLVVSSPTSPKNKSWISEDDFYRPSREQPLESASDHPIASYRGTPGSRPGLHRHFSQEPRKNCSLGALDQACVPSPGRRQAQAAPSQGHKSFRVVHRRQMGLSNPFRGLMKLGTVERRGAMGIWKELFCELSPLEFRLYLSNEEHTCVENCSLLRCESVGPAHSDGRFELVFSGKKLALRASSQDEAEDWLDRVREALQKVRPQQEDEWVNVQYPDQPEEPPEAPQGCLSPSDLLSEPAALQGTQFDWSSAQVPEPDAIKESLLYLYMDRTWMPYIFSLSLEALKCFRIRNNEKMLSDSHGVETIRDILPDTSLGGPSFFKIITAKAVLKLQAGNAEEAALWRDLVRKVLASYLETAEEAVTLGGSLDENCQEVLKFATRENGFLLQYLVAIPMEKGLDSQGCFCAGCSRQIGFSFVRPKLCAFSGLYYCDICHQDDASVIPARIIHNWDLTKRPICRQALKFLTQIRAQPLINLQMVNASLYEHVERMHLIGRRREQLKLLGDYLGLCRSGALKELSKRLNHRNYLLESPHRFSVADLQQIADGVYEGFSPKVPSEAAGLRPWGARSPEAASAFRCIDSSHLPSLRKVVPTLFLKCYFMQYTVPSEQGSGPEESLQCIEGIAAV

SEQ ID NO: 9024 - protein, 174 aa, Homo sapiens
MDTMMLNVRNLFEQLVRRVEILSEGNEVQFIQLAKDFEDFRKKWQRTDHELGKYKDLLMKAETERSALDVKLKHARNQVDVEIKRRQRAEADCEKLERQIQLIREMLMCDTSGSIQLSEEQKSALAFLNRGQPSSSNAGNKRLSTIDESGSILSDISFDKTDESLDWDSSLVKT

SEQ ID NO: 9025 - protein, 967 aa, Homo sapiens
MDWTPRLPSRHIISELEHLTFVNTDVGRCRAWLRLALNDGLMECYLKLLLQEQARLHEYYQPTALLRDAEEGEFLLSFLQGLTSLSFELSYKSAILNEWTLTPLALSGLCPLSELDPLSTSGAELQRKESLDSISHSSGSEDIEVHHSGHKIRRNQKLTASSLSLDTASSSQLSCSLNSDSCLLQENGSKSPDHCEEPMSCDSDLGTANAEDSDRSLQEVLLEFSKAQVNSVPTNGLSQETEIPTPQASLSLHGLNTSTYLHCEAPAEPLPAQAASGTQDGVHVQEPRPQAPSPLDLQQPVESTSGQQPSSTVSETAREVGQGNGLQKAQAHDGAGLKLVVSSPTSPKNKSWISEDDFYRPSREQPLESASDHPIASYRGTPGSRPGLHRHFSQEPRKNCSLGALDQACVPSPGRRQAQAAPSQGHKSFRVVHRRQMGLSNPFRGLMKLGTVERRGAMGIWKELFCELSPLEFRLYLSNEEHTCVENCSLLRCESVGPAHSDGRFELVFSGKKLALRASSQDEAEDWLDRVREALQKVRPQQEDEWVNVQYPDQPEEPPEAPQGCLSPSDLLSEPAALQGTQFDWSSAQVPEPDAIKESLLYLYMDRTWMPYIFSLSLEALKCFRIRNNEKMLSDSHGVETIRDILPDTSLGGPSFFKIITAKAVLKLQAGNAEEAALWRDLVRKVLASYLETAEEAVTLGGSLDENCQEVLKFATRENGFLLQYLVAIPMEKGLDSQGCFCAGCSRQIGFSFVRPKLCAFSGLYYCDICHQDDASVIPARIIHNWDLTKRPICRQALKFLTQIRAQPLINLQMVNASLYEHVERMHLIGRRREQLKLLGDYLGLCRSGALKELSKRLNHRNYLLESPHRFSVADLQQIADGVYEGFLKALIEFASQHVYHCDLCTQRGFICQICQHHDIIFPFEFDTTVRCAECKTVFHQSCQAVVKKGCPRCARRRKYQEQNIFA

SEQ ID NO: 9026 - protein, 481 aa, Homo sapiens; identical to SEQ ID NO: 6507

SEQ ID NO: 9027 - protein, 153 aa, Homo sapiens
MAPGSRGERSSFRSRRGPGVPSPQPDVTMLSRLLKEHQAKQNERKELQEKRRREAITAATCLTEALVDHLNVGVAQAYMNQRKLDHEVKTLQVQAAQFAKQTGQWIGMVENFNQALKEIGDVENWARSIELDMRTIATALEYVYKGQLQSAPS

SEQ ID NO: 9028 - protein, 435 aa, Homo sapiens
MLWNFKPHARAYRYVGHKDVVTSVQFSPHGNLLASASRDRTVRLWIPDKRGKFSEFKAHTAPVRSVDFSADGQFLATASEDKSIKVWSMYRQRFLYSLYRHTHWVRCAKFSPDGRLIVSCSEDKTIKIWDTTNKQCVNNFSDSVGFANFVDFNPSGTCIASAGSDQTVKVWDVRVNKLLQHYQVHSGGVNCISFHPSGNYLITASSDGTLKILDLLEGRLIYTLQGHTGPVFTVSFSKGGELFASGGADTQVLLWRTNFDELHCKGLTKRNLKRLHFDSPPHLLDIYAAPHPHEEKVETVEINPKLEVIDLQISTPPVMDILSFDSTTTTETSGRTLPDKGEEACGYFLNPSLMSPECLPTTTKKKTEDMSDLPCESQRSIPLAVTDALEHIMEQLNVLTQTVSILEQRLTLTEDKLKDCLENQQKLFSAVQQKS

SEQ ID NO: 9029 - protein, 198 aa, Homo sapiens; identical to SEQ ID NO: 5709

SEQ ID NO: 9030 - protein, 198 aa, Homo sapiens; identical to SEQ ID NO: 5709

SEQ ID NO: 9031 - protein, 164 aa, Homo sapiens
MMEGNGTENSCSRTRGWLQQDNDAKPWLWKFSNCFSRPEQTLPHSPQTKEYMENKKVAVELKDVPSPLHAGSKLFPAVPLPDIRSLQQPKIQLSSVPKVSCCAHCPNEPSTSPMRFGGGGGGSGGTSSLIHPGALLDSQSTRTITCQVGSGFAFQSASSLQNAS

SEQ ID NO: 9032 - protein, 284 aa, Homo sapiens
MLSVVENGLDPQAAIPVIKKKLVGSVKALQKQYVSLDTVVTSEDGDANTMCSALEAVFIHGLHAKHIRAEAGGKRKKSAHQKPLPQPVFWPLLKAVTHKHIISELEHLTFVNTDVGRCRAWLRLALNDGLMECYLKLLLQEQARLQLQRKESLDSISHSSGSEDIEVHHSGHKIRRNQKLTASSLSLDTASSSQLSCSLNSDSCLLQENGSKSPDHCEEPMSCDSDLGTANAEDSDRSLQDIKIFSWAQWLTPVIPALWEAEAGGSQRQQIETFLANTVKPHLY

SEQ ID NO: 9033 - protein, 1093 aa, Homo sapiens
MGGKAWPRRAVGTAGGPCAEQISAPFQTLLMPHLPLASFRPPFWGLRHSRGLPRFHSVSTQSEPHGSPISRRNREAKQKRLREKQATLEAEIAGESKSPAESIKAWRPKELVLYEIPTKPGEKKDVSGPLPPAYSPRYVEAAWYPWWVREGFFKPEYQARLPQATGETFSMCIPPPNVTGSLHIGHALTVAIQDALVRWHRMRGDQVLWVPGSDHAGIATQAVVEKQLWKERGVRRHELSREAFLREVWQWKEAKGGEICEQLRALGASLDWDRECFTMDVGSSVAVTEAFVRLYKAGLLYRNHQLVNWSCALRSAISDIEVENRPLPGHTQLRLPGCPTPVSFGLLFSVAFPVDGEPDAEVVVGTTRPETLPGDVAVAVHPDDSRYTHLHGRQLRHPLMGQPLPLITDYAVQPHVGTGAVKVTPAHSPADAEMGARHGLSPLNVIAEDGTMTSLCGDWLQGLHRFVAREKIMSVLSERGLFRGLQNHPMVLPICSRSGDVIEYLLKNQWFVRCQEMGARAAKAVESGALELSPSFHQKNWQHWFSHIGDWCVSRQLWWGHQIPAYLVVEDHAQGEEDCWVVGRSEAEAREVAAELTGRPGAELTLERDPDVLDTWFSSALFPFSALGWPQETPDLARFYPLSLLETGSDLLLFWVGRMVMLGTQLTGQLPFSKVLLHPMVRDRQGRKMSKSLGNVLDPRDIISGVEMQLLQEKLRSGNLDPAELAIVAAAQKKDFPHGIPECGTDALRFTLCSHGVQAGDLHLSVSEVQSCRHFCNKIWNALRFILNALGEKFVPQPAEELSPSSPMDAWILSRLALAAQECERGFLTRELSLVTHALHHFWLHNLCDVYLEAVKPVLWHSPRPLGPPQVLFSCADLGLRLLAPLMPFLAEELWQRLPPRPGCPPAPSISVAPYPSACSLEHWRQPELERRFSRVQEVVQVLRALRATYQLTKARPRVLLQSSEPGDQGLFEAFLEPLGTLGYCGAVGLLPPGTAAPSGWAQAPLSDTAQVYMELQGLVDPQIQLPLLAARRYKLQKQLDSLTARTPSEGEAGTQRQQKLSSLQLELSKLDKAASHLRQLMDEPPAPGSPEL

SEQ ID NO: 9034 - protein, 1206 aa, Homo sapiens
MTSAAEIKKPPVAPKPKFVVANNKPAPPPIAPKPDIVISSVPQSTKKMKPAIAPKPKVLKTSPVREIGQSPSRKIMLNLEGHKQELAESTDNFNCKYEGNQSNDYISPMCSCSSECIHKLGHRENLCVKQLVLEPLEMNENLENSKIDETLTIKTRSKCDLYGEKAKNQGGVVLKASVLEEELKDALIHQMPPFISAQKHRPTDSPEMNGGCNSNGQFRIEFADLSPSPSSFEKVPDHHSCHLQLPSDECEHFETCQDDSEKSNNCFQSSELEALENGKRSTLISSDGVSKKSEVKDLGPLEIHLVPYTPKFPTPKPRKTRTARLLRQKCVDTPSESTEEPGNSDSSSSCLTENSLKINKISVLHQNVLCKQEQVDKMKLGNKSELNMESNSDAQDLVNSQKAMCNETTSFEKMAPSFDKDSNLSSDSTTVDGSSMSLAVDEGTGFIRCTVSMSLPKQLKLTCNEHLQSGRNLGVSAPQMQKESVIKEENSLRIVPKKPQRHSLPATGVLKKAASEELLEKSSYPSSEEKSSEKSLERNHLQHLCAQNRGVSSSFDMPKRASEKPVWKLPHPILPFSGNPEFLKSVTVSSNSEPSTALTKPRAKSLSAMDVEKCTKPCKDSTKKNSFKKLLSMKLSICFMKSDFQKFWSKSSQLGDTTTGHLSSGEQKGIESDWQGLLVGEEKRSKPIKAYSTENYSLESQKKRKKSRGQTSAANGLRAESLDDQMLSRESSSQAPYKSVTSLCAPEYENIRHYEEIPEYENLPFIMAIRKTQELEWQNSSSMEDADANVYEVEEPYEAPDGQLQLGPRHQHSSSGASQEEQNDLGLGDLPSDEEEIINSSDEDDVSSESSKGEPDPLEDKQDEDNGMKSKVHHIAKEIMSSEKVFVDVLKLLHIDFRDAVAHASRQLGKPVIEDRILNQILYYLPQLYELNRDLLKELEERMLHWTEQQRIADIFVKKGPYLKMYSTYIKEFDKNIALLDEQCKKNPGFAAVVREFEMSPRCANLALKHYLLKPVQRIPQYRLLLTDYLKNLIEDAGDYRDTQDALAVVIEVANHANDTMKQGDNFQKLMQIQYSLNGHHEIVQPGRVFLKEGILMKLSRKVMQPRMFFLFNDALLYTTPVQSGMYKLNNMLSLAGMKVRKPTQEAYQNELKIESVERSFILSASSATERDEWLEAISRAIEEYAKKRITFCPSRSLDEADSENK

SEQ ID NO: 9035 - protein, 144 aa, Homo sapiens
MDKDSQGLLDSSLMASGTASRSEDEESLAGQKRASSQALGTIPKRRSSSRTLYRFIKRKKFDDELVESSLAKSSTRAKGASGVEPGRCSGSEPSSSEKKKVSKAPSTPVPPSPAPAPGLTKRVKKSKQPLQVTKDLGRWKPADD

SEQ ID NO: 9036 - protein, 269 aa, Homo sapiens; identical to SEQ ID NO: 7726

SEQ ID NO: 9037 - protein, 166 aa, Homo sapiens
MANDPLEGFHEVNLASPTSPDLLGVYESGTQEQTTSPSVIYRPHPSALSSVPIQANALDVSELPTQPVYSSPRRLNCAEISSISFHVTDPAPCSTSGVTAGLTKLTTRKDNYNAEREFLQGATITEACDGSDDIFGLSTDSLSRLRSPSVLEVREKGYERLKEELA

SEQ ID NO: 9038 - protein, 129 aa, Homo sapiens
MDTMMLNVRNLFEQLVRRVEILSEGNEVQFIQLAKDFEDFRKKWQRTDHELGKYKDLLMKAETERSALDVKLKHARNQVDVEIKRRQRAEADCEKLERQIQLIREMLMCDTSGSIQLSEEQKSALAFLN

SEQ ID NO: 9039 - protein, 161 aa, Homo sapiens
MTLRCLEPSGNGGEGTRSQWGTAGSAEEPSPQAARLAKALRELGQTGWYWGSMTVNEAKEKLKEAPEGTFLIRDSSHSDYLLTISVKTSAGPTNLRIEYQDGKFRLDSIICVKSKLKQFDSVVHLIDYYVQMCKDKRTGPEAPRNGTVHLYLTKPLYTSAP

SEQ ID NO: 9040 - protein, 462 aa, Homo sapiens; identical to SEQ ID NO: 5758

SEQ ID NO: 9041 - protein, 191 aa, Homo sapiens; identical to SEQ ID NO: 4694

SEQ ID NO: 9042 - protein, 403 aa, Homo sapiens
MASSSVPPATVSAATAGPGPGFGFASKTKKKHFVQQKVKVFRAADPLVGVFLWGVAHSINELSQVPPPVMLLPDDFKASSKIKEYCPQVFRNLRDRFGIDDQDYLVSLTRNPPSESEGSDGRFLISYDRTLVIKEVSSEDIADMHSNLSNYHQYIVKCHGNTLLPQFLGMYRVSVDNEDSYMLVMRNMFSHRLPVHRKYDLKGSLVSREASDKEKVKELPTLKDMDFLNKNQKVYIGEEEKKIFLEKLKRDVEFLVQLKIMDYSLLLGIHDIIRGSEPEEEAPVREDESEVDGDCSLTGPPALVGSYGTSPEGIGGYIHSHRPLGPGEFESFIDVYAIRSAEGAPQKEVYFMGLIDILTQYDAKKKAAHAAKTVKHGAGAEISTVHPEQYAKRFLDFITNIFA

SEQ ID NO: 9043 - protein, 191 aa, Homo sapiens
KIEVIEIMTDRGSGKKRGFAFVTFDDHDSVDKIVIQKYHTVNGHNCEVRKALSKQEMASASSSQRGRSGSGNFGGGRGGGFGGNDNFGRGGNFSGRGGFGGSRGGGGYGGSGDGYNGFGNDGSNFGGGGSYNDFGNYNNQSSNFGPMKGGNFGGRSSGPYGGGGQYFAKPRNQGGYGGSSSSSSYGSGRRF

SEQ ID NO: 9044 - protein, 180 aa, Homo sapiens
MELTIFILRLAIYILTFPLYLLNFLGLWSWICKKWFPYFLVRFTVIYNEQMASKKRELFSNLQEFAGPSGKLSLLEVGCGTGANFKFYPPGCRVTCIDPNPNFEKFLIKSIAENRHLQFERFVVAAGENMHQVADGSVDVVVCTLVLCSVKNQERILREVCRVLRPGGAFYFMEHVAAEC

SEQ ID NO: 9045 - protein, 476 aa, Homo sapiens
MGLKKMKGLSYDEAFAMANDPLEGFHEVNLASPTSPDLLGVYESGTQEQTTSPSVIYRPHPSALSSVPIQANALDVSELPTQPVYSSPRRLNCAEISSISFHVTDPAPCSTSGVTAGLTKLTTRKDNYNAEREFLQGATITEACDGSDDIFGLSTDSLSRLRSPSVLEVREKGYERLKEELAKAQRELKLKDEECERLSKVRDQLGQELEELTASLFEEAHKMVREANIKQATAEKQLKEAQGKIDVLQAEVAALKTLVLSSSPTSPTQEPLPGGKTPFKKGHTRNKSTSSAMSGSHQDLSVIQPIVKDCKEADLSLYNEFRLWKDEPTMDRTCPFLDKIYQEDIFPCLTFSKSELASAVLEAVENNTLSIEPVGLQPIRFVKASAVECGGPKKCALTGQSKSCKHRIKLGDSSNYYYISPFCRYRITSVCNFFTYIRYIQQGLVKQQDVDQMFWEVMQLRKEMSLAKLGYFKEEL

SEQ ID NO: 9046 - protein, 111 aa, Homo sapiens
MDTMMLNVRNLFEQLVRRVEILSEGNEVQFIQLAKDFEDFRKKWQRTDHELGKYKDLLMKAETERSALDVKLKHARNQVDVEIKRRQRAEADCEKLERQIQLIREMLMCDT

SEQ ID NO: 9047 - protein, 107 aa, Homo sapiens
MIKNLEVQLRRATDEMKAYISSDQQEKRKAIREQYTKNTAEQENLGKKLREKQKVIRESHGPNMKQAKMWRDLEQLMECKKQCFLKQQSQTSIGQVIQEGGEDRLIL

SEQ ID NO: 9048 - protein, 923 aa, Homo sapiens
MCIPPPNVTGSLHIGHALTVAIQDALVRWHRMRGDQVLWVPGSDHAGIATQAVVEKQLWKERGVRRHELSREAFLREVWQWKEAKGGEICEQLRALGASLDWDRECFTMDVGSSVAVTEAFVRLYKAGLLYRNHQLVNWSCALRSAISDIEVENRPLPGHTQLRLPGCPTPVSFGLLFSVAFPVDGEPDAEVVVGTTRPETLPGDVAVAVHPDDSRYTHLHGRQLRHPLMGQPLPLITDYAVQPHVGTGAVKVTPAHSPADAEMGARHGLSPLNVIAEDGTMTSLCGDWLQGLHRFVAREKIMSVLSERGLFRGLQNHPMVLPICSRSGDVIEYLLKNQWFVRCQEMGARAAKAVESGALELSPSFHQKNWQHWFSHIGDWCVSRQLWWGHQIPAYLVVEDHAQGEEDCWVVGRSEAEAREVAAELTGRPGAELTLERDPDVLDTWFSSALFPFSALGWPQETPDLARFYPLSLLETGSDLLLFWVGRMVMLGTQLTGQLPFSKVLLHPMVRDRQGRKMSKSLGNVLDPRDIISGVEMQLLQEKLRSGNLDPAELAIVAAAQKKDFPHGIPECGTDALRFTLCSHGVQAGDLHLSVSEVQSCRHFCNKIWNALRFILNALGEKFVPQPAEELSPSSPMDAWILSRLALAAQECERGFLTRELSLVTHALHHFWLHNLCDVYLEAVKPVLWHSPRPLGPPQVLFSCADLGLRLLAPLMPFLAEELWQRLPPRPGCPPAPSISVAPYPSACSLEHWRQPELERRFSRVQEVVQVLRALRATYQLTKARPRVLLQSSEPGDQGLFEAFLEPLGTLGYCGAVGLLPPGTAAPSGWAQAPLSDTAQVYMELQGLVDPQIQLPLLAARRYKLQKQLDSLTARTPSEGEAGTQRQQKLSSLQLELSKLDKAASHLRQLMDEPPAPGSPEL

SEQ ID NO: 9049 - protein, 691 aa, Homo sapiens
MEESPLSRAPSRGGVNFLNVARTYIPNTKVECHYTLPPGTMPSASDWIGIFKVEAACVRDYHTFVWSSVPESTTDGSPIHTSVQFQASYLPKPGAQLYQFRYVNRQGQVCGQSPPFQFREPRPMDELVTLEEADGGSDILLVVPKATVLQNQLDESQQERNDLMQLKLQLEGQVTELRSRVQELERALATARQEHTELMEQYKGISRSHGEITEERDILSRQQGDHVARILELEDDIQTISEKVLTKEVELDRLRDTVKALTREQEKLLGQLKEVQADKEQSEAELQVAQQENHHLNLDLKEAKSWQEEQSAQAQRLKDKVAQMKDTLGQAQQRVAELEPLKEQLRGAQELAASSQQKATLLGEELASAAAARDRTIAELHRSRLEVAEVNGRLAELGLHLKEEKCQWSKERAGLLQSVEAEKDKILKLSAEILRLEKAVQEERTQNQVFKTELAREKDSSLVQLSESKRELTELRSALRVLQKEKEQLQEEKQELLEYMRKLEARLEKVADEKWNEDATTEDEEAAVGLSCPAALTDSEDESPEDMRLPPYGLCERGDPGSSPAGPREASPLVVISQPAPISPHLSGPAEDSSSDSEAEDEKSVLMAAVQSGGEEANLLLPELGSAFYDMASGFTVGTLSETSTGGPATPTWKECPICKERFPAESDKDALEDHMDGHFFFSTQDPFTFE

SEQ ID NO: 9050 - protein, 121 aa, Homo sapiens
MNESKPGDSQNLACVFCRKHDDCPNKYGEKKTKEKWNLTVHYYCLLMSSGIWQRGKEEEGVYGFLIEDIRKEVNRASKLKCCVCKKNGASIGCVAPRCKRSYHFPCGLQRECIFQFTGNFA

SEQ ID NO: 9051 - protein, 218 aa, Homo sapiens; identical to SEQ ID NO: 5651

SEQ ID NO: 9052 - protein, 631 aa, Homo sapiens; identical to SEQ ID NO: 5339

SEQ ID NO: 9053 - protein, 377 aa, Homo sapiens; identical to SEQ ID NO: 6495

SEQ ID NO: 9054 - protein, 377 aa, Homo sapiens; identical to SEQ ID NO: 6495

SEQ ID NO: 9055 - protein, 257 aa, Homo sapiens; identical to SEQ ID NO: 9005

SEQ ID NO: 9056 - protein, 481 aa, Homo sapiens; identical to SEQ ID NO: 6507

SEQ ID NO: 9057 - protein, 198 aa, Homo sapiens; identical to SEQ ID NO: 5709

SEQ ID NO: 9058 - protein, 114 aa, Homo sapiens
MTTRQATKDPLLRGVSPTPSKIPVRSQKRTPFPTVTSCAVDQENQDPRRWVQKPPLNIQRPLVDSAGPRPKARHQAETSQRLVGISQPRNPLEELRPSPRGQNVGPGPPAQTEA

SEQ ID NO: 9059 - protein, 481 aa, Homo sapiens; identical to SEQ ID NO: 6507

SEQ ID NO: 9060 - protein, 131 aa, Homo sapiens; identical to SEQ ID NO: 7306

SEQ ID NO: 9061 - protein, 254 aa, Homo sapiens; identical to SEQ ID NO: 5485

SEQ ID NO: 9062 - protein, 923 aa, Homo sapiens
MCIPPPNVTGSLHIGHALTVAIQDALVRWHRMRGDQVLWVPGSDHAGIATQAVVEKQLWKERGVRRHELSREAFLREVWQWKEAKGGEICEQLRALGASLDWDRECFTMDVGSSVAVTEAFVRLYKAGLLYRNHQLVNWSCALRSAISDIEVENRPLPGHTQLRLPGCPTPVSFGLLFSVAFPVDGEPDAEVVVGTTRPETLPGDVAVAVHPDDSRYTHLHGRQLRHPLMGQPLPLITDYAVQPHVGTGAVKVTPAHSPADAEMGARHGLSPLNVIAEDGTMTSLCGDWLQGLHRFVAREKIMSVLSEWGLFRGLQNHPMVLPICSRSGDVIEYLLKNQWFVRCQEMGARAAKAVESGALELSPSFHQKNWQHWFSHIGDWCVSRQLWWGHQIPAYLVVEDHAQGEEDCWVVGRSEAEAREVAAELTGRPGAELTLERDPDVLDTWFSSALFPFSALGWPQETPDLARFYPLSLLETGSDLLLFWVGRMVMLGTQLTGQLPFSKVLLHPMVRDRQGRKMSKSLGNVLDPRDIISGVEMQVLQEKLRSGNLDPAELAIVAAAQKKDFPHGIPECGTDALRFTLCSHGVQAGDLHLSVSEVQSCRHFCNKIWNALRFILNALGEKFVPQPAEELSPSSPMDAWILSRLALAAQECERGFLTRELSLVTHALHHFWLHNLCDVYLEAVKPVLWHSPRPLGPPQVLFSCADLGLRLLAPLMPFLAEELWQRLPPRPGCPPAPSISVAPYPSACSLEHWRQPELERRFSRVQEVVQVLRALRATYQLTKARPRVLLQSSEPGDQGLFEAFLEPLGTLGYCGAVGLLPPGAAAPSGWAQAPLSDTAQVYMELQGLVDPQIQLPLLAARRYKLQKQLDSLTARTPSEGEAGTQRQQKLSSLQLELSKLDKAASHLRQLMDEPPAPGSPEL

SEQ ID NO: 9063 - protein, 1742 aa, Homo sapiens
MMEGNGTENSCSRTRGWLQQDNDAKPWLWKFSNCFSRPEQTLPHSPQTKEYMENKKVAVELKDVPSPLHAGSKLFPAVPLPDIRSLQQPKIQLSSVPKVSCCAHCPNEPSTSPMRFGGGGGGSGGTSSLIHPGALLDSQSTRTITCQVGSGFAFQSASSLQNASARNNLAGIASDFPSMCLESNLSSCKHLPCCGKLHFQSCHGNVHKLHQFPSLQGCTSAGYFPCSDFTSGAPGHLEEHISQSELTPHLCTNSLHLNVVPPVCLKGSLYCEDCLNKPARNSIIDAAKVWPNIPPPNTQPAPLAVPLCNGCGTKGTGKETTLLLATSLGKAASKFGSPEVAVAGQVLENLPPIGVFWDIENCSVPSGRSATAVVQRIREKFFKGHREAEFICVCDISKENKEVIQELNNCQVTVAHINATAKNAADDKLRQSLRRFANTHTAPATVVLVSTDVNFALELSDLRHRHGFHIILVHKNQASEALLHHANELIRFEEFISDLPPRLPLKMPCHTLLYVYNLPANKDGKSVSNRLRRLSDNCGGKVLSITGCSAILRFINQDSAERAQKRMENEDVFGNRIIVSFTPKNRELCETKSSNAIADKVKSPKKLKNPKLCLIKDASEQSSSAKATPGKGSQANSGSATKNTNVKSLQELCRMESKTGHRNSEHQQGHLRLVVPTHGNSSAAVSTPKNSGVAEPVYKTSQKKENLSARSVTSSPVEKKDKEETVFQVSYPSAFSKLVASRQVSPLLASQSWSSSRSMSPNLLNRASPLAFNIANSSSEADCPDPFANGADVQVSNIDYRLSRKELQQLLQEAFARHGKVKSVELSPHTDYQLKAVVQMENLQDAIGAVNSLHRYKIGSKKILVSLATGAASKSLSLLSAETMSVLQDAPACCLPLFKFTDIYEKKFGHKLNVSDLYKLTDTVAIREQGNGRLVCLLPSSQARQSPLGSSQSHDGSSTNCSPIIFEELEYHEPVCRQHCSNKDFSEHEFDPDSYKIPFVILSLKTFAPQVHSLLQTHEGTVPLLSFPDCYIAEFGDLEVVQENQGGVPLEHFITCVPGVNIATAQNGIKVVKWIHNKPPPPNTDPWLLRSKSPVGNPQLIQFSREVIDLLKSQPSCVIPISHFIPSYHHHFAKQCRVSDYGYSKLIELLEAVPHVLQILGMGSKRLLTLTHRAQVKRFTQDLLKLLKSQASKQVIVREFSQAYHWCFSKDWDVTEYGVCELIDIVSEIPDTTICLSQQDNEMVICIPKRERTQDEIERTKQFSKDVVDLLRHQPHFRMPFNKFIPSYHHHFGRQCKLAYYGFTKLLELFEAIPDTLQVLECGEEKILTLTEVERFKALAAQFVKLLRSQKDNCLMMTDLLTEYAKTFGYTFRLQDYDVSSISALTQKLCHVVKVADIESGRQIQLINRKSLRSLTAQLLVLLMSWEGTTHLSVEELKRHYESTHNTPLNPCEYGFMTLTELLKSLPYLVEVFTNDKMEECVKLTSLYLFAKNVRSLLHTYHYQQIFLHEFSMAYTKYVGETLQPKTYGHSSVEELLGAIPQVVWIKGHGHKRIVVLKNDMKSRLSSLSLSPANHENQPSEGERILEVPESHTASELKLGADGSGPSHTEQELLRLTDDSPVDLLCAPVPSCLPSPQLRPDPVILQSADLIQFEERPQEPSEIMILNQEEKMEIPIPGKSKTLTSDSSSSCISAAVPVPPCPSSETSESLLSKDPVESPAKKQPKNRVKLAANFSLAPITKL

SEQ ID NO: 9064 - protein, 257 aa, Homo sapiens; identical to SEQ ID NO: 9005

SEQ ID NO: 9065 - protein, 377 aa, Homo sapiens; identical to SEQ ID NO: 6495

SEQ ID NO: 9066 - protein, 164 aa, Homo sapiens; identical to SEQ ID NO: 8707

SEQ ID NO: 9067 - protein, 130 aa, Homo sapiens
MDTMMLNVRNLFEQLVRRVEILSEGNEVQFIQLAKDFEDFRKKWQRTDHELGKYKDLLMKAETERSALDVKLKHARNQVDVEIKRRQRAEADCEKLERQIQLIREMLMCDTSGSIQLSEEQKSALAFLNR

SEQ ID NO: 9068 - protein, 107 aa, Homo sapiens
MDTMMLNVRNLFEQLVRRVEILSEGNEVQFIQLAKDFEDFRKKWQRTDHELGKYKDLLMKAETERSALDVKLKHARNQVDVEIKRRQRAEADCEKLERQIQLIREML

SEQ ID NO: 9069 - protein, 293 aa, Homo sapiens
MDTMMLNVRNLFEQLVRRVEILSEGNEVQFIQLAKDFEDFRKKWQRTDHELGKYKDLLMKAETERSALDVKLKHARNQVDVEIKRRQRAEADCEKLERQIQLIREMLMCDTSGSIQLSEEQKSALAFLNRGQPSSSNAGNKRLSTIDESGSILSDISFDKTDESLDWDSSLVKTFKLKKREKRRSTSRQFVDGPPGPVKKTRSIGSAVDQGNESIVAKTTVTVPNDGGPIEAVSTIETVPYWTRSRRKTGTLQPWNSDSTLNSRQLEAAETDSVGTPQSNGGMRLHDFVSKTV

SEQ ID NO: 9070 - protein, 167 aa, Homo sapiens; identical to SEQ ID NO: 5257

SEQ ID NO: 9071 - protein, 293 aa, Homo sapiens
MLREPRKQGLAGRAHLLSPGTTGSMKTPVELAVSGMQTLGLQHRCRGGYRVKARTSYVDETLFGSPAGTRPTPPDFDPPWVEKANRTRGVGKEASKALGAKGSCETTPSRGSTPTLTPRKKNKYRPISHTPSYCDESLFGSRSEGASFGAPRMAKGDAAKLRALLWTPPPTPRGSHSPRPREAPLRAIHPAGPSKTEPGPAADSQKLSMGGLHSSRPLKRGLSHSLTHLNVPSTGHPATSAPHTNGPQDLRPSTSGVTFRSPLVTSRARSVSISVPSTPRRGGATQKPKPPWK

SEQ ID NO: 9072 - protein, 1093 aa, Homo sapiens; identical to SEQ ID NO: 9033

SEQ ID NO: 9073 - protein, 91 aa, Homo sapiens
MGKKTKRTADSSSSEDEEEYVVEKVLDRRVVKGQVEYLLKWKGFSEEHNTWEPEKNLDCPELISEFMKKYKKMKEGENNKPREKSESNKRK

SEQ ID NO: 9074 - protein, 129 aa, Homo sapiens; identical to SEQ ID NO: 6440

SEQ ID NO: 9075 - protein, 377 aa, Homo sapiens; identical to SEQ ID NO: 6495

SEQ ID NO: 9076 - protein, 676 aa, Homo sapiens; identical to SEQ ID NO: 4780

SEQ ID NO: 9077 - protein, 151 aa, Homo sapiens
MDTMMLNVRNLFEQLVRRVEILSEGNEVQFIQLAKDFEDFRKKWQRTDHELGKYKDLLMKAETERSALDVKLKHARNQVDVEIKRRQRAEADCEKLERQIQLIREMLMCDTSGSIQLSEEQKSALAFLNRGQPSSSNAGNKRLSTIDESGS

SEQ ID NO: 9078 - protein, 481 aa, Homo sapiens; identical to SEQ ID NO: 6507

SEQ ID NO: 9079 - protein, 254 aa, Homo sapiens; identical to SEQ ID NO: 5485

SEQ ID NO: 9080 - protein, 481 aa, Homo sapiens; identical to SEQ ID NO: 6507

SEQ ID NO: 9081 - protein, 656 aa, Homo sapiens
MLGPSWDGDEAESTGEIIRLGDTAHTFSLRSNGAQCPNEMLSKKALASPSSKSHEDMLYPPSVLSKSRTSFVEDTETLSVSGIPNARKLGEPIRAAIPLHPPYHPSEPRAPCPIGKEYLHSSHCSPAVNSTGEHTEFSGDLDDGLFLISKLPKGSKWEVYPAQVQGAARKPPKGKRNENRATASSCNSPFPQRPRKRLTEQELHDVSEKLSQRLSELDWMLKSALGDRIKEKTDHKEENTGNEEVEDGTEETLSQHSDGIVEYGPKKSRPGLSMRRKPPYRSHSLSPSPVNKHKQFHLERKRQRKPRETDVRQFQAQAFTEAFERELRRHKVQENIGPLRIHEKEEETEKIYRGEAVRKGTPECSQPWKIYSRKTTTQSLRGGLPKPNKAVPMKVSEHSLLPLMLEQFPFLYVSGPTLSKMWKQQIAQVEQLKKEACRENRSKKKLQDEIEEALRRHDLLTTLVKKEYEHNKRLQDFKDCIRRQRLTQSKIKENRQQIVRARKYYDDYRVQLCAKMMRMRTREEMIFKKLFEEGLNIQKQRLRDLRNYAKEKRDEQRRRHQDELDSMENYYKDQFSLLAEAISQEHQELKAREKSQAQTLHKVKRELRSKMEKEIQQLQDMITQNDDDVFFRELEAERFRSRLQLASFQYSKSPSL

SEQ ID NO: 9082 - protein, 168 aa, Homo sapiens
MQTFLKGKRVGYWLSEKKIKKLNFQAFAELCRKRGMEVVQLNLSRPIEEQGPLDVIIHKLTDVILEADQNDSQSLELVHRFQEYIDAHPETIVLDPLPAIRTLLDRSKSYELIRKIEAYMEDDRICSPPFMELTSLCGDDTMRLLEKNGLTFPFICKTRVAHGTNSHE

SEQ ID NO: 9083 - protein, 736 aa, Homo sapiens
MLIPALQISDSESVGLEDGIEQSAYLTESKMNESKPGDSQNLACVFCRKHDDCPNKYGEKKTKEKWNLTVHYYCLLMSSGIWQRGKEEEGVYGFLIEDIRKEVNRASKLKCCVCKKNGASIGCVAPRCKRSYHFPCGLQRECIFQFTGNFASFCWDHRPVQIITSNNYRESLPCTICLEFIEPIPSYNILRSPCCKNAWFHRDCLQVQAINAGVFFFRCTICNNSDIFQKEMLRMGIHIPEKDASWELEENAYQELLQHYERCDVRRCRCKEGRDYNAPDSKWEIKRCQCCGSSGTHLACSSLRSWEQNWECLECRGIIYNSGEFQKAKKHVLPNSNNVGITDCLLEESSPKLPRQSPGSQSKDLLRQGSKFRRNVSTLLIELGFQIKKKTKRLYINKANIWNSALDAFRNRNFNPSYAIEVAYVIENDNFGSEHPGSKQEFLSLLMQHLENSSLFEGSLSKNLSLNSQALKENLYYEAGKMLAISLVHGGPSPGFFSKTLFNCLVYGPENTQPILDDVSDFDVAQIIIRINTATTVADLKSIINECYNYLELIGCLRLITTLSDKYMLVKDILGYHVIQRVHTPFESFKQGLKTLGVLEKIQAYPEAFCSILCHKPESLSAKILSELFTVHTLPDVKALGFWNSYLQAVEDGKSTTTMEDILIFATGCSSIPPAGFKPTPSIECLHVDFPVGNKCNNCLAIPITNTYKEFQENMDFTIRNTLRLEKEESSHYIGH

SEQ ID NO: 9084 - protein, 376 aa, Homo sapiens
MANSANTNTVPKLYRSVIEDVINDVRDIFLDDGVDEQVLMELKTLWENKLMQSRAVDGFHSEEQQLLLQVQQQHQPQQQQHHHHHHHQQAQPQQTVPQQAQTQQVLIPASQQATAPQVIVPDSKLIQHMNASNMSAAATAATLALPAGVTPVQQILTNSGQLLQVVRAANGAQYIFQPQQSVVLQQQVIPQMQPGGVQAPVIQQVLAPLPGGISPQTGVIIQPQQILFTGNKTQVIPTTVAAPTPAQAQITATGQQQPQAQPAQTQAPLVLQVDGTGDTSSEEDEDEEEDYDDDEEEDKEKDGAEDGQVEEEPLNSEDDVSDEEGQELFDTENVVVCQYDKIHRSKNKWKFHLKDGIMNLNGRDYIFSKAIGDAEW

SEQ ID NO: 9085 - protein, 78 aa, Homo sapiens
METDCNPMELSSMSGFEEGSELNGFEGTDMKDMRLEAEAVVNDVLFAVNNMFVSKSLRCADDVAYINVETKERNRYCL

SEQ ID NO: 9086 - protein, 248 aa, Homo sapiens; identical to SEQ ID NO: 7960

SEQ ID NO: 9087 - protein, 789 aa, Homo sapiens
MSAQTSPAEKGLNPGLMCQESYACSGTDEAIFECDECCSLQCLRCEEELHRQERLRNHERIRLKPGHVPYCDLCKGLSGHLPGVRQRAIVRCQTCKINLCLECQKRTHSGGNKRRHPVTVYNVSNLQESLEAEEMDEETKRKKMTEKVVSFLLVDENEEIQVTNEEDFIRKLDCKPDQHLKVVSIFGNTGDGKSHTLNHTFFYGREVFKTSPTQESCTVGVWAAYDPVHKVAVIDTEGLLGATVNLSQRTRLLLKVLAISDLVIYRTHADRLHNDLFKFLGDASEAYLKHFTKELKATTARCGLDVPLSTLGPAVIIFHETVHTQLLGSDHPSEVPEKLIQDRFRKLGRFPEAFSSIHYKGTRTYNPPTDFSGLRRALEQLLENNTTRSPRHPGVIFKALKALSDRFSGEIPDDQMAHSSFFPDEYFTCSSLCLSCGVGCKKSMNHGKEGVPHEAKSRCRYSHQYDNRVYTCKACYERGEEVSVVPKTSASTDSPWMGLAKYAWSGYVIECPNCGVVYRSRQYWFGNQDPVDTVVRTEIVHVWPGTDGFLKDNNNAAQRLLDGMNFMAQSVSELSLGPTKAVTSWLTDQIAPAYWRPNSQILSCNKCATSFKDNDTKHHCRACGEGFCDSCSSKTRPVPERGWGPAPVRVCDNCYEARNVQLAVTEAQVDDEGGTLIARKVGEAVQNTLGAVVTAIDIPLGLVKDAARPAYWVPDHEILHCHNCRKEFSIKLSKHHCRACGQGFCDECSHDRRAVPSRGWDHPVRVCFNCNKKPAWTSLSVMTGKGPLC

SEQ ID NO: 9088 - protein, 755 aa, Homo sapiens
LAGNETEWVTIANNLLFKCHIHLRIHELQDCDANVFIALYQSILGEKVPDLIVIPRSQEDDAHNVQAVIDSLALDYLQVSLSHITALYSVSRRKYSERRMLGPSWDGDEAESTGEIIRLGDTAHTFSLRSNGAQCPNEMLSKKALASPSSKSHEDMLYPPSVLSKSRTSFVEDTETLSVSGIPNARKLGEPIRAAIPLHPPYHPSEPRAPCPIGKEYLHSSHCSPAVNSTGEHTEFSGDLDDGLFLISKLPKGSKWEVYPAQVQGAARKPPKGKRNENRATASSCNSPFPQRPRKRLTEQELHDVSEKLSQRLSELDWMLKSALGDRIKEKTDHKEENTGNEEVEDGTEETLSQHSDGIVEYGPKKSRPGLSMRRKPPYRSHSLSPSPVNKHKQFHLERKRQRKPRETDVRQFQAQAFTEAFERELRRHKVQENIGPLRIHEKEEETVGKNIQRRSFVKELQNVVSPGRFTLEKPQRRVRGGLPKPNKAVPMKVSEHSLLPLMLEQFPFLYVSGPTLSKMWKQQIAQVEQLKKEACRENRSKKKLQDEIEEALRRHDLLTTLVKKEYEHNKRLQDFKDCIRRQRLTQSKIKENRQQIVRARKYYDDYRVQLCAKMMRMRTREEMIFKKLFEEGLNIQKQRLRDLRNYAKEKRDEQRRRHQDELDSMENYYKDQFSLLAEAISQEHQELKAREKSQAQTLHKVKRELRSKMEKEIQQLQDMITQNDDDVFFRELEAERFRSRLQLASFQYSKSPSL

SEQ ID NO: 9089 - protein, 139 aa, Homo sapiens; identical to SEQ ID NO: 7777

SEQ ID NO: 9090 - protein, 99 aa, Homo sapiens
MTDTRRRVKVYTLNEDRQWDDRGTGHVSSGYVERLKGMSLLVRAESDGSLLLESKINPNTAYQKQQDTLIVWSEAENYDLALSFQEKAGCDEIWEKICQ

SEQ ID NO: 9091 - protein, 820 aa, Homo sapiens; identical to SEQ ID NO: 5658

SEQ ID NO: 9092 - protein, 131 aa, Homo sapiens
MNESKPGDSQNLACVFCRKHDDCPNKYGEKKTKEKWNLTVHYYCLLMSSGIWQRGKEEEGVYGFLIEDIRKEVNRASKLKCCVCKKNGASIGCVAPRCKRSYHFPCGLQRECIFQFTGNFASFCWDHRPVQ

SEQ ID NO: 9093 - protein, 1977 aa, Homo sapiens
MAARSAPSCHLRLEWVYGYRGHQCRNNLYYTAAKEIVYFVAGVGVVYSPREHRQKFYRGHSDDIISLALHPERVLVATGQVGKEPYICIWDSYTVQTISVLKDVHTHGIACLAFDLDGQRLVSVGLDSKNAVCVWDWKRGKMLSMAPGHTDRIFDISWDLYQPNKLVSCGVKHIKFWSLCGNALTPKRGVFGKTGDLQTILCLACARDELTYSGALNGDIYVWKGINLIRTIQGAHAAGIFSMNACEEGFATGGRDGCIRLWDLTFKPITVIDLRETDQGYKGLSVRSVCWRGDHILVGTQDSEIFEIVVQERNKPFLIMQGHCEGELWALAVHPTKPLAVTGSDDRSVRIWSLVDHALIARCNMEEPIRCAAVNADGIHLALGMKDGSFTVLRVRDMTEVVHIKDRKEAIHELKYSPDGTYLAVGCNDSSVDIYGVAQRYKKVGECLGSLSFITHLDWSSDSRYLQTNDGNGKRLFYRMPGGKEVTSTEEIKGVHWASWTCVSGLEVNGIWPKYSDINDINSVDGNYIGQVLVTADDYGIIKLFRYPCLRKGAKFRKYIGHSAHVTNVRWSHDYQWVISIGGADHSVFQWKFIPERKLKDAVHIAPQESLADSHSDESDSDLSDVPELDSEIEQETQLTYRRQVYKEDLPQLKEQCKEKQKSATSKRRERAPGNSIRLHFVHGYRGYDCRSNLFYTQIGEIVYHVAAVGVIYNRQQNTQRFYLGHDDDILCLTIHPLKDYVATGQVGRDPSIHIWDTETIKPLSILKGHHQYGVSAVDFSADGKRLASVGIDDSHTVVLWDWKKGEKLSIARGSKDKIFVVKMNPYVPDKLITAGIKHMKFWRKAGGGLIGRKGYIGTLGKNDTMMCAVYGWTEEMAFSGTSTGDVCIWRDIFLVKTVKAHDGPVFSMHALEKGFVTGGKDGIVALWDDSFERCLKTYAIKRAALAPGSKGLLLEDNPSIRAISLGHGHILVGTKNGEILEVDKSGPITLLVQGHMEGEVWGLATHPYLPICATVSDDKTLRIWDLSPSHCMLAVRKLKKGGRCCCFSPDGKALAVGLNDGSFLMANADTLEDLVSFHHRKDMISDIRFSPGSGKYLAVASHDSFIDIYNVMSSKRVGICKGATSYITHIDWDIRGKLLQVNTGAKEQLFFEAPRGKKQTIPSVEVEKIAWASWTSVLGLCCEGIWPVIGEVTDVTASCLTSDKMVLATGDDLGFVKLFRYPTKGKFGKFKRYVAHSTHVTNVRWTYDDSMLVTLGGTDMSLMVWTNEMEGYREKRPCDSEESDIDSEEDGGYDSDVTRENEISYTIRALSTNIRPMLGIKPHLQQKEPSIDERQGVVRGSRPPVSRAPPQPEKLQTNNVGKKKRPIEDLVLELIFGYRGRDCRNNVHYLNDGDDIIYHTASVGILHNVATGSQSFYQEHNDDILCLTVNQHPKFINIVATGQVGDSADMSATAPSIHIWDAMNKQTLSILRCYHSKGVCSVSFSATGKLLLSVGLDPEHTITIWRWQEGAKIASRAGHNQRIFVAEFRPDSDTQFVSVGVKHVKFWTLAGRALLSKKGLLSTLEDARMQTMLAIAFGANNLTFTGTISGDVCVWKDHILCRIVARAHNGPVFAMYTTLRDGLIVTGGKERPSKEGGAVKLWDQELRRCRAFRLETGQATDCVRSVCRGKGKILVGTRNAEIIEVGEKNAACNILVNGHVDGPIWGLATHPSRDFFLSAAEDGTVRLWDIADKKMLNKVNLGHAARTVCYSPEGDMVAIGMKNGEFIILLVSSLKIWGKKRDRRCAIHDIRFSPDSRYLAVGSSENSVDFYDLTLGPTLNRISYCKDIPSFVIQMDFSADSSYLQVSSGCYKRHVYEVPSGKHLMDHAAIDRITWATWTSILGDEVLGIWSRHAEKADVNCACVSHSGISLVTGDDFGMVKLFDFPCPEKFAKHKRFLGHSPHVTNIRFTSGDRHVVSAGGDDCSLFVWKCVHTPH

SEQ ID NO: 9094 - protein, 833 aa, Homo sapiens
MTDTRRRVKVYTLNEDRQWDDRGTGHVSSGYVERLKGMSLLVRAESDGSLLLESKINPNTAYQKQQDTLIVWSEAENYDLALSFQEKAGCDEIWEKICQVQGKDPSVDITQDLVDESEEERFDDMSSPGLELPSCELSRLEEIAELVASSLPSPLRREKLALALENEGYIKKLLELFHVCEDLENIEGLHHLYEIIKGIFLLNRTALFEVMFSEECIMDVIGCLEYDPALSQPRKHREFLTKTAKFKEVIPISDPELKQKIHQTYRVQYIQDMVLPTPSVFEENMLSTLHSFIFFNKVEIVGMLQEDEKFLTDLFAQLTDEATDEEKRQELVNFLKEFCAFSQTLQPQNRDAFFKTLSNMGILPALEVILGMDDTQVRSAATDIFSYLVEYNPSMVREFVMQEAQQNDDVSKKLTEQKITSKDILLINLIIEHMICDTDPELGGAVQLMGLLRTLVDPENMLATANKTEKTEFLGFFYKHCMHVLTAPLLANTTEDKPSKDDFQTAQLLALVLELLTFCVEHHTYHIKNYIINKDILRRVLVLMASKHAFLALCALRFKRKIIGLKDEFYNRYIMKSFLFEPVVKAFLNNGSRYNLMNSAIIEMFEFIRVEDIKSLTAHVIENYWKALEDVDYVQTFKGLKLRFEQQRERQDNPKLDSMRSILRNHRYRRDARTLEDEEEMWFNTDEDDMEDGEAVVSPSDKTKNDDDIMDPISKFMERKKLKESEEKEVLLKTNLSGRQSPSFKLSLSSGTKTNLTSQSSTTNLPGSPGSPGSPGSPGSPGSVPKNTSQTAAITTKGGLVGLVDYPDDDEDDDEDEDKEDTLPLSKKAKFDS

SEQ ID NO: 9095 - protein, 1327 aa, Homo sapiens
MWRRKHAASGGTRGVLSGNRGVEYGSGRGHLGTFEGRWRKLPKMPEAVGTDPSTSRKMAELEEVTLDGKPLQALRVTDLKAALEQRGLAKSGQKSALVKRLKGALMLENLQKHSTPHAAFQPNSQIGEEMSQNSFIKQYLEKQQELLRQRLEREAREAAELEEASAESEDEMIHPEGVASLLPPDFQSSLERPELELSRHSPRKSSSISEEKGDSDDEKPRKGERRSSRVRQARAAKLSEGSQPAEEEEDQETPSRNLRVRADRNLKTEEEEEEEEEEEEDDEEEEGDDEGQKSREAPILKEFKEEGEEIPRVKPEEMMDERPKTRSQEQEVLERGGRFTRSQEEARKSHLARQQQEKEMKTTSPLEEEEREIKSSQGLKEKSKSPSPPRLTEDRKKASLVALPEQTASEEETPPPLLTKEASSPPPHPQLHSEEEIEPMEGPAPAVLIQLSPPNTDADTRELLVSQHTVQLVGGLSPLSSPSDTKAESPAEKVPEESVLPLVQKSTLADYSAQKDLEPESDRSAQPLPLKIEELALAKGITEECLKQPSLEQKEGRRASHTLLPSHRLKQSADSSSSRSSSSSSSSSRSRSRSPDSSGSRSHSPLRSKQRDVAQARTHANPRGRPKMGSRSTSESRSRSRSRSRSASSNSRKSLSPGVSRDSSTSYTETKDPSSGQEVATPPVPQLQVCEPKERTSTSSSSVQARRLSQPESAEKHVTQRLQPERGSPKKCEAEEAEPPAATQPQTSETQTSHLPESERIHHTVEEKEEVTMDTSENRPENDVPEPPMPIADQVSNDDRPEGSVEDEEKKESSLPKSFKRKISVVSTKGVPAGNSDTEGGQPGRKRRWGASTATTQKKPSISITTESLKEAVVDLHADDSRISEDETERNGDDGTHDKGLKICRTVTQVVPAEGQENGQREEEEEEKEPEAEPPVPPQVSVEVALPPPAEHEVKKVTLGDTLTRRSISQQKSGVSITIDDPVRTAQVPSPPRGKISNIVHISNLVRPFTLGQLKELLGRTGTLVEEAFWIDKIKSHCFVTYSTVEEAVATRTALHGVKWPQSNPKFLCADYAEQDELDYHRGLLVDRPSETKTEEQGIPRPLHPPPPPPVQPPQHPRAEQREQERAVREQWAEREREMERRERTRSEREWDRDKVREGPRSRSRSRDRRRKERAKSKEKKSEKKEKAQEEPPAKLLDDLFRKTKAAPCIYWLPLTDSQIVQKEAERAERAKEREKRRKEQEEEEQKEREKEAERERNRQLEREKRREHSRERDRERERERERDRGDRDRDRERDRERGRERDRRDTKRHSRSRSRSTPVRDRGGRR

SEQ ID NO: 9096 - protein, 362 aa, Homo sapiens; identical to SEQ ID NO: 6853

SEQ ID NO: 9097 - protein, 139 aa, Homo sapiens; identical to SEQ ID NO: 7777

SEQ ID NO: 9098 - protein, 751 aa, Homo sapiens
MSEEELTKAMEGLGMDEGDGEGNILPIMQSIMQNLLSKDVLYPSLKEITEKYPEWLQSHRESLPPEQFEKYQEQHSVMCKICEQFEAETPTDSETTQKARFEMVLDLMQQLQDLGHPPKELAGEMLTWLFFCGSQWVYGPWLTYVGWLQQTSFKMSSKGSSTDGRTDLANGSLSSSPEEMSGAEEGRETSSGIEVEASDLSLSLTGDDGGPNRTSTESRGTDTESSGEDKDSDSMEDTGHYSINDENRVHDRSEEEEEEEEEEEEEQPRRRVQRKRANRDQDSSDDERALEDWVSSETSALPRPRWQALPALRERELGSSARFVYEACGARVFVQRFRLQHGLEGHTGCVNTLHFNQRGTWLASGSDDLKVVVWDWVRRQPVLDFESGHKSNVFQAKFLPNSGDSTLAMCARDGQVRVAELSATQCCKNTKRVAQHKGASHKLALEPDSPCTFLSAGEDAVVFTIDLRQDRPASKLVVTKEKEKKVGLYTIYVNPANTHQFAVGGRDQFVRIYDQRKIDENENNGVLKKFCPHHLVNSESKANITCLVYSHDGTELLASYNDEDIYLFNSSHSDGAQYVKRYKGHRNNATVKGVNFYGPKSEFVVSGSDCGHIFLWEKSSCQIIQFMEGDKGGVVNCLEPHPHLPVLATSGLDHDVKIWAPTAEASTELTGLKDVIKKNKRERDEDSLHQTDLFDSHMLWFLMHHLRQRRHHRRWREPGVGATDADSDESPSSSDTSDEEEGPDRVQCMPS

SEQ ID NO: 9099 - protein, 351 aa, Homo sapiens; identical to SEQ ID NO: 4991

SEQ ID NO: 9100 - protein, 195 aa, Homo sapiens
MPLPFGLKLKRTRRYTVSSKSCLVARIQLLNNEFVEFTLSVESTGQESLEAVAQRLELREVTYFSLWYYNKQNQRRWVDLEKPLKKQLDKYALEPTVYFGVVFYVPSVSQLQQEITRYQYYLQLKKDILEGSIPCTLEQAIQLAGLAVQADFGDFDQYESQDFLQKFALFPVGWLQDEKVLEEATQKVALLHQKY

SEQ ID NO: 9101 - protein, 117 aa, Homo sapiens
MGDKKSPTRPKRQPKPSSDEGYWDCSVCTFRNSAEAFKCMMCDVRKGTSTRDSKEGGKLVSYSTASLGVRGTLRNRVGGGSSEEKKQAEYLAPGRRRNIVHRGVGPGQRSGPSLKEA

SEQ ID NO: 9102 - protein, 1094 aa, Homo sapiens; identical to SEQ ID NO: 5061

SEQ ID NO: 9103 - protein, 450 aa, Homo sapiens
MREIVHIQAGQCGNQIGAKFWEVISDEHGIDPSGNYVGDSDLQLERISVYYNEASSHKYVPRAILVDLEPGTMDSVRSGAFGHLFRPDNFIFGQSGAGNNWAKGHYTEGAELVDSVLDVVRKECENCDCLQGFQLTHSLGGGTGSGMGTLLISKVREEYPDRIMNTFSVVPSPKVSDTVVEPYNATLSIHQLVENTDETYCIDNEALYDICFRTLKLATPTYGDLNHLVSATMSGVTTSLRFPGQLNADLRKLAVNMVPFPRLHFFMPGFAPLTARGSQQYRALTVPELTQQMFDAKNMMAACDPRHGRYLTVATVFRGRMSMKEVDEQMLAIQSKNSSYFVEWIPNNVKVAVCDIPPRGLKMSSTFIGNSTAIQELFKRISEQFTAMFRRKAFLHWYTGEGMDEMEFTEAESNMNDLVSEYQQYQDATAEEEGEMYEDDEEESEAQGPK

SEQ ID NO: 9104 - protein, 79 aa, Homo sapiens
MNESKPGDSQNLACVFCRKHDDCPNKYGEKKTKEKWNLTVHYYCLLMSSGIWQRGKEEEGVYGFLIEDIRKEVNRASKL

SEQ ID NO: 9105 - protein, 594 aa, Homo sapiens; identical to SEQ ID NO: 7579

SEQ ID NO: 9106 - protein, 179 aa, Homo sapiens
MAESSSESDHFRCRDRLSPWAARSTHRGTRSLPTVEVTEKVNTITSTLQDTSRNLRQVDQMLGRYREYSNGQAGAIEHLKESLEQSIDQLRSQRLLRNSGGRSISVTSLSASDLDGGTGSELHHFPPTSPLKDYGDPQGIKRMRSRTGVRFVQETDDMTQLHGFHQSLRDLSSEQIRLG

SEQ ID NO: 9107 - protein, 351 aa, Homo sapiens; identical to SEQ ID NO: 4991

SEQ ID NO: 9108 - protein, 109 aa, Homo sapiens
METDCNPMELSSMSGFEEGSELNGFEGTDMKDMRLEAEAVVNDVLFAVNNMFVSKSLRCADDVAYINVETKERNRYCLELTEAGLKVVGYAFDQVDDHLQTPYHETVYS

SEQ ID NO: 9109 - protein, 128 aa, Homo sapiens
MAESSSESDHFRCRDRLSPWAARSTHRGTRSLPTVEVTEKVNTITSTLQDTSRNLRQVDQMLGRYREYSNGQAGAIEHLKESLEQSIDQLRSQRLLRNSGGRSISVTSLSASDLDGGTGSELHHFPPT

SEQ ID NO: 9110 - protein, 122 aa, Homo sapiens; identical to SEQ ID NO: 5653

SEQ ID NO: 9111 - protein, 139 aa, Homo sapiens; identical to SEQ ID NO: 7777

SEQ ID NO: 9112 - protein, 1533 aa, Homo sapiens
MPVKRLREVVSQNHGDHLVLLKDELPCVPPALSANKRLPVGTGTSLNGTSRGSSDLTSARNCYQPLLENPMVSESDFSKDVAVQVLPLDKIEENNKQKANDIFISQYTMGQKDALRTVLKQKAQSMPVFKEVKVHLLEDAGIEKDAVTQETRISPSGIDSATTVAAATAAAIATAAPLIKVQSDLEAKVNSVTELLSKLQETDKHLQRVTEQQTSIQRKQEKLHCHDHEKQMNVFMEQHIRHLEKLQQQQIDIQTHFISAALKTSSFQPVSMPSSRAVEKYSVKPEHPNLGSCNPSLYNTFASKQAPLKEVEDTSFDKQKSPLETPAPRRFAPVPVSRDDELSKRENLLEEKENMEVSCHRGNVRLLEQILNNNDSLTRKSESSNTTSLTRSKIGWTPEKTNRFPSCEELETTKVTMQKSDDVLHDLGQKEKETNSMVQPKESLSMLKLPDLPQNSVKLQTTNTTRSVLKDAEKILRGVQNNKKVLEENLEAIIRAKDGAAMYSLINALSTNREMSEKIRIRKTVDEWIKTISAEIQDELSRTDYEQKRFDQKNQRTKKGQNMTKDIRTNTQDKTVNKSVIPRKHSQKQIEEHFRNLPMRGMPASSLQKERKEGLLKATTVIQDEDYMLQVYGKPVYQGHRSTLKKGPYLRFNSPSPKSRPQRPKVIERVKGTKVKSIRTQTDFYATKPKKMDSKMKHSVPVLPHGDQQYLFSPSREMPTFSGTLEGHLIPMAILLGQTQSNSDTMPPAGVIVSKPHPVTVTTSIPPSSRKVETGVKKPNIAIVEMKSEKKDPPQLTVQVLPSVDIDSISNSSADVLSPLSSPKEASLPPVQTWIKTPEIMKVDEEEVKFPGTNFDEIIDVIQEEEKCDEIPDSEPILEFNRSVKADSTKYNGPPFPPVASTFQPTADILDKVIERKETLENSLIQWVEQEIMSRIISGLFPVQQQIAPSISVSVSETSEPLTSDIVEGTSSGALQLFVDAGVPVNSNVIKHFVNEALAETIAVMLGDREAKKQGPVATGVSGDASTNETYLPARVCTPLPTPQPTPPCSPSSPAKECVLVKTPDSSPCDSDHDMAFPVKEICAEKGDDMPAIMLVNTPTVTPTTTPPPAAAVFTPTLSDISIDKLKVSSPELPKPWGDGDLPLEEENPNSPQEELHPRAIVMSVAKDEEPESMDFPAQPPPPEPVPFMPFPAGTKAPSPSQMPGSDSSTLESTLSVTVTETETLDKPISEGEILFSCGQKLAPKILEDIGLYLTNLNDSLSSTLHDAVEMEDDPPSEGQVIRMSHKKFHADAILSFAKQNQESAVSQQAVYHSEDLENSVGELSEGQRPQLTAAAENILMGHSLYMQPPVTNTQSLDQQCDPKPLSRQFDTVSGSIYEDSCASHGPMSLGELELEPNSKLVLPTTLLTAQENDVNLPVAAEDFSQYQLKQNQDVKQVEHKPSQSYLRVRNKSDIAPSQQQVSPGDMDRTQIELNPYLTCVFSGGKAVPLSASQMPPAKMSVMLPSVNLEDCSQSLSLSTMQEDMESSGADTF

SEQ ID NO: 9113 - protein, 777 aa, Homo sapiens
MSAQTSPAEKGLNPGLMCQESYACSGTDEAIFECDECCSLQCLRCEEELHRQERLRNHERIRLKPGHVPYCDLCKGLSGHLPGVRQRAIVRCQTCKINLCLECQKRTHSGGNKRRHPVTVYNVSNLQESLEAEEMDEETKRKKMTEKVVSFLLVDENEEIQVTNEEDFIRKLDCKPDQHLKVVSIFGNTGDGKSHTLNHTFFYGREVFKTSPTQESCTVGVWAAYDPVHKVAVIDTEGLLGATVNLSQRTRLLLKVLAISDLVIYRTHADRLHNDLFKFLGDASEAYLKHFTKELKATTARCGLDVPLSTLGPAVIIFHETVHTQLLGSDHPSEVPEKLIQDRFRKLGRFPEAFSSIHYKGTRTYNPPTDFSGLRRALEQLLENNTTRSPRHPGVIFKALKALSDRFSGEIPDDQMAHSSFFPDEYFTCSSLCLSCGVGCKKSMNHGKEGVPHEAKSRCRYSHQYDNRVYTCKACYERGEEVSVVPKTSASTDSPWMGLAKYAWSGYVIECPNCGVVYRSRQYWFGNQDPVDTVVRTEIVHVWPGTDGFLKDNNNAAQRLLDGMNFMAQSVSELSLGPTKAVTSWLTDQIAPAYWRPNSQILSCNKCATSFKDNDTKHHCRACGEGFCDSCSSKTRPVPERGWGPAPVRVCDNCYEARNVQLAVTEAQVDDEGGTLIARKVGEAVQNTLGAVVTAIDIPLGLVKDAARPAYWVPDHEILHCHNCRKEFSIKLSKHHCRACGQGFCDECSHDRRAVPSRGWDHPVRVCFNCNKKPGDL

SEQ ID NO: 9114 - protein, 288 aa, Homo sapiens
MEKLSALQEQKGELRKRLSYTTHKLEKLETEFDSTRHYLEIELRRAQEELEKVTEKLRRIQSNYMALQRINQELEDKLYRMGQHYEEEKRALSHEIVALNSHLLEAKVTIDKLSEDNELYRKDCNLAAQLLQCSQTYGRVHKVSELPSDFQERVSLHMEKHGCSLPSPLCHPAYADSVPTCVIAKVLEKPDPASLSSRLSDASARDLAFCDGVEKPGPRPPYKGDIYCSDTALYCPEERRRDRRPSVDAPVTDVGFLRAQNSTDSAAEEEEEAEAAAFPAGFQHEAFP

SEQ ID NO: 9115 - protein, 420 aa, Homo sapiens
  VARIANT 1: note = X can be any amino acid
XTQAMALETPTPGPPREGQSPASQAGTQHPPAQATAHSQSSPEFKGSLASLSDSLGVSVMATDQDSYSTSSTEEELEQFSSPSVKKKPSMILGKARHRLSFASFSSMFHAFLSNNRKLYKKVVELAQDKGSYFGSLVQDYKVYSLEMMARQTSSTEMLQEIRTMMTQLKSYLLQSTELKALVDPALHSEEELEAIVESALYKCVLKPLKEAINSCLHQIHSKDGSLQQLKENQLVILATTTTDLGVTTSVPEVPMMEKILQKFTSMHKAYSPEKKISILLKTCKLIYDSMALGNPGKPYGADDFLPVLMYVLARSNLTEMLLNVEYMMELMDPALQLGEGSYYLTTTYGALEHIKSYDKITVTRQLSVEVQDSIHRWERRRTLNKARASRSSVQVRPESGRGPVGPCPRHHPCCLLAKEP

SEQ ID NO: 9116 - protein, 820 aa, Homo sapiens
MAGSDAEWVTIANNLLFKCHIHLRIHELQDCDANVFIALYQSILGEKVPDLIVIPRSQEDDAHNVQAVIDSLALDYLQVSLSHITGENIVKGDKESIKNLLEIFDGLLEYLTERISETSHEKSETEQYFKESDRGERLEEPESTKESKSSWKRVSFGRCSLSSEMLGPSWDGDEAESTGEIIRLGDTAHTFSLRSNGAQCPNEMLSKKALASPSSKSHEDMLYPPSVLSKSRTSFVEDTETLSVSGIPNARKLGEPIRAAIPLHPPYHPSEPRAPCPIGKEYLHSSHCSPAVNSTGEHTEFSGDLDDGLFLISKLPKGSKWEVYPAQVQGAARKPPKGKRNENRATASSCNSPFPQRPRKRLTEQELHDVSEKLSQRLSELDWMLKSALGDRIKEKTDHKEENTGNEEVEDGTEETLSQHSDGIVEYGPKKSRPGLSMRRKPPYRSHSLSPSPVNKHKQFHLERKRQRKPRETDVRQFQAQAFTEAFERELRRHKVQENIGPLRIHEKEEETEKIYRGEAVRKGTPECSQPWKIYSRKTTTQSLRGGLPKPNKAVPMKVSEHSLLPLMLEQFPFLYVSGPTLSKMWKQQIAQVEQLKKEACRENRSKKKLQDEIEEALRRHDLLTTLVKKEYEHNKRLQDFKDCIRRQRLTQSKIKENRQQIVRARKYYDDYRVQLCAKMMRMRTREEMIFKKLFEEGLNIQKQRLRDLRNYAKEKRDEQRRRHQDELDSMENYYKDQFSLLAEAISQEHQELKAREKSQAQTLHKVKRELRSKMEKEIQQLQDMITQNDDDVFFRELEAERFRSRLQLASFQYSKSPSL

SEQ ID NO: 9117 - protein, 1521 aa, Homo sapiens
MRIPDQKYVTLKLNDVIRFGYDSNMYVLERVQHRVPEEALKHEKYTSQLQVSVKGLAPKRSEALPEHTPYCEASNPRPEKGDRRPGTEAASYRTPLYGQPSWWGEDDGSTLPDAQRQGEPYPERPKGPVQQDGELHGFRAPAEPQGCSFRREPSYFEIPTKETPQPSQPPEVPAHEMPTKDAEAGGGGAAPVVQSHASFTIEFDDCSPGKMKIKDHITKFSLRQRRPPGKEATPGEMVSAETKVADWLVQNDPSLLHRVGPGDDRHSTKSDLPVHTRTLKGHKHEDGTQSDSEDPLAKAASAAGVPLEASGEQVRLQRQIKRDPQELLHNQQAFVIEFFDEDTPRKKRSQSFTHSPSGDPKADKRRGPTPADRDRPSVPAPVQAGGRSSGPQRAGSLKREKTEERLGSPSPASRTPARPFGSVGRRSRLAQDFMAQCLRESSPAARPSPEKVPPVLPAPLTPHGTSPVGPPTPPPAPTDPQLTKARKQEEDDSLSDAGTYTIETEAQDTEVEEARKMIDQVFGVLESPELSRASSATFRPVIRGDRDESDDGGVAQRMALLQEFASRPLGAAPQAEHQGLPVPGSPGGQKWVSRWASLADSYSDPGLTEDGLGRRGGEPEGSLPVRMRRRLPQLPSERADSPAGPESSRRSGPGPPELDSEQPSRLFGQEELDPDSLSDASGSDGGRGPEPGVEPQDSRRRSPQEGPTWSRGRRSPRAPGEPTPASFFIGDQNGDAVLSRKPLAAPGDGEGLGQTAQPSPPARDGVYVSANGRMVIQLRPGRSPEPDGPAPAFLRQESFTKEPASGPPAPGKPPHISSHPLLQDLAATRAARMDFHSQDTHLILKETETALAALEARLLSNSVDAECEGGSTPRPPEDALSGDSDVDTASTVSLRSGKSGPSPTTPQPLRAQKEMSPSPPAAQDPGGTALVSAREQSSERQHHPLGPTDMGRGEPVRRSAIRRGHRPRGSLDWPSEERGPVLAHLPSSDVMASNHETPEATGAGRLGSRARGSPAAPPPSPAAREEQSRSSASSQKGPQALTRSNSLSTPRPTRASRLRRARLGDASDTEAADGERGSLGNPEPVGRPAAEQAKKLSRLDILAMPRKRAGSFTGTSDPEAAPARTSFSGRSVELCCASRKPTMAEARAVSRKAANTATTTGPRQPFSRARSGSARYTSNTRRRQQGSDYTSTSEEEYGSRHGSPKHTRSHTSTATQTPRAGSSSRARSRAPGPRDTDDDEEEPDPYGFIVQTAEIAEIARLSQTLVKDVAILAQEIHDVAGDGDTLGSSEPAHSASLSNMPSTPASTISAREELVQRIPEASLNFQKVPPGSLNSRDFDQNMNDSCEDALANKTRPRNREEVIFDNLMLNPVSQLSQAIRENTEHLAEKMKILFQNTGRAWEDLEARINAENEVPILKTSNKEISSILKELRRVQKQLEVINAIVDPSGSLDLLTGNRSLASSAQPGLGKGRVAAQSPPSPASAEALLPALPLRNFPQRASCGPPSLPDPTFLPDAERFLI

SEQ ID NO: 9118 - protein, 125 aa, Homo sapiens; identical to SEQ ID NO: 5274

SEQ ID NO: 9119 - protein, 1174 aa, Homo sapiens [sequence omitted]

SEQ ID NO: 9120 - protein, 414 aa, Homo sapiens; identical to SEQ ID NO: 4993

SEQ ID NO: 9121 - protein, 751 aa, Homo sapiens; identical to SEQ ID NO: 9098

SEQ ID NO: 9122 - protein, 351 aa, Homo sapiens; identical to SEQ ID NO: 5186

SEQ ID NO: 9123 - protein, 797 aa, Homo sapiens
MAVQGSQRRLLGSLNSTPTAIPQLGLAANQTGARCLEVSISDGLFLSLGLVSLVENALVVATIAKNRNLHSPMYCFICCLALSDLLVSGSNVLETAVILLLEAGALVARAAVLQQLDNVIDVITCSSMLSSLCFLGAIAVDRYISIFYALRYHSIVTLPRARRAVAAIWVASVVFSTLFIAYYDHVAVLLCLVVFFLAMLVLMAVLYVHMLARACQHAQGIARLHKRQRPVHQGFGLKGAVTLTILLGIFFLCWGPFFLHLTLIVLCPEHPTCGCIFKNFNLFLALIICNAIIDPLIYAFHSQELRRTLKEVLTCSCSQDRALVSWDVKSLGGSVCQELLPQQPQEKGLCDQKASSTALQRLLQKEFWEVISDEHGIDPSGNYVGDSDLQLERISVYYNEASSHKYVPRAILVDLEPGTMDSVRSGAFGHLFRPDNFIFGQSGAGNNWAKGHYTEGAELVDSVLDVVRKECENCDCLQGFQLTHSLGGGTGSGMGTLLISKVREEYPDRIMNTFSVVPSPKVSDTVVEPYNATLSIHQLVENTDETYCIDNEALYDICFRTLKLATPTYGDLNHLVSATMSGVTTSLRFPGQLNADLRKLAVNMVPFPRLHFFMPGFAPLTARGSQQYRALTVPELTQQMFDAKNMMAACDPRHGRYLTVATVFRGRMSMKEVDEQMLAIQSKNSSYFVEWIPNNVKVAVCDIPPRGLKMSSTFIGNSTAIQELFKRISEQFTAMFRRKAFLHWYTGEGMDEMEFTEAESNMNDLVSEYQQYQDATAEEEGEMYEDDEEESEAQGPK

SEQ ID NO: 9124 - protein, 32 aa, Homo sapiens
MAESSSESDHFRCRDRLSPWAARSTHRGTRSL

SEQ ID NO: 9125 - protein, 150 aa, Homo sapiens
MTDTRRRVKVYTLNEDRQWDDRGTGHVSSGYVERLKGMSLLVRAESDGSLLLESKINPNTAYQKQQDTLIVWSEAENYDLALSFQEKAGCDEIWEKICQVQGKDPSVDITQDLVDESEEERFDDMSSPGLELPSCELSRLEEIAELVASS

SEQ ID NO: 9126 - protein, 167 aa, Homo sapiens
MDWKEVLRRRLATPNTCPNKKKSEQELKDEEMDLFTKYYSEWKGGRKNTNEFYKTIPRFYYRLPAEDEVLLQKLREESRAVFLQRKSRELLDNEELQNLWFLLDKHQTPPMIGEEAMINYENFLKVGEKAGAKCKQFFTAKVFAKLLHTDSYGRISIMQFFNYVMRK

SEQ ID NO: 9127 - protein, 168 aa, Homo sapiens; identical to SEQ ID NO: 9082

SEQ ID NO: 9128 - protein, 273 aa, Homo sapiens
MPGLSCRFYQHKFPEVEDVVMVNVRSIAEMGAYVSLLEYNNIEGMILLSELSRRRIRSINKLIRIGRNECVVVIRVDKEKGYIDLSKRRVSPEEAIKCEDKFTKSKTVYSILRHVAEVLEYTKDEQLESLFQRTAWVFDDKYKRPGYGAYDAFKHAVSDPSILDSLDLNEDEREVLINNINRRLTPQAVKIRADIEVACYGYEGIDAVKEALRAGLNCSTENMPIKINLIAPPRYVMTTTTLERTEGLSVLSQAMAVIKEKIEEKRGVFNVQM

SEQ ID NO: 9129 - protein, 918 aa, Homo sapiens
  VARIANT 1: note = X can be any amino acid
XRTNSRFVKVVLMSATISCKEFADYFAVPVQNKMNPAYIFEVEGKPHSVEEYYLNDLEHIHHSKLSPHLLEEPVITKDIYEVAVSLIQMFDDLDMKESGNKAWSGAQFVLERSSVLVFLPGLGEINYMHELLTSLVHKRLQVYPLHSSVALEEQNNVFLSPVPGYRKIILSTNIAESSVTVPDVKYVIDFCLTRTLVCDEDTNYQSLRLSWASKTSCNQRKGRAGRVSRGYCYRLVHKDFWDNSIPDHVVPEMLRCPLGSTILKVKLLDMGEPRALLATALSPPGLSDIERTILLLKEVGALAVSGQREDENPHDGELTFLGRVLAQLPVNQQLGKLIVLGHVFGCLDECLIIAAALSLKNFFAMPFRQHLDGYRNKVNFSGSSKSDCIALVEAFKTWKACRQTGELRYPKDELNWGRLNYIQIKRIREVAELYEELKTRISQFNMHVDSRRPVMDQEYIYKQRFILQVVLAGAFYPNYFTFGQPDEEMAVRELAGKDPKTTVVLKHIPPYGFLYYKQLQSLFRQCGQVKSIVFDGAKAFVEFSRNPTERFKTLPAVYMAIKMSQLKVSLELSVHSAEEIEGKVQGMNVSKLRNTRVNVDFQKQTVDPMQVSFNTSDRSQTVTDLLLTIDVTEVVEVGHFWGYRIDENNSEILKKLTAEINQLTLVPLPTHPHPDLVCLAPFADFDKQRYFRAQVLYVSGNSAEVFFVDYGNKSHVDLHLLMEIPCQFLELPFQALEFKICKMRPSAKSLVCGKHWSDGASQWFASLVSGCTLLVKVFSVVHSVLHVDVYQYSGVQDAINIRDVLIQQGYAELTEESYESKVNILRAAINKLVCDGPNGCKCLGPERVAQLQDIARQKLLGLFCQSKPREKIVPKWHEKPYEWNQVDPKLVMEQADRESSRGKNTFLYQLHKLVVLGT

SEQ ID NO: 9130 - protein, 168 aa, Homo sapiens
MEKLSALQEQKGELRKRLSYTTHKLEKLETEFDSTRHYLEIELRRAQEELEKVTEKLRRIQSNYMALQRINQELEDKLYRMGQHYEEEKRALSHEIVALNSHLLEAKVTIDKLSEDNELYRKDCNLAAQLLQCSQTYGRVHKVSELPSDFQERVSLHMEKHGCSLPSP

SEQ ID NO: 9131 - protein, 211 aa, Homo sapiens
MDMGNQHPSISRLQEIQKEVKSVEQQVIGFSGLSDDKNYKKLERILTKQLFEIDSVDTEGKGDIQQARKRAAQETERLLKELEQNANHPHRIEIQNIFEEAQSLVREKIVPFYNGGNCVTDEFEEGIQDIILRLTHVKTGGKISLRKARYHTLTKICAVQEIIEDCMKKQPSLPLSEDAHPSVAKINFVMCEVNKARGVLIALLMGVNNNE

SEQ ID NO: 9132 - protein, 993 aa, Homo sapiens
MSQWTPEYNELYTLKVDMKSEIPSDAPKTQESLKGILLHPEPIGAAKSFPAGVEMINSKVGNEFSHLCDDSQKQEKEMNGNQQEQEKSLVVRKKRKSQQAGPSYVQNCVKENQGILGLRQHLGTPSDEDNDSSFSDCLSSPSSSLHFGDSDTVTSDEDKEVSVRHSQTILNAKSRSHSARSHKWAAETESVSGLLMKRPCLHGSSLRRLPCRKRFVKNNSSQRTQKQKERILMQRKKREVLARRKYALLPSSSSSSENDLSSESSSSSSTEGEEDLFVSASENHQNNPAVPSGSIDEDVVVIEASSTPQVTANEEINVTSTDSEVEIVTVGESYRSRSTLGHSRSHWSQGSSSHASRPQEPRNRSRISTVIQPLRQNAAEVVDLTVDEDEPTVVPTTSARMESQATSASINNSNPSTSEQASDTASAVTSSQPSTVSETSATLTSNSTTGTSIGDDSRRTTSSAVTETGPPAMPRLPSCCPQHSPCGGSSQNHHALGHPHTSCFQQHGHHFQHHHHHHHTPHPAVPVSPSFSDPACPVERPPQVQAPCGANSSSGTSYHEQQALPVDLSNSGIRSHGSGSFHGASAFDPCCPVSSSRAAIFGHQAAAAAPSQPLSSIDGYGSSMVAQPQPQPPPQPSLSSCRHYMPPPYASLTRPLHHQASACPHSHGNPPPQTQPPPQVDYVIPHPVHAFHSQISSHATSHPVAPPPPTHLASTAAPIPQHLPPTHQPISHHIPATAPPAQRLHPHEVMQRMEVQRRRMMQHPTRAHERPPPHPHRMHPNYGHGHHIHVPQTMSSHPRQAPERSAWELGIEAGVTAATYTPGALHPHLAHYHAPPRLHHLQLGALPLMVPDMAGYPHIRYISSGLDGTSFRGPFRGNFEELIHLEERLGNVNRGASQGTIERCTYPHKYKKVTTDWFSQRKLHCKQDGEEGTEEDTEEKCTICLSILEEGEDVRRLPCMHLFHQVCVDQWLITNKKCPICRVDIEAQLPSES

SEQ ID NO: 9133 - protein, 385 aa, Homo sapiens; identical to SEQ ID NO: 5529

SEQ ID NO: 9134 - protein, 2489 aa, Homo sapiens
  VARIANT 1: note = X can be any amino acid
XEEEEDDDDEEEEVSEVESFILDQDDLENPMLETASKLLLSGTADGADLRTVDPETQARLEALLEAAGIGKLSTADGKAFADPEVLRRLTSSVSCALDEAAAALTRMRAESTANAGQSDNRSLAEACSEGDVNAVRKLLIEGRSVNEHTEEGESLLCLACSAGYYELAQVLLAMHANVEDRGIKGDITPLMAAANGGHVKIVKLLLAHKADVNAQSSTGNTALTYACAGGYVDVVKVLLESGASIEDHNENGHTPLMEAGSAGHVEVARLLLENGAGINTHSNEFKESALTLACYKGHLEMVRFLLEAGADQEHKTDEMHTALMEACMDGHVEVARLLLDSGAQVNMPADSFESPLTLAACGGHVELAALLIERGASLEEVNDEGYTPLMEAAREGHEEMVALLLGQGANINAQTEETQETALTLACCGGFLEVADFLIKAGADIELGCSTPLMEAAQEGHLELVKYLLAAGANVHATTATGDTALTYACENGHTDVADVLLQAGADLEHESEGGRTPLMKAARAGHVCTVQFLISKGANVNRTTANNDHTVLSLACAGGHLAVVELLLAHGADPTHRLKDGSTMLIEAAKGGHTSVVCYLLDYPNNLLSAPPPDVTQLTPPSHDLNRAPRVPVQALPMVVPPQEPDKPPANVATTLPIRNKAASKQKSSSHLPANSQDVQGYITNQSPESIVEEAQGKLTELEQRIKEAIEKNAQLQSLELAHADQLTKEKIEELNKTREEQIQKKQKILEELQKVERELQLKTQQQLKKQYLEVKAQRIQLQQQQQQSCQHLGLLTPVGVGEQLSEGDYARLQQVDPVLLKDEPQQTAAQMGFAPIQPLAMPQALPLAAGPLPPGSIANLTELQGVIVGQPVLGQAQLAGLGQGILTETQQGLMVASPAQTLNDTLDDIMAVSGRASAMSNTPTHSIAASISQPQTPTPSPIISPSAMLPIYPAIDIDAQTESNHDTALTLACAGGHEELVQTLLERGASIEHRDKKGFTPLILAATAGHVGVVEILLDNGADIEAQSERTKDTPLSLACSGGRQEVVELLLARGANKEHRNVSDYTPLSLAASGGYVNIIKILLNAGAEINSRTGSKLGISPLMLAAMNGHTAAVKLLLDMGSDINAQIETNRNTALTLACFQGRTEVVSLLLDRKANVEHRAKTGLTPLMEAASGGYAEVGRVLLDKGADVNAPPVPSSRDTALTIAADKGHYKFCELLIGRGAHIDVRNKKGNTPLWLAANGGHLDVVQLLVQAGADVDAADNRKITPLMAAFRKGHVKVVRYLVKEVNQFPSDSECMRYIATITDKEMLKKCHLCMESIVQAKDRQAAEANKNASILLEELDLEKLREESRRLALAAKREKRKEKRRKKKEEQRRKLEEIEAKNKENFELQAAQEKEKLKVEDEPEVLTEPPSATTTTTIGISATWTTLAGSHGKRNNTITTTSSKRKNRKNKITPENVQIIFDDPLPISYSQPEKVNGESKSSSTSESGDSDNMRISSCSDESSNSNSSRKSDNHSPAVVTTTVSSKKQPSVLVTFPKEERKSVSGKASIKLSETISEGTSNSLSTCTKSGPSPLSSPNGKLTVASPKRGQKREEGWKEVVRRSKKVSVPSTVISRVIGRGGCNINAIREFTGAHIDIDKQKDKTGDRIITIRGGTESTRQATQLINALIKDPDKEIDELIPKNRLKSSSANSKIGSSAPTTTAANTSLMGIKMTTVALSSTSQTATALTVPAISSASTHKTIKNPVNNVRPGFPVSLPLAYPPPQFAHALLAAQTFQQIRPPRLPMTHFGGTFPPAQSTWGPFPVRPLSPARATNSPKPHMVPRHSNQNSSGSQVNSAGSLTSSPTTTTSSSASTVPGTSTNGSPSSPSVRRQLFVTVVKTSNATTTTVTTTASNNNTAPTNATYPMPTAKEHYPVSSPSSPSPPAQPGGVSRNSPLDCGSASPNKVASSSEQEAGSPPVVETTNTRPPNSSSSSGSSSAHSNQQQPPGSVSQEPRPPLQQSQVPPPEVRMTVPPLATSSAPVAVPSTAPVTYPMPQTPMGCPQPTPKMETPAIRPPPHGTTAPHKNSASVQNSSVAVLSVNHIKRPHSVPSSVQLPSTLSTQSACQNSVHPANKPIAPNFSAPLPFGPFSTLFENSPTSAHAFWGGSVVSSQSTPESMLSGKSSYLPNSDPLHQSDTSKAPGFRPPLQRPAPSPSGIVNMDSPYGSVTPSSTHLGNFASNISGGQMYGPGAPLGGAPAAANFNRQHFSPLSLLTPCSSASNDSSAQSVSSGVRAPSPAPSSVPLGSEKPSNVSQDARGSVPVPIGTERSARIRQTGTSAPSVIGSNLSTSVGHSGIWSFEGIGGNQDKVDWCNPGMGNPMIHRPMSDPGVFSQHQAMERDSTGIVTPSGTFHQHVPAGYMDFPKVGGMPFSVYGNAMIPPVAPIPDGAGGPIFNGPHAADPSWNSLIKMVSSSTENNGPQTVWTGPWAPHMNSVHMNQLG

SEQ ID NO: 9135 - protein, 10 aa, Homo sapiens
MALPHDSNET

SEQ ID NO: 9136 - protein, 153 aa, Homo sapiens
MATMIPPVKLKWLEHLNSSWITEDSESIATREGVAVLYSKLVSNKEVVPLPQQVLCLKGPQLPDFERESLSSDEQDHYLDALLSSQLALAKMVCSDSPFAGALRKRLLVLQRVFYALSNKYHDKGKVKQQQHSPESSSGSADVHSVSERPRSS

SEQ ID NO: 9137 - protein, 36 aa, Homo sapiens
MLPPKHLSATKPKKSWAPNLYELDSDLTKEPDVIIG

SEQ ID NO: 9138 - protein, 104 aa, Homo sapiens
MAQSGGEARPGPKTAVQIRVAIQEAEDVDELEDEEEGAETRGAGDPARYLSPGWGSASEEEPSRGHRTAQLPWLESQQVFSLKPFLLPTGIELTPENPWGSSVS

SEQ ID NO: 9139 - protein, 214 aa, Homo sapiens
MALPHDSNETSYLLPPNNEDWGRQTIPDFVYGQKDLMAEGIQWPRNAPGIPDALPQSPFDAALCSAWKQRVELGLFRYRLRELQTQILPGAVGFVAQLNVERGVQRRPPQTIKSVRQAFDPVQFNFNKIRPGEVLFRLHREPDLPGTLLQEDILVVINVSPLEWGHVLLVPEPARQLPQRLLPGALRAGIEAVLLSLHPGFRVGFNSLGGLASV

SEQ ID NO: 9140 - protein, 994 aa, Homo sapiens
MSQWTPEYNELYTLKVDMKSEIPSDAPKTQESLKGILLHPEPIGAAKSFPAGVEMINSKVGNEFSHLCDDSQKQEKEMNGNQQEQEKSLVVRKKRKSQQAGPSYVQNCVKENQGILGLRQHLGTPSDEDNDSSFSDCLSSPSSSLHFGDSDTVTSDEDKEVSVRHSQTILNAKSRSHSARSHKWAAETESVSGLLMKRPCLHGSSLRRLPCRKRFVKNNSSQRTQKQKERILMQRKKREVLARRKYALLPSSSSSSENDLSSESSSSSSTEGEEDLFVSASENHQNNPAVPSGSIDEDVVVIEASSTPQVTANEEINVTSTDSEVEIVTVGESYRSRSTLGHSRSHWSQGSSSHASRPQEPRNRSRISTVIQPLRQNAAEVVDLTVDEDEPTVVPTTSARMESQATSASINNSNPSTSEQASDTASAVTSSQPSTVSETSATLTSNSTTGTSIGDDSRRTTSSAVTETGPPAMPRLPSCCPQHSPCGGSSQNHHALGHPHTSCFQQHGHHFQHHHHHHHTPHPAVPVSPSFSDPACPVERPPQVQAPCGANSSSGTSYHEQQALPVDLSNSGIRSHGSGSFHGASAFDPCCPVSSSRAAIFGHQAAAAAPSQPLSSIDGYGSSMVAQPQPQPPPQPSLSSCRHYMPPPYASLTRPLHHQASACPHSHGNPPPQTQPPPQVDYVIPHPVHAFHSQISSHATSHPVAPPPPTHLASTAAPIPQHLPPTHQPISHHIPATAPPAQRLHPHEVMQRMEVQRRRMMQHPTGLFVFCVSRRAHERPPPHPHRMHPNYGHGHHIHVPQTMSSHPRQAPERSAWELGIEAGVTAATYTPGALHPHLAHYHAPPRLHHLQLGALPLMVPDMAGYPHIRYISSGLDGTSFRGPFRGNFEELIHLEERLGNVNRGASQGTIERCTYPHKYKKRKLHCKQDGEEGTEEDTEEKCTICLSILEEGEDVRRLPCMHLFHQVCVDQWLITNKKCPICRVDIEAQLPSES

SEQ ID NO: 9141 - protein, 616 aa, Homo sapiens
MAGGRGAPGRGRDEPPESYPQRQDHELQALEAIYGADFQDLRPDACGPVKEPPEINLVLYPQGLTGEEVYVKVDLRVKCPPTYPDVVPEIELKNAKGLSNESVNLLKSRLEELAKKHCGEVMIFELAYHVQSFLSEHNKPPPKSFHEEMLERRAQEEQQRLLEAKRKEEQEQREILHEIQRRKEEIKEEKKRKEMAKQERLEIASLSNQDHTSKKDPGGHRTAAILHGGSPDFVGNGKHRANSSGRSRRERQYSVCNSEDSPGSCEILYFNMGSPDQLMVHKGKCIGSDEQLGKLVYNALETATGGFVLLYEWVLQWQKKMGPFLTSQEKEKIDKCKKQIQGTETEFNSLVKLSHPNVVRYLAMNLKEQDDSIVVDILVEHISGVSLAAHLSHSGPIPVHQLRRYTAQLLSGLDYLHSNSVVHKVLSASNVLVDAEGTVKITDYSISKRLADICKEDVFEQTRVRFSDNALPYKTGKKGDVWRLGLLLLSLSQGQECGEYPVTIPSDLPADFQDFLKKCVCLDDKERWSPQQLLKHSFINPQPKMPLVEQSPEDSEGQDYVETVIPSNRLPSAAFFSETQRQFSRYFIEFEELQLLGKGAFGAVIKVWYRVIPSPL

SEQ ID NO: 9142 - protein, 131 aa, Homo sapiens
MSQWTPEYNELYTLKVDMKSEIPSDAPKTQESLKGILLHPEPIGAAKSFPAGVEMINSKVGNEFSHLCDDSQKQEKEMNGNQQEQEKSLVVRKKRKSQQAGPSYVQNCVKENQGILGLRQHLGTPSDEDND

SEQ ID NO: 9143 - protein, 619 aa, Homo sapiens
MAPDSDPFPEGPLLKLLPLDARDRGTQRCRLGPAALHALGARLGSAVKISLPDGGSCLCTAWPRRDGADGFVQLDPLCASPGAAVGASRSRRSLSLNRLLLVPCPPLRRVAVWPVLRERAGAPGARNTAAVLEAAQELLRNRPISLGHVVVAPPGAPGLVAALHIVGGTPSPDPAGLVTAARVSLGGEPPSEAQPQPEVPLGGLSEAADSLRELLRLPLRYPRALTALGLAVPRGVLLAGPPGVGKTQLVRAVAREAGAELLAVSAPALQGSRPGETEENVRRVFQRARELASRGPSLLFLDEMDALCPQRGSRAPESRVVAQVLTLLDGASGDREVVVVGATNRPDALDPALRRPGRFDREVVIGTPTLKQRKEILQVITSKMPISSHVDLGLLAEMTVGYVGADLTALCREAAMHALLHSEKNQDNPVIDEIDFLEAFKNIQPSSFRSVIGLMDIKPVDWEEIGGLEDVKLKLKQSIEWPLKFPWEFVRMGLTQPKGVLLYGPPGCAKTTLVRALATSCHCSFVSVSGADLFSPFVGDSEKVLSQIFRQARASTPAILFLDEIDSILGARSASKTGCDVQERVLSVLLNELDGVGLKTIERRGSKSSQQGKYKELKK

SEQ ID NO: 9144 - protein, 1588 aa, Homo sapiens; identical to SEQ ID NO: 5490

SEQ ID NO: 9145 - protein, 20 aa, Homo sapiens
MATMIPPVKLKWLEHLNSSW

SEQ ID NO: 9146 - protein, 1464 aa, Homo sapiens
MYQPEDDNNSDVTSDDDMTRNRRESSPPHSVHSFSDRDWDRRGRSRDMEPRDRWSHTRNPRSRMPPRDLSLPVVAKTSFEMDREDDRDSRAYESRSQDAESYQNVVDLAEDRKPHNTIQDNMENYRKLLSLVQLAEDDGHSHMTQGHSSRSKRSAYPSTSRGLKTMPEAKKSTHRRGICEDESSHGVIMEKFIKDVSRSSKSGRARESSDRSQRFPRMSDDNWKDISLNKRESVIQQRVYEGNAFRGGFRFNSTLVSRKRVLERKRRYHFDTDGKGSIHDQKGCPRKKPFECGSEMRKAMSVSSLSSLSSPSFTESQPIDFGAMPYVCDECGRSFSVISEFVEHQIMHTRENLYEYGESFIHSVAVSEVQKSQVGGKRFECKDCGETFNKSAALAEHRKIHARGYLVECKNQECEEAFMPSPTFSELQKIYGKDKFYECRVCKETFLHSSALIEHQKIHFGDDKDNEREHERERERERGETFRPSPALNEFQKMYGKEKMYECKVCGETFLHSSSLKEHQKIHTRGNPFENKGKVCEETFIPGQSLKRRQKTYNKEKLCDFTDGRDAFMQSSELSEHQKIHSRKNLFEGRGYEKSVIHSGPFTESQKSHTITRPLESDEDEKAFTISSNPYENQKIPTKENVYEAKSYERSVIHSLASVEAQKSHSVAGPSKPKVMAESTIQSFDAINHQRVRAGGNTSEGREYSRSVIHSLVASKPPRSHNGNELVESNEKGESSIYISDLNDKRQKIPARENPCEGGSKNRNYEDSVIQSVFRAKPQKSVPGEGSGEFKKDGEFSVPSSNVREYQKARAKKKYIEHRSNETSVIHSLPFGEQTFRPRGMLYECQECGECFAHSSDLTEHQKIHDREKPSGSRNYEWSVIRSLAPTDPQTSYAQEQYAKEQARNKCKDFRQFFATSEDLNTNQKIYDQEKSHGEESQGENTDGEETHSEETHGQETIEDPVIQGSDMEDPQKDDPDDKIYECEDCGLGFVDLTDLTDHQKVHSARGSCLVDSREYTHSVIHTHSISEYQRDYTGEQLYECPKCGESFIHSSFLFEHQRIHEQDQLYSMKGCDDGFIALLPMKPRRNRAAERNPALAGSAIRCLLCGQGFIHSSALNEHMRLHREDDLLEQSQMAEEAIIPGLALTEFQRSQTEERLFECAVCGESFVNPAELADHVTVHKNEPYEYGSSYTHTSFLTEPLKGAIPFYECKDCGKSFIHSTVLTKHKELHLEEEEEDEAAAAAAAAAQEVEANVHVPQVVLRIQGLNVEAAEPEVEAAEPEVEAAEPEVEAAEPNGEAEGPDGEAAEPIGEAGQPNGEAEQPNGDADEPDGAGIEDPEERAEEPEGKAEEPEGDADEPDGVGIEDPEEGEDQEIQVEEPYYDCHECTETFTSSTAFSEHLKTHASMIIFEPANAFGECSGYIERASTSTGGANQADEKYFKCDVCGQLFNDRLSLARHQNTHTG

SEQ ID NO: 9147 - protein, 145 aa, Homo sapiens
MATMIPPVKLKWLEHLNSSWITEDSESIATREGVAVLYSKLVSNKEVVPLPQQVLCLKGPQLPDFERESLSSDEQDHYLDALLSSQLALAKMVCSDSPFAGALRKRLLVLQRVFYALSNKYHDKGKVKQQQHSPESSSGSADVHS

SEQ ID NO: 9148 - protein, 1427 aa, Homo sapiens
  VARIANT 1: note = X can be any amino acid
XAKQERLEIASLSNQDHTSKKDPGGHRTAAILHGGSPDFVGNGKHRANSSGRSRRERQYSVCNSEDSPGSCEILYFNMGSPDQLMVHKGKCIGSDEQLGKLVYNALETATGGFVLLYEWVLQWQKKMGPFLTSQEKEKIDKCKKQIQGTETEFNSLVKLSHPNVVRYLAMNLKEQDDSIVVDILVEHISGVSLAAHLSHSGPIPVHQLRRYTAQLLSGLDYLHSNSVVHKVLSASNVLVDAEGTVKITDYSISKRLADICKEDVFEQTRVRFSDNALPYKTGKKGDVWRLGLLLLSLSQGQECGEYPVTIPSDLPADFQDFLKKCVCLDDKERWSPQQLLKHSFINPQPKMPLVEQSPEDSEGQDYVETVIPSNRLPSAAFFSETQRQFSRYFIEFEELQLLGKGAFGAVIKVQNKLDGCCYAVKRIPINPASRQFRRIKGEVTLLSRLHHENIVRYYNAWIERHERPAGPGTPPPDSGPLAKDDRAARGQPASDTDGLDSVEAAAPPPILSSSVEWSTSGERSASARFPATGPGSSDDEDDDEDEHGGVFSQSFLPASDSESDIIFDNEDENSKSQNQMEYCEKSTLRDTIDQGLYRDTVRLWRLFREILDGLAYIHEKGMIHRDLKPVNIFLDSDDHVKIGDFGLATDHLAFSADSKQDDQTGDLIKSDPSGHLTGMVGTALYVSPEVQGSTKSAYNQKVDLFSLGIIFFEMSYHPMVTASERIFVLNQLRDPTSPKFPEDFDDGEHAKQKSVISWLLNHDPAKRPTATELLKSELLPPPQMEESELHEVLHHTLTNVDGKAYRTMMAQIFSQRISPAIDYTYDSDILKGNFSIRTAKMQQHVCETIIRIFKRHGAVQLCTPLLLPRNRQIYEHNEAALFMDHSGMLVMLPFDLRIPFARYVARNNILNLKRYCIERVFRPRKLDRFHPKELLECAFDIVTSTTNSFLPTAEIIYTIYEIIQEFPALQERNYSIYLNHTMLLKAILLHCGIPEDKLSQVYIILYDAVTEKLTRREVEAKFCNLSLSSNSLCRLYKFIEQKGDLQDLMPTINSLIKQKTGIAQLVKYGLKDLEEVVGLLKKLGIKLQVLINLGLVYKVQQHNGIIFQFVAFIKRRQRAVPEILAAGGRYDLLIPQFRGPQALGPVPTAIGVSIAIDKISAAVLNMEESVTISSCDLLVVSVGQMSMSRAINLTQKLWTAGITAEIMYDWSQSQEELQEYCRHHEITYVALVSDKEGSHVKVKSFEKERQTEKRVLETELVDHVLQKLRTKVTDERNGREASDNLAVQNLKGSFSNASGLFEIHGATVVPIVSVLAPEKLSASTRRRYETQVQTRLQTSLANLHQKSSEIEILAVDLPKETILQFLSLEWDADEQAFNTTVKQLLSRLPKQRYLKLVCDEIYNIKVEKKVSVLFLYSYRDDYYRILF

SEQ ID NO: 9149 - protein, 1588 aa, Homo sapiens; identical to SEQ ID NO: 5490

SEQ ID NO: 9150 - protein, 1002 aa, Homo sapiens; identical to SEQ ID NO: 7688

SEQ ID NO: 9151 - protein, 49 aa, Homo sapiens
MALPHDSNETSYLLPPNNEDWGRQTIPDFVYGQKDLMAEGIQWPRNAPG

SEQ ID NO: 9152 - protein, 124 aa, Homo sapiens; identical to SEQ ID NO: 5720

SEQ ID NO: 9153 - protein, 30 aa, Homo sapiens
MATDSWALAVDEQEAAAESRTELPSPYSTS

SEQ ID NO: 9154 - protein, 267 aa, Homo sapiens; identical to SEQ ID NO: 7572

SEQ ID NO: 9155 - protein, 370 aa, Homo sapiens; identical to SEQ ID NO: 6828

SEQ ID NO: 9156 - protein, 903 aa, Homo sapiens
MATSADSPSSPLGAEDLLSDSSEPPGLNQVSSEVTSQLYASLRLSRQAEATARAQLYLPSTSPPHEGLDGFAQELSRSLSVGLEKNLKKKDGSKHIFEMESVRGQLQTMLQTSRDTAYRDPLIPGAGSERREEDSFDSDSTATLLNTRPLQDLSPSSSAQALEELFPRYTSLRPGPPLNPPDFQGLRDALDSEHTRRKHCERHIQSLQTRVLELQQQLAVAVAADRKKDTMIEQLDKTLARVVEGWNRHEAERTEVLRGLQEEHQAAELTRSKQQETVTRLEQSLSEAMEALNREQESARLQQRERETLEEERQALTLRLEAEQQRCCVLQEERDAARAGQLSEHRELETLRAALEEERQTWAQQEHQLKEHYQALQEESQAQLEREKEKSQREAQAAWETQHQLALVQSEVRRLEGELDTARRERDALQLEMSLVQARYESQRIQLESELAVQLEQRVTERLAQAQESSLRQAASLREHHRKQLQDLSGQHQQELASQLAQFKVEMAEREERQQQVAEDYELRLAREQARVCELQSGNQQLEEQRVELVERLQAMLQAHWDEANQLLSTTLPPPNPPAPPAGPSSPGPQEPEKEERRVWTMPPMAVALKPVLQQSREARDELPGAPPVLCSSSSDLSLLLGPSFQSQHSFQPLEPKPDLTSSTAGAFSALGAFHPDHRAERPFPEEDPGPDGEGLLKQGLPPAQLEGLKNFLHQLLETVPQNNENPSVDLLPPKSGPLTVPSWEEAPQVPRIPPPVHKTKVPLAMASSLFRVPEPPSSHSQGSGPSSGSPERGGDGLTFPRQLMEVSQLLRLYQARGWGALPAEDLLLYLKRLEHSGTDGRGDNVPRRNTDSRLGEIPRKEIPSQAVPRRLATAPKTEKPPARKKSGHPAPSSMRSRGGVWR

SEQ ID NO: 9157 - protein, 45 aa, Homo sapiens
MPLLVEGRRVRLPQSAGDLVRAHPPLEAPSPFWVLMMPLLVTLWS

SEQ ID NO: 9158 - protein, 360 aa, Homo sapiens; identical to SEQ ID NO: 5289

SEQ ID NO: 9159 - protein, 450 aa, Homo sapiens; identical to SEQ ID NO: 4877

SEQ ID NO: 9160 - protein, 370 aa, Homo sapiens; identical to SEQ ID NO: 6828

SEQ ID NO: 9161 - protein, 245 aa, Homo sapiens
MGGGYDLNLFASPPDSNFVCSVCHGVLKRPARLPCSHIFCKKCILRWLARQKTCPCCRKEVKRKKVVHMNKLRKTIGRLEVKCKNADAGCIVTCPLAHRKGHQDSCPFELTACPNEGCTSQVPRGTLAEHRQHCQQGSQQRCPLGCGATLDPAERARHNCYRELHNAWSVRQERRRPLLLSLLRRVRWLDQATSVVRRELAELSNFLEEDTALLEGAPQEEAEAAPEGNVGAEVVGEPRANIPCK

SEQ ID NO: 9162 - protein, 102 aa, Homo sapiens; identical to SEQ ID NO: 6001

SEQ ID NO: 9163 - protein, 490 aa, Homo sapiens; identical to SEQ ID NO: 6952

SEQ ID NO: 9164 - protein, 602 aa, Homo sapiens; identical to SEQ ID NO: 5696

SEQ ID NO: 9165 - protein, 205 aa, Homo sapiens; identical to SEQ ID NO: 6647

SEQ ID NO: 9166 - protein, 119 aa, Homo sapiens; identical to SEQ ID NO: 5859

SEQ ID NO: 9167 - protein, 489 aa, Homo sapiens
MPMPTEGTPPPLSGTPIPVPAYFRHAEPGFSLKRPRGLSRSLPPPPPAKGSIPISRLFPAAPGWHQLQPRRVSFRGEASETLQSPGYDPSRPESFFQQSFQRLSRLGHGSYGEVFKVRSKEDGRLYAVKRSMSPFRGPKDRARKLAEVGSHEKVGQHPCCVRLEQAWEEGGILYLQTELCGPSLQQHCEAWGASLPEAQVWGYLRDTLLALAHLHSQGLVHLDVKPANIFLGPRGRCKLGDFGLLVELGTAGAGEVQEGDPRYMAPELLQGSYGTAADVFSLGLTILEVACNMELPHGGEGWQQLRQGYLPPEFTAGLSSELRSVLVMMLEPDPKLRATAEALLALPVLRQPRAWGVLWCMAAEALSRGWALWQALLALLCWLWHGLAHPASWLQPLGPPATPPGSPPCSLLLDSSLSSNWDDDSLGPSLSPEAVLARTVGSTSTPRSRCTPRDALDLSDINSEPPRGSFPSFEPRNLLSLFEDTLDPT

SEQ ID NO: 9168 - protein, 430 aa, Homo sapiens
MLERWHQLQPRRVSFRGEASETLQSPGYDPSRPESFFQQSFQRLSRLGHGSYGEVFKVRSKEDGRLYAVKRSMSPFRGPKDRARKLAEVGSHEKVGQHPCCVRLEQAWEEGGILYLQTELCGPSLQQHCEAWGASLPEAQVWGYLRDTLLALAHLHSQGLVHLDVKPANIFLGPRGRCKLGDFGLLVELGTAGAGEVQEGDPRYMAPELLQGSYGTAADVFSLGLTILEVACNMELPHGGEGWQQLRQGYLPPEFTAGLSSELRSVLVMMLEPDPKLRATAEALLALPVLRQPRAWGVLWCMAAEALSRGWALWQALLALLCWLWHGLAHPASWLQPLGPPATPPGSPPCSLLLDSSLSSNWDDDSLGPSLSPEAVLARTVGSTSTPRSRCTPRDALDLSDINSEPPRGSFPSFEPRNLLSLFEDTLDPT

SEQ ID NO: 9169 - protein, 221 aa, Homo sapiens; identical to SEQ ID NO: 5870

SEQ ID NO: 9170 - protein, 742 aa, Homo sapiens; identical to SEQ ID NO: 8973

SEQ ID NO: 9171 - protein, 192 aa, Homo sapiens
MSTAAVPELKQISRVEAMRLGPGWSHSCHAMLYAANPGQLFGRIPMRFSVLMQMRFDGLLGFPGGFVDRRFWSLEDGLNRVLGLGLGCLRLTEADYLSSHLTEGPHRVVAHLYARQLTLEQLHAVEISAVHSRDHGLEVGPPPGPRPPPRGLALAPWKAPMGAGPRAGPAVHPEGPSRRLPQLPEQRLREHG

SEQ ID NO: 9172 - protein, 850 aa, Homo sapiens
MLERRALLWQREAGPGWGDRARAGTGGAGGGCGGAMAERGPAFCGLYDTSSLLRYCNDDNLSGTSGMEVDDRVSALEQRLQLQEDELAVLKAALADALRRLRACEEQGAALRARGTPKGRAPPRLGTTASVCQLLKGLPTRTPLNGSGPPRRVGGYATSPSSPKKEATSGRSSVRRYLSPERLASVRREDPRSRTTSSSSNCSAKKEGKTKEVIFSVEDGSVKMFLRGRPVPMMIPDELAPTYSLDTRSELPSCRLKLEWVYGYRGRDCRANLYLLPTGEIVYFVASVAVLYSVEEQRQRHYLGHNDDIKCLAIHPDMVTIATGQVAGTTKEGKPLPPHVRIWDSVSLSTLHVLGLGVFDRAVCCVGFSKSNGGNLLCAVDESNDHMLSVWDWAKETKVVDVKCSNEAVLVATFHPTDPTVLITCGKSHIYFWTLEGGSLSKRQGLFEKHEKPKYVLCVTFLEGGDVVTGDSGGNLYVWGKGGNRITQAVLGAHDGGVFGLCALRDGTLVSGGGRDRRVVLWGSDYSKLQEVEVPEDFGPVRTVAEGHGDTLYVGTTRNSILQGSVHTGFSLLVQGHVEELWGLATHPSRAQFVTCGQDKLVHLWSSDSHQPLWSRIIEDPARSAGFHPSGSVLAVGTVTGRWLLLDTETHDLVAIHTDGNEQISVVSFSPDGAYLAVGSHDNLVYVYTVDQGGRKVSRLGKCSGHSSFITHLDWAQDSSCFVTNSGDYEILYWDPATCKQITSADAVRNMEWATATCVLGFGVFGIWSEGADGTDINAVARSHDGKLLASADDFGKVHLFSYPCCQPRALSHKYGGHSSHVTNVAFLWDDSMALTTGGKDTSVLQWRVV

SEQ ID NO: 9173 - protein, 833 aa, Homo sapiens; identical to SEQ ID NO: 7784

SEQ ID NO: 9174 - protein, 1116 aa, Homo sapiens; identical to SEQ ID NO: 6025

SEQ ID NO: 9175 - protein, 684 aa, Homo sapiens; identical to SEQ ID NO: 5923

SEQ ID NO: 9176 - protein, 125 aa, Homo sapiens; identical to SEQ ID NO: 4724

SEQ ID NO: 9177 - protein, 1108 aa, Homo sapiens; identical to SEQ ID NO: 5688

SEQ ID NO: 9178 - protein, 197 aa, Homo sapiens; identical to SEQ ID NO: 7467

SEQ ID NO: 9179 - protein, 301 aa, Homo sapiens; identical to SEQ ID NO: 5683

SEQ ID NO: 9180 - protein, 328 aa, Homo sapiens; identical to SEQ ID NO: 5981

SEQ ID NO: 9181 - protein, 420 aa, Homo sapiens
MLSSFPVVLLETMSHYTDEPRFTIEQIDLLQRLRRTGMTKHEILHALETLDRLDQEHSDKFGRRSSYGGSSYGNSTNNVPASSSTATASTQTQHSGMSPSPSNSYDTSPQPCTTNQNGRENNERLSTSNGKMSPTRYHANSMGQRSYSFEASEEDLDVDDKVEELMRRDSSVIKEEIKAFLANRRISQAVVAQVTGISQSRISHWLLQQGSDLSEQKKRAFYRWYQLEKTNPGATLSMRPAPIPIEDPEWRQTPPPVSATSGTFRLRRGSRFTWRKECLAVMESYFNENQYPDEAKREEIANACNAVIQKPGKKLSDLERVTSLKVYNWFANRRKEIKRRANIEAAILESHGIDVQSPGGHSNSDDVDGNDYSEQDDSTSHSDHQDPISLAVEMAAVNHTILALARQGANEIKTEALDDD

SEQ ID NO: 9182 - protein, 420 aa, Homo sapiens; identical to SEQ ID NO: 9181

SEQ ID NO: 9183 - protein, 304 aa, Homo sapiens
MLSSFPVVLLETMSHYTDEPRFTIEQIDLLQRLRRTGMTKHEILHALETLDRLDQEHSDKFGRRSSYGGSSYGNSTNNVPASSSTATASTQTQHSGMSPSPSNSYDTSPQPCTTNQNGRENNERLSTSNGKMSPTRYHANSMGQRSYSFEASEEDLDVDDKVEELMRRDSSVIKEEIKAFLANRRISQAVVAQVTGISQSRISHWLLQQGSDLSEQKKRAFYRWYQLEKTNPGATLSMRPAPIPIEDPEWRQTPPPVSATSGTFRLRRGSRFTWRKECLAVMERNTWSPERRMEENKWKLLSAG

SEQ ID NO: 9184 - protein, 443 aa, Homo sapiens
MLSSFPVVLLETMSHYTDEPRFTIEQIDLLQRLRRTGMTKHEILHALETLDRLDQEHSDKFGRRSSYGGSSYGNSTNNVPASSSTATASTQTQHSGMSPSPSNSYDTSPQPCTTNQNGRENNERLSTSNGKMSPTRYHANSMGQRSYSFEASEEDLDVDDKVEELMRRDSSVIKEEIKAFLANRRISQAVVAQVTGISQSRISHWLLQQGSDLSEQKKRAFYRWYQLEKTNPGATLSMRPAPIPIEDPEWRQTPPPVSATSGTFRLRRGSRFTWRKECLAVMESYFNENQYPDEAKREEIANACNAVIQKPGKKLSDLERVTSLKVYNWFANRRKEIKRRANIAAILESHGIDVQSPGGHSNSDDVDGNDYSEQDTWQVRNGEEEEGRSSEGGREAEKDDSTSHSDHQDPISLAVEMAAVNHTILALARQGANEIKTEALDDD

SEQ ID NO: 9185 - protein, 118 aa, Homo sapiens
MLSSFPVVLLETMSHYTDEPRFTIEQIDLLQRLRRTGMTKHEILHALETLDRLDQEHSDKFGRRSSYGGSSYGNSTNNVPASSSTATASTQTQHSGMSPSPSNSYDTSPQPCTTNQNG

SEQ ID NO: 9186 - protein, 443 aa, Homo sapiens; identical to SEQ ID NO: 9184

SEQ ID NO: 9187 - protein, 405 aa, Homo sapiens
MLSSFPVVLLETMSHYTDEPRFTIEQIDLLQRLRRTGMTKHEILHALETLDRLDQEHSDKFGRRSSYGGSSYGNSTNNVPASSSTATASTQTQHSGMSPSPSNSYDTSPQPCTTNQNGRENNERLSTSNGKMSPTRYHANSMGQRSYSFEASEEDLDVDDKVEELMRRDSSVIKEEIKAFLANRRISQAVVAQVTGISQSRISHWLLQQGSDLSEQKKRAFYRWYQLEKTNPGATLSMRPAPIPIEDPEWRQTPPPVSATSGTFRLRRGSRFTWRKECLAVMESYFNENQYPDEAKREEIANACNAVIQKPGKKLSDLERVTSLKVYNWFANRRKEIKRRANIAAILESHGIDVQSPGGHSNSDDVDGNDYSEQDTWQVRNGEEEEGRSSEGGREAEKVEEERRI

SEQ ID NO: 9188 - DNA, 1380 bp, Homo sapiens
  source 1..1380: mol_type = genomic DNA
atgaccgccgaggagatgaaggccaccgagagcggcgcccagagcgcccccctgcccatggagggcgtggacatcagccccaagcaggacgagggcgtgctgaaggtgatcaagagagagggcaccggcaccgagatgcccatgatcggcgacagagtgttcgtgcactacaccggctggctgctggacggcaccaagttcgacagcagcctggacagaaaggacaagttcagcttcgacctgggcaagggcgaggtgatcaaggcctgggacatcgccatcgccaccatgaaggtgggcgaggtgtgccacatcacctgcaagcccgagtacgcctacggcagcgccggcagcccccccaagatcccccccaacgccaccctggtgttcgaggtggagctgttcgagttcaagggcgaggacctgaccgaggaggaggacggcggcatcatcagaagaatccagaccagaggcgagggctacgccaagcccaacgagggcgccatcgtggaggtggccctggagggctactacaaggacaagctgttcgaccagagagagctgagattcgagatcggcgagggcgagaacctggacctgccctacggcctggagagagccatccagagaatggagaagggcgagcacagcatcgtgtacctgaagcccagctacgccttcggcagcgtgggcaaggagaagttccagatcccccccaacgccgagctgaagtacgagctgcacctgaagagcttcgagaaggccaaggagagctgggagatgaacagcgaggagaagctggagcagagcaccatcgtgaaggagagaggcaccgtgtacttcaaggagggcaagtacaagcaggccctgctgcagtacaagaagatcgtgagctggctggagtacgagagcagcttcagcaacgaggaggcccagaaggcccaggccctgagactggccagccacctgaacctggccatgtgccacctgaagctgcaggccttcagcgccgccatcgagagctgcaacaaggccctggagctggacagcaacaacgagaagggcctgttcagaagaggcgaggcccacctggccgtgaacgacttcgagctggccagagccgacttccagaaggtgctgcagctgtaccccaacaacaaggccgccaagacccagctggccgtgtgccagcagagaatcagaagacagctggccagagagaagaagctgtacgccaacatgttcgagagactggccgaggaggagaacaaggccaaggccgaggccagcagcggcgaccaccccaccgacaccgagatgaaggaggagcagaagagcaacaccgccggcagccagagccaggtggagaccgaggcctag

SEQ ID NO: 9189 - DNA, 477 bp, Homo sapiens
  source 1..477: mol_type = genomic DNA
atggagccccccgagggcgccggcaccggcgagatcgtgaaggaggccgaggtgccccaggccgccctgggcgtgcccgcccagggcaccggcgacaacggccacacccccgtggaggaggaggtgggcggcatccccgtgcccgcccccggcctgctgcaggtgaccgagagaagacagcccctgagcagcgtgagcagcctggaggtgcacttcgacctgctggacctgaccgagctgaccgacatgagcgaccaggagctggccgaggtgttcgccgacagcgacgacgagaacctgaacaccgagagccccgccggcctgcaccccctgcccagagccggctacctgagaagccccagctggaccagaaccagagccgagcagagccacgagaagcagcccctgggcgaccccgagagacaggccaccgtgctggacaccttcctgaccgtggagagaccccaggaggactag

SEQ ID NO: 9190 - DNA, 954 bp, Homo sapiens
  source 1..954: mol_type = genomic DNA
atggccagcgtgatccccgccagcaacagaagcatgagaagcgacagaaacacctacgtgggcaagagattcgtgcacgtgaagaacccctacctggacctgatggacgaggacatcctgtaccacctggacctgggcaccaagacccacaacctgcccgccatgttcggcgacgtgaagttcgtgtgcgtgggcggcagccccaacagaatgaaggccttcgccctgttcatgcacaaggagctgggcttcgaggaggccgaggaggacatcaaggacatctgcgccggcaccgacagatactgcatgtacaagaccggccccgtgctggccatcagccacggcatgggcatccccagcatcagcatcatgctgcacgagctgatcaagctgctgcaccacgccagatgctgcgacgtgaccatcatcagaatcggcaccagcggcggcatcggcatcgcccccggcaccgtggtgatcaccgacatcgccgtggacagcttcttcaagcccagattcgagcaggtgatcctggacaacatcgtgaccagaagcaccgagctggacaaggagctgagcgaggagctgttcaactgcagcaaggagatccccaacttccccaccctggtgggccacaccatgtgcacctacgacttctacgagggccagggcagactggacggcgccctgtgcagcttcagcagagagaagaagctggactacctgaagagagccttcaaggccggcgtgagaaacatcgagatggagagcaccgtgttcgccgccatgtgcggcctgtgcggcctgaaggccgccgtggtgtgcgtgaccctgctggacagactggactgcgaccagatcaacctgccccacgacgtgctggtggagtaccagcagagaccccagctgctgatcagcaacttcatcagaagaagactgggcctgtgcgactag

SEQ ID NO: 9191 - DNA, 1095 bp, Homo sapiens
  source 1..1095: mol_type = genomic DNA
atgagcgaggtggaggccgccgccggcgccaccgccgtgcccgccgccaccgtgcccgccaccgccgccggcgtggtggccgtggtggtgcccgtgcccgccggcgagccccagaagggcggcggcgccggcggcggcggcggcgccgccagcggccccgccgccggcacccccagcgcccccggcagcagaacccccggcaaccccgccaccgccgtgagcggcacccccgccccccccgccagaagccaggccgacaagcccgtgctggccatccaggtgctgggcaccgtgaagtggttcaacgtgagaaacggctacggcttcatcaacagaaacgacaccaaggaggacgtgttcgtgcaccagaccgccatcaagagaaacaaccccagaaagttcctgagaagcgtgggcgacggcgagaccgtggagttcgacgtggtggagggcgagaagggcgccgaggccaccaacgtgaccggccccggcggcgtgcccgtgaagggcagcagatacgcccccaacagaagaaagagcagaagattcatccccagaccccccagcgtggcccccccccccatggtggccgagatccccagcgccggcaccggccccggcagcaagggcgagagagccgaggacagcggccagagacccagaagatggtgccccccccccttcttctacagaagaagattcgtgagaggccccagaccccccaaccagcagcagcccatcgagggcaccgacagagtggagcccaaggagaccgcccccctggagggccaccagcagcagggcgacgagagagtgcccccccccagattcagacccagatacagaagacccttcagacccagacccagacagcagcccaccaccgagggcggcgacggcgagaccaagcccagccagggccccgccgacggcagcagacccgagccccagagacccagaaacagaccctacttccagagaagaagacagcaggcccccggcccccagcaggcccccggccccagacagcccgccgcccccgagaccagcgcccccgtgaacagcggcgaccccaccaccaccatcctggagtag

SEQ ID NO: 9192 - DNA, 5706 bp, Homo sapiens
  source 1..5706: mol_type = genomic DNA
atggccaccttcagaaacaaccacatgaagaccaaggccagcgtgagaaagagcttcagcgaggacgtgttccagagcgtgaagagcctgctgcagagccagaaggagctgtgcagcgtgaccgccgaggactgcctgcagcaggacgagcacgccaacctgaccgaggtgaccttcctgggcttcaacgaggagaccgacgccgcccacatccaggacctggccgccgtgagcctggagctgcccgacatcctgaacagcctgcacttctgcagcctgaacgagaacgagatcatctgcatgaagaacatcaacaagcccctggacatcagcagcgaccccctgaaccagagccaccccagcggcatgctgtgcgtgatgagagtgagccccaccagccccagactgagaatcgacttcatcttcagcctgctgagcaagtacgccaccggcatcagatacaccctggacaccttcctgcaccagaagcaccagctggagaccaccgacgaggacgacgacgacaccaaccagagcgtgagcagcatcgaggacgacttcgtgaccgccttcgagcacctggaggaggaggagaccagcaagccctacaacgacggcatgaacatcaccgtgctgagaagccagtgcgacgccgccagccagaccgtgaccggccaccacctggagacccacgacctgaagatcctgatcagcagcggccagcagaagagcctggccaagcccagcaccagcagcgtgaacgtgctgggccacaaggagctgcccagcgtgaagaccagcgtgaccaccagcatcagcgagccctggacccagagaagcttctacagaagcagcaacgccagcgacaaggacagcgacctgcagaagaccttcttcagcagcagccccgcctacagcagcgagagcgagtgcagcagccccagccccgtgatcttcctggacgaggagggctaccagaagagcctgaaggccaagctggagctgcccaagatccccgtgatgaaggacgacatcgaggacagcgacagcgaggtgagcgagttcttcgacagcttcgaccagttcgacgagctggagcagaccctggagacctgcctgttcaacaaggaccccgtgatcggcaagagcagccagagaaagggccacaagcacggcaagagctgcatgaacccccagaagttcaagttcgacagacccgccctgcccgccaacgtgagaaagcccacccccagaaagcccgagagcccctacggcaacctgtgcgacgcccccgacagccccagacccgtgaaggccagcagagaggacagcggcctgttcagccccatcagaagcagcgccttcagccccctgggcggctgcacccccgccgagtgcttctgccagaccgacatcggcggcgacagaatccacgagaaccacgacagcgtgtactacacctacgaggactacgccaagagcatcagctgcgaggtgctgggcagcgtgctgagaacccaccacaccaacaccctgagcaacatcaacagcatcaagcacggcgagaacaagaccgtgaccttcaagcacggcaacctggaccagaagaacaagagcaagaacaagagcctgatgatcaaggacagcatccagaagttcgccgccgacctggtggagaagagcttcggcagcgccttcaaggacctgcagaagggcgtgagcagctgcaccaacgccctgtaccacctggccatcaagctgaccagcagcgtgctgcagatggccttcgacgagctgagaagacagagagccttcagcctgaaggagagagccatcagcggcctggccaacttcctggtgagcgaggccctgagcaacgccctgaaggacctgcagtacgtgaagaagcagatcttcaccaacaccgtggccagattcgccgccgacctggccgaggagctggtgttcgagggcatcatggaggtgtgccagttcagctacccccagacccccgccagcccccagtgcggcagcttcgacttcgaggacaaggtggtgaagctgtacgccaaggacctgagcgagagcgtgatccaggaggccttcatcgagctgagccaggtggacgtgaccttcaccaccaaggccgccgtgagcgtgagcaccgacaacatcaagtacgtgagcgccgagagcgtggtgcccagcacccaggccgtgaccttcagccccagcttccacaaccaggccatcatggtgaccaagcccgtgcaggagtacaagaaggagtacaccgtgcagcaggccctgttctgcaccagcggcatcgtgaccagcatccccgtgcccctggccggcagcgccctgctgccctaccacatcagcagcaccgcctgccaggccaaggcccacctgagcagcgacgacagcaacagcaacggcgacagcgcccaggtgcacatcgccaccaagaacagagaggagaaggccgcctgcctgagaaacatctgcctgcccagcgagcacaaccccggcaaccagaacgacttcaagcccaccaacgacgacatcgagatgcagagcagcagcaagctgcccaacgaccccgccatcatcagcaacttcagcgccgccgtggtgcacaccatcgtgaacgagaccctggagagcatgaccagcctggaggtgaccaagatggtggacgagagaaccgactacctgaccaagagcctgaaggagaagaccccccccttcagccactgcgaccaggccgtgctgcagtgcagcgaggccagcagcaacaaggacatgttcgccgacagactgagcaagagcatcatcaagcacagcatcgacaagagcaagagcgtgatccccaacatcgacaagaacgccgtgtacaaggagagcctgcccgtgagcggcgaggagagccagctgacccccgagaagagccccaagttccccgacagccagaaccagctgacccactgcagcctgagcgccgccaaggactgcgtgcccgagtgcaaggtgagcatggtgcacggcagcagcctggagaccctgcccagctgccccgccgtgaccggccagaagagcgacctgaaggagagcgccaaggaccagcccctgaagaagcacaacctgaacagcaccagcctggaggccctgagcttcggccaggagaaccccttcccccacagccacaccttcagcagcaccgccctgacctgcgtggacggcctgcacgtggaggacaagcagaaggtgagagacagaaacgtgatccccgacaccccccccagcacccccctggtgcccagcagagccagcagcgagtgggacatcaagaagctgaccaagaagctgaagggcgagctggccaaggagttcgcccccgccaccccccccagcaccccccacaacagcagcgtgggcagcctgagcgagaacgagcagaacaccatcgagaaggaggagttcatgctgaagctgatgagaagcctgagcgaggaggtggagagcagcgagagcggcgagctgcccgaggtggacgtgaagagcgagcacagcggcaagaaggtgcagttcgccgaggccctggccacccacatcctgagcctggccaccgagatggccgccagccacctggacaacaagatcatccaggagcccaaggtgaagaacccctgcctgaacgtgcagagccagagaagcgtgagccccaccttcctgaaccccagcgacgagaacctgaagaccctgtgcaacttcgccggcgacctggccgccgaggtgatcaccgaggccgagaagatcgccaaggtgagaaactgcatgctgttcaagcagaagaagaacagctgctacgccgacggcgacgaggactacaaggtggaggagaagctggacatcgaggccgtggtgcaccccagagaggtggaccccttcatcctgagcctgccccccagcagctgcatgagcggcctgatgtacaagtaccccagctgcgagagcgtgaccgacgagtacgccggccacctgatccagatcctgaagcaggagggcggcaacagcgagctgatcatggaccagtacgccaacagactggcctacagaagcgtgaagagcggcctgcaggaggccgccaagaccaccaaggtgcagtgcaacagcagaatgttccccgtgcccagcagccaggtgaagaccaacaaggagctgctgatgttcagcaacaaggagcaccaccaggaggccgacaagaagagacagagcaagagaaacgagggctacttctgcaagaaccagacctgcgagagaaccctggacccctacagaaacgaggtgagccagctgtacagcttcagcaccagcctggtgcacagcatcaccaaggacgccaaggaggagctgaccgccagcctggtgggcctgcccaagagcctgaccgacagctgcctgttcgagaagagcggctacgaggaggacaacgagtgccacgtgacccccgagctgcccaagagcctgcagcccagcagccagaaccacagattctaccacagcaccggcagcctgaacggctacggctgcggcgacaacgtggtgcaggccgtggagcagtacgccaagaaggtggtggacgacaccctggagctgaccctgggcagcaccgtgttcagagtgagcgagaccaccaagagcgccgacagagtgacctacgccgagaagctgagccccctgaccggccaggcctgcagatactgcgacctgaaggagctgcacaactgcaccggcaacagcagccagcacttcttcagacagggcagcctggccagcagcaagcccgccagcaaccccaagttcagcagcagataccagaagagcagaatcttccacctgagcgtgccccagatccacgtgaacctggacaagaaggccgtgctggccgagaagatcgtggccgaggccatcgagaaggccgagagagagctgagcagcaccagcctggccgccgacagcggcatcggccaggagggcgccagcttcgccgagagcctggccaccgagaccatgaccgccgccgtgaccaacgtgggccacgccgtgagcagcagcaaggagatcgaggacttccagagcaccgagagcgtgagcagccagcagatgaacctgagcatcggcgacgacagcaccggcagctggagcaacctgagcttcgaggacgagcaccaggacgagagcagcagcttccaccacctgagcgagagcaacggcaacagcagcagctggagcagcctgggcctggagggcgacctgtacgaggacaacctgagcttccccaccagcgacagcgacggccccgacgacaaggacgaggagcacgaggacgaggtggagggcctgggccaggacggcaagaccctgctgatcaccaacatcgacatggagccctgcaccgtggacccccagctgagaatcatcctgcagtggctgatcgccagcgaggccgaggtggccgagctgtacttccacgacagcgccaacaaggagttcatgctgctgagcaagcagctgcaggagaagggctggaaggtgggcgacctgctgcaggccgtgctgcagtactacgaggtgatggagaaggccagcagcgaggagagatgcaagagcctgttcgactggctgctggagaacgcctag

SEQ ID NO: 9193 - DNA, 417 bp, Homo sapiens
  source 1..417: mol_type = genomic DNA
atggccgagctgcagcagctgagagtgcaggaggccgtggagagcatggtgaagagcctggagagagagaacatcagaaagatgcagggcctgatgttcagatgcagcgccagctgctgcgaggacagccaggccagcatgaagcaggtgcaccagtgcatcgagagatgccacgtgcccctggcccaggcccaggccctggtgaccagcgagctggagaagttccaggacagactggccagatgcaccatgcactgcaacgacaaggccaaggacagcatcgacgccggcagcaaggagctgcaggtgaagcagcagctggacagctgcgtgaccaagtgcgtggacgaccacatgcacctgatccccaccatgaccaagaagatgaaggaggccctgctgagcatcggcaagtag

SEQ ID NO: 9194 - DNA, 1110 bp, Homo sapiens
  source 1..1110: mol_type = genomic DNA
atgaccctggaggccatcagatacagcagaggcagcctgcagatcctggaccagctgctgctgcccaagcagagcagatacgaggccgtgggcagcgtgcaccaggcctgggaggccatcagagccatgaaggtgagaggcgcccccgccatcgccctggtgggctgcctgagcctggccgtggagctgcaggccggcgccggcggccccggcctggccgccctggtggccttcgtgagagacaagctgagcttcctggtgaccgccagacccaccgccgtgaacatggccagagccgccagagacctggccgacgtggccgccagagaggccgagagagagggcgccaccgaggaggccgtgagagagagagtgatctgctgcaccgaggacatgctggagaaggacctgagagacaacagaagcatcggcgacctgggcgccagacacctgctggagagagtggcccccagcggcggcaaggtgaccgtgctgacccactgcaacaccggcgccctggccaccgccggctacggcaccgccctgggcgtgatcagaagcctgcacagcctgggcagactggagcacgccttctgcaccgagaccagaccctacaaccagggcgccagactgaccgccttcgagctggtgtacgagcagatccccgccaccctgatcaccgacagcatggtggccgccgccatggcccacagaggcgtgagcgccgtggtggtgggcgccgacagagtggtggccaacggcgacaccgccaacaaggtgggcacctaccagctggccatcgtggccaagcaccacggcatccccttctacgtggccgcccccagcagcagctgcgacctgagactggagaccggcaaggagatcatcatcgaggagagacccggccaggagctgaccgacgtgaacggcgtgagaatcgccgcccccggcatcggcgtgtggaaccccgccttcgacgtgaccccccacgacctgatcaccggcggcatcatcaccgagctgggcgtgttcgcccccgaggagctgagaaccgccctgaccaccaccatcagcagcagagacggcaccctggacggcccccagatgtag

SEQ ID NO: 9195 - DNA, 3660 bp, Homo sapiens
  source 1..3660: mol_type = genomic DNA
atgatgagcctgagcgtgagaccccagagaagactgctgagcgccagagtgaacagaagccagagcttcgccggcgtgctgggcagccacgagagaggccccagaagcttccccgtgttcagcccccccggcccccccagaaagccccccgccctgagcagagtgagcagaatgttcagcgtggcccaccccgccgccaaggtgccccagcccgagagactggacctggtgtacaccgccctgaagagaggcctgaccgcctacctggaggtgcaccagcaggagcaggagaagctgcagggccagatcagagagagcaagagaaacagcagactgggcttcctgtacgacctggacaagcaggtgaagagcatcgagagattcctgagaagactggagttccacgccagcaagatcgacgagctgtacgaggcctactgcgtgcagagaagactgagagacggcgcctacaacatggtgagagcctacaccaccggcagccccggcagcagagaggccagagacagcctggccgaggccaccagaggccacagagagtacaccgagagcatgtgcctgctggagagcgagctggaggcccagctgggcgagttccacctgagaatgaagggcctggccggcttcgccagactgtgcgtgggcgaccagtacgagatctgcatgaagtacggcagacagagatggaagctgagaggcagaatcgagggcagcggcaagcaggtgtgggacagcgaggagaccatcttcctgcccctgctgaccgagttcctgagcatcaaggtgaccgagctgaagggcctggccaaccacgtggtggtgggcagcgtgagctgcgagaccaaggacctgttcgccgccctgccccaggtggtggccgtggacatcaacgacctgggcaccatcaagctgagcctggaggtgacctggagccccttcgacaaggacgaccagcccagcgccgccagcagcgtgaacaaggccagcaccgtgaccaagagattcagcacctacagccagagcccccccgacacccccagcctgagagagcaggccttctacaacatgctgagaagacaggaggagctggagaacggcaccgcctggagcctgagcagcgagagcagcgacgacagcagcagcccccagctgagcggcaccgccagacacagccccgcccccagacccctggtgcagcagcccgagcccctgcccatccaggtggccttcagaagacccgagacccccagcagcggccccctggacgaggagggcgccgtggcccccgtgctggccaacggccacgccccctacagcagaaccctgagccacatcagcgaggccagcgtggacgccgccctggccgaggccagcgtggaggccgtgggccccgagagcctggcctggggccccagcccccccacccaccccgcccccacccacggcgagcaccccagccccgtgccccccgccctggaccccggccacagcgccaccagcagcaccctgggcaccaccggcagcgtgcccaccagcaccgaccccgcccccagcgcccacctggacagcgtgcacaagagcaccgacagcggccccagcgagctgcccggccccacccacaccaccaccggcagcacctacagcgccatcaccaccacccacagcgcccccagccccctgacccacaccaccaccggcagcacccacaagcccatcatcagcaccctgaccaccaccggccccaccctgaacatcatcggccccgtgcagaccaccaccagccccacccacaccatgcccagccccacccacaccaccgccagccccacccacaccagcaccagccccacccacacccccaccagccccacccacaagaccagcatgagcccccccaccaccaccagccccacccccagcggcatgggcctggtgcagaccgccaccagccccacccaccccaccaccagccccacccaccccaccaccagccccatcctgatcaacgtgagccccagcaccagcctggagctggccaccctgagcagccccagcaagcacagcgaccccaccctgcccggcaccgacagcctgccctgcagcccccccgtgagcaacagctacacccaggccgaccccatggcccccagaaccccccaccccagccccgcccacagcagcagaaagcccctgaccagccccgcccccgaccccagcgagagcaccgtgcagagcctgagccccacccccagcccccccacccccgccccccagcacagcgacctgtgcctggccatggccgtgcagacccccgtgcccaccgccgccggcggcagcggcgacagaagcctggaggaggccctgggcgccctgatggccgccctggacgactacagaggccagttccccgagctgcagggcctggagcaggaggtgaccagactggagagcctgctgatgcagagacagggcctgaccagaagcagagccagcagcctgagcatcaccgtggagcacgccctggagagcttcagcttcctgaacgaggacgaggacgaggacaacgacgtgcccggcgacagaccccccagcagccccgaggccggcgccgaggacagcatcgacagccccagcgccagacccctgagcaccggctgccccgccctggacgccgccctggtgagacacctgtaccactgcagcagactgctgctgaagctgggcaccttcggccccctgagatgccaggaggcctgggccctggagagactgctgagagaggccagagtgctggaggccgtgtgcgagttcagcagaagatgggagatccccgccagcagcgcccaggaggtggtgcagttcagcgccagcagacccggcttcctgaccttctgggaccagtgcaccgagagactgagctgcttcctgtgccccgtggagagagtgctgctgaccttctgcaaccagtacggcgccagactgagcctgagacagcccggcctggccgaggccgtgtgcgtgaagttcctggaggacgccctgggccagaagctgcccagaagaccccagcccggccccggcgagcagctgaccgtgttccagttctggagcttcgtggagaccctggacagccccaccatggaggcctacgtgaccgagaccgccgaggaggtgctgctggtgagaaacctgaacagcgacgaccaggccgtggtgctgaaggccctgagactggcccccgagggcagactgagaagagacggcctgagagccctgagcagcctgctggtgcacggcaacaacaaggtgatggccgccgtgagcacccagctgagaagcctgagcctgggccccaccttcagagagagagccctgctgtgcttcctggaccagctggaggacgaggacgtgcagaccagagtggccggctgcctggccctgggctgcatcaaggcccccgagggcatcgagcccctggtgtacctgtgccagaccgacaccgaggccgtgagagaggccgccagacagagcctgcagcagtgcggcgaggagggccagagcgcccacagaagactggaggagagcctggacgccctgcccagaatcttcggccccggcagcatggccagcaccgccttctag

SEQ ID NO: 9196 - DNA, 1326 bp, Homo sapiens
  source 1..1326: mol_type = genomic DNA
atggccagcgtggccgccgccagagccgtgcccgtgggcagcggcctgagaggcctgcagagaaccctgcccctggtggtgatcctgggcgccaccggcaccggcaagagcaccctggccctgcagctgggccagagactgggcggcgagatcgtgagcgccgacagcatgcaggtgtacgagggcctggacatcatcaccaacaaggtgagcgcccaggagcagagaatctgcagacaccacatgatcagcttcgtggaccccctggtgaccaactacaccgtggtggacttcagaaacagagccaccgccctgatcgaggacatcttcgccagagacaagatccccatcgtggtgggcggcaccaactactacatcgagagcctgctgtggaaggtgctggtgaacaccaagccccaggagatgggcaccgagaaggtgatcgacagaaaggtggagctggagaaggaggacggcctggtgctgcacaagagactgagccaggtggaccccgagatggccgccaagctgcacccccacgacaagagaaaggtggccagaagcctgcaggtgttcgaggagaccggcatcagccacagcgagttcctgcacagacagcacaccgaggagggcggcggccccctgggcggccccctgaagttcagcaacccctgcatcctgtggctgcacgccgaccaggccgtgctggacgagagactggacaagagagtggacgacatgctggccgccggcctgctggaggagctgagagacttccacagaagatacaaccagaagaacgtgagcgagaacagccaggactaccagcacggcatcttccagagcatcggcttcaaggagttccacgagtacctgatcaccgagggcaagtgcaccctggagaccagcaaccagctgctgaagaagggccccggccccatcgtgccccccgtgtacggcctggaggtgagcgacgtgagcaagtgggaggagagcgtgctggagcccgccctggagatcgtgcagagcttcatccagggccacaagcccaccgccacccccatcaagatgccctacaacgaggccgagaacaagagaagctaccacctgtgcgacctgtgcgacagaatcatcatcggcgacagagagtgggccgcccacatcaagagcaagagccacctgaaccagctgaagaagagaagaagactggacagcgacgccgtgaacaccatcgagagccagagcgtgagccccgaccacaacaaggagcccaaggagaagggcagccccggccagaacgaccaggagctgaagtgcagcgtgtag

SEQ ID NO: 9197 - DNA, 618 bp, Homo sapiens
  source 1..618: mol_type = genomic DNA
atggccgagcccctgcagcccgaccccggcgccgccgaggacgccgccgcccaggccgtggagacccccggctggaaggcccccgaggacgccggcccccagcccggcagctacgagatcagacactacggccccgccaagtgggtgagcaccagcgtggagagcatggactgggacagcgccatccagaccggcttcaccaagctgaacagctacatccagggcaagaacgagaaggagatgaagatcaagatgaccgcccccgtgaccagctacgtggagcccggcagcggccccttcagcgagagcaccatcaccatcagcctgtacatccccagcgagcagcagttcgacccccccagacccctggagagcgacgtgttcatcgaggacagagccgagatgaccgtgttcgtgagaagcttcgacggcttcagcagcgcccagaagaaccaggagcagctgctgaccctggccagcatcctgagagaggacggcaaggtgttcgacgagaaggtgtactacaccgccggctacaacagccccgtgaagctgctgaacagaaacaacgaggtgtggctgatccagaagaacgagcccaccaaggagaacgagtag

SEQ ID NO: 9198 - DNA, 624 bp, Homo sapiens
  source 1..624: mol_type = genomic DNA
atgagctgcaccatcgagaagatcctgaccgacgccaagaccctgctggagagactgagagagcacgacgccgccgccgagagcctggtggaccagagcgccgccctgcacagaagagtggccgccatgagagaggccggcaccgccctgcccgaccagtaccaggaggacgccagcgacatgaaggacatgagcaagtacaagccccacatcctgctgagccaggagaacacccagatcagagacctgcagcaggagaacagagagctgtggatcagcctggaggagcaccaggacgccctggagctgatcatgagcaagtacagaaagcagatgctgcagctgatggtggccaagaaggccgtggacgccgagcccgtgctgaaggcccaccagagccacagcgccgagatcgagagccagatcgacagaatctgcgagatgggcgaggtgatgagaaaggccgtgcaggtggacgacgaccagttctgcaagatccaggagaagctggcccagctggagctggagaacaaggagctgagagagctgctgagcatcagcagcgagagcctgcaggccagaaaggagaacagcatggacaccgccagccaggccatcaagtag

SEQ ID NO: 9199 - DNA, 1032 bp, Homo sapiens
  source 1..1032: mol_type = genomic DNA
atgaacatccacagaagcacccccatcaccatcgccagatacggcagaagcagaaacaagacccaggacttcgaggagctgagcagcatcagaagcgccgagcccagccagagcttcagccccaacctgggcagccccagcccccccgagacccccaacctgagccactgcgtgagctgcatcggcaagtacctgctgctggagcccctggagggcgaccacgtgttcagagccgtgcacctgcacagcggcgaggagctggtgtgcaaggtgttcgacatcagctgctaccaggagagcctggccccctgcttctgcctgagcgcccacagcaacatcaaccagatcaccgagatcatcctgggcgagaccaaggcctacgtgttcttcgagagaagctacggcgacatgcacagcttcgtgagaacctgcaagaagctgagagaggaggaggccgccagactgttctaccagatcgccagcgccgtggcccactgccacgacggcggcctggtgctgagagacctgaagctgagaaagttcatcttcaaggacgaggagagaaccagagtgaagctggagagcctggaggacgcctacatcctgagaggcgacgacgacagcctgagcgacaagcacggctgccccgcctacgtgagccccgagatcctgaacaccagcggcagctacagcggcaaggccgccgacgtgtggagcctgggcgtgatgctgtacaccatgctggtgggcagataccccttccacgacatcgagcccagcagcctgttcagcaagatcagaagaggccagttcaacatccccgagaccctgagccccaaggccaagtgcctgatcagaagcatcctgagaagagagcccagcgagagactgaccagccaggagatcctggaccacccctggttcagcaccgacttcagcgtgagcaacagcgcctacggcgccaaggaggtgagcgaccagctggtgcccgacgtgaacatggaggagaacctggaccccttcttcaactag

SEQ ID NO: 9200 - DNA, 3048 bp, Homo sapiens
  source 1..3048: mol_type = genomic DNA
atgagaagattcctgagacccggccacgaccccgtgagagagagactgaagagagacctgttccagttcaacaagaccgtggagcacggcttcccccaccagcccagcgccctgggctacagccccagcctgagaatcctggccatcggcaccagaagcggcgccatcaagctgtacggcgcccccggcgtggagttcatgggcctgcaccaggagaacaacgccgtgacccagatccacctgctgcccggccagtgccagctggtgaccctgctggacgacaacagcctgcacctgtggagcctgaaggtgaagggcggcgccagcgagctgcaggaggacgagagcttcaccctgagaggcccccccggcgccgcccccagcgccacccagatcaccgtggtgctgccccacagcagctgcgagctgctgtacctgggcaccgagagcggcaacgtgttcgtggtgcagctgcccgccttcagagccctggaggacagaaccatcagcagcgacgccgtgctgcagagactgcccgaggaggccagacacagaagagtgttcgagatggtggaggccctgcaggagcaccccagagaccccaaccagatcctgatcggctacagcagaggcctggtggtgatctgggacctgcagggcagcagagtgctgtaccacttcctgagcagccagcagctggagaacatctggtggcagagagacggcagactgctggtgagctgccacagcgacggcagctactgccagtggcccgtgagcagcgaggcccagcagcccgagcccctgagaagcctggtgccctacggccccttcccctgcaaggccatcaccagaatcctgtggctgaccaccagacagggcctgcccttcaccatcttccagggcggcatgcccagagccagctacggcgacagacactgcatcagcgtgatccacgacggccagcagaccgccttcgacttcaccagcagagtgatcggcttcaccgtgctgaccgaggccgaccccgccgccaccttcgacgacccctacgccctggtggtgctggccgaggaggagctggtggtgatcgacctgcagaccgccggctggccccccgtgcagctgccctacctggccagcctgcactgcagcgccatcacctgcagccaccacgtgagcaacatccccctgaagctgtgggagagaatcatcgccgccggcagcagacagaacgcccacttcagcaccatggagtggcccatcgacggcggcaccagcctgacccccgcccccccccagagagacctgctgctgaccggccacgaggacggcaccgtgagattctgggacgccagcggcgtgtgcctgagactgctgtacaagctgagcaccgtgagagtgttcctgaccgacaccgaccccaacgagaacttcagcgcccagggcgaggacgagtggccccccctgagaaaggtgggcagcttcgacccctacagcgacgaccccagactgggcatccagaagatcttcctgtgcaagtacagcggctacctggccgtggccggcaccgccggccaggtgctggtgctggagctgaacgacgaggccgccgagcaggccgtggagcaggtggaggccgacctgctgcaggaccaggagggctacagatggaagggccacgagagactggccgccagaagcggccccgtgagattcgagcccggcttccagcccttcgtgctggtgcagtgccagccccccgccgtggtgaccagcctggccctgcacagcgagtggagactggtggccttcggcaccagccacggcttcggcctgttcgaccaccagcagagaagacaggtgttcgtgaagtgcaccctgcaccccagcgaccagctggccctggagggccccctgagcagagtgaagagcctgaagaagagcctgagacagagcttcagaagaatgagaagaagcagagtgagcagcagaaagagacaccccgccggcccccccggcgaggcccaggagggcagcgccaaggccgagagacccggcctgcagaacatggagctggcccccgtgcagagaaagatcgaggccagaagcgccgaggacagcttcaccggcttcgtgagaaccctgtacttcgccgacacctacctgaaggacagcagcagacactgccccagcctgtgggccggcaccaacggcggcaccatctacgccttcagcctgagagtgccccccgccgagagaagaatggacgagcccgtgagagccgagcaggccaaggagatccagctgatgcacagagcccccgtggtgggcatcctggtgctggacggccacagcgtgcccctgcccgagcccctggaggtggcccacgacctgagcaagagccccgacatgcagggcagccaccagctgctggtggtgagcgaggagcagttcaaggtgttcaccctgcccaaggtgagcgccaagctgaagctgaagctgaccgccctggagggcagcagagtgagaagagtgagcgtggcccacttcggcagcagaagagccgaggactacggcgagcaccacctggccgtgctgaccaacctgggcgacatccaggtggtgagcctgcccctgctgaagccccaggtgagatacagctgcatcagaagagaggacgtgagcggcatcgccagctgcgtgttcaccaagtacggccagggcttctacctgatcagccccagcgagttcgagagattcagcctgagcaccaagtggctggtggagcccagatgcctggtggacagcgccgagaccaagaaccacagacccggcaacggcgccggccccaagaaggcccccagcagagccagaaacagcggcacccagagcgacggcgaggagaagcagcccggcctggtgatggagagagccctgctgagcgacgagagagccgccaccggcgtgcacatcgagcccccctggggcgccgccagcgccatggccgagcagagcgagtggctgagcgtgcaggccgccagatag

SEQ ID NO: 9201 - DNA, 897 bp, Homo sapiens
  source 1..897: mol_type = genomic DNA
atggccgccgccgagcccgccgtgctggccctgcccaacagcggcgccggcggcgccggcgcccccagcggcaccgtgcccgtgctgttctgcttcagcgtgttcgccagacccagcagcgtgccccacggcgccggctacgagctgctgatccagaagttcctgagcctgtacggcgaccagatcgacatgcacagaaagttcgtggtgcagctgttcgccgaggagtggggccagtacgtggacctgcccaagggcttcgccgtgagcgagagatgcaaggtgagactggtgcccctgcagatccagctgaccaccctgggcaacctgacccccagcagcaccgtgttcttctgctgcgacatgcaggagagattcagacccgccatcaagtacttcggcgacatcatcagcgtgggccagagactgctgcagggcgccagaatcctgggcatccccgtgatcgtgaccgagcagtaccccaagggcctgggcagcaccgtgcaggagatcgacctgaccggcgtgaagctggtgctgcccaagaccaagttcagcatggtgctgcccgaggtggaggccgccctggccgagatccccggcgtgagaagcgtggtgctgttcggcgtggagacccacgtgtgcatccagcagaccgccctggagctggtgggcagaggcgtggaggtgcacatcgtggccgacgccaccagcagcagaagcatgatggacagaatgttcgccctggagagactggccagaaccggcatcatcgtgaccaccagcgaggccgtgctgctgcagctggtggccgacaaggaccaccccaagttcaaggagatccagaacctgatcaaggccagcgcccccgagagcggcctgctgagcaaggtgtag

SEQ ID NO: 9202 - DNA, 2439 bp, Homo sapiens
  source 1..2439: mol_type = genomic DNA
atgagcgagcagggcgacctgaaccaggccatcgccgaggagggcggcaccgagcaggagaccgccacccccgagaacggcatcgtgaagagcgagagcctggacgaggaggagaagctggagctgcagagaagactggaggcccagaaccaggagagaagaaagagcaagagcggcgccggcaagggcaagctgaccagaagcctggccgtgtgcgaggagagcagcgccagacccggcggcgagagcctgcaggaccaggagagcatccacctgcagctgagcagcttcagcagcctgcaggaggaggacaagagcagaaaggacgacagcgagagagagaaggagaaggacaagaacaaggacaagaccagcgagaagcccaagatcagaatgctgagcaaggactgcagccaggagtacaccgacagcaccggcatcgacctgcacgagttcctgatcaacaccctgaagaacaacagcagagacagaatgatcctgctgaagatggagcaggagatcatcgacttcatcgccgacaacaacaaccactacaagaagttcccccagatgagcagctaccagagaatgctggtgcacagagtggccgcctacttcggcctggaccacaacgtggaccagaccggcaagagcgtgatcatcaacaagaccagcagcaccagaatccccgagcagagattctgcgagcacctgaaggacgagaagggcgaggagagccagaagagattcatcctgaagagagacaacagcagcatcgacaaggaggacaaccagcagaacagaatgcaccccttcagagacgacagaagaagcaagagcatcgaggagagagaggaggagtaccagagagtgagagagagaatcttcgcccacgacagcgtgtgcagccaggagagcctgttcgtggagaacagcagactgctggaggacagcaacatctgcaacgagacctacaagaagagacagctgttcagaggcaacagagacggcagcggcagaaccagcggcagcagacagagcagcagcgagaacgagctgaagtggagcgaccaccagagagcctggagcagcaccgacagcgacagcagcaacagaaacctgaagcccgccatgaccaagaccgccagcttcggcggcatcaccgtgctgaccagaggcgacagcaccagcagcaccagaagcaccggcaagctgagcaaggccggcagcgagagcagcagcagcgccggcagcagcggcagcctgagcagaacccacccccccctgcagagcacccccctggtgagcggcgtggccgccggcagccccggctgcgtgccctaccccgagaacggcatcggcggccaggtggcccccagcagcaccagctacatcctgctgcccctggaggccgccaccggcatcccccccggcagcatcctgctgaacccccacaccggccagcccttcgtgaaccccgacggcacccccgccatctacaacccccccaccagccagcagcccctgagaagcgccatggtgggccagagccagcagcagcccccccagcagcagcccagcccccagccccagcagcaggtgcagcccccccagccccagatggccggccccctggtgacccagagagacgacgtggccacccagttcggccagatgaccctgagcagacagagcagcggcgagacccccgagccccccagcggccccgtgtaccccagcagcctgatgccccagcccgcccagcagcccagctacgtgatcgccagcaccggccagcagctgcccaccggcggcttcagcggcagcggcccccccatcagccagcaggtgctgcagcccccccccagcccccagggcttcgtgcagcagcccccccccgcccagatgcccgtgtactactaccccagcggccagtaccccaccagcaccacccagcagtacagacccatggcccccgtgcagtacaacgcccagagaagccagcagatgccccaggccgcccagcaggccggctaccagcccgtgctgagcggccagcagggcttccagggcctgatcggcgtgcagcagcccccccagagccagaacgtgatcaacaaccagcagggcacccccgtgcagagcgtgatggtgagctaccccaccatgagcagctaccaggtgcccatgacccagggcagccagggcctgccccagcagagctaccagcagcccatcatgctgcccaaccaggccggccagggcagcctgcccgccaccggcatgcccgtgtactgcaacgtgaccccccccaccccccagaacaacctgagactgatcggcccccactgccccagcagcaccgtgcccgtgatgagcgccagctgcagaaccaactgcgccagcatgagcaacgccggctggcaggtgaagttctag

SEQ ID NO: 9203 - DNA, 1191 bp, Homo sapiens
  source 1..1191: mol_type = genomic DNA
atgaccaccctggtgctggacaacggcgcctacaacgccaagatcggctacagccacgagaacgtgagcgtgatccccaactgccagttcagaagcaagaccgccagactgaagaccttcaccgccaaccagatcgacgagatcaaggaccccagcggcctgttctacatcctgcccttccagaagggctacctggtgaactgggacgtgcagagacaggtgtgggactacctgttcggcaaggagatgtaccaggtggacttcctggacaccaacatcatcatcaccgagccctacttcaacttcaccagcatccaggagagcatgaacgagatcctgttcgaggagtaccagttccaggccgtgctgagagtgaacgccggcgccctgagcgcccacagatacttcagagacaaccccagcgagctgtgctgcatcatcgtggacagcggctacagcttcacccacatcgtgccctactgcagaagcaagaagaagaaggaggccatcatcagaatcaacgtgggcggcaagctgctgaccaaccacctgaaggagatcatcagctacagacagctgcacgtgatggacgagacccacgtgatcaaccaggtgaaggaggacgtgtgctacgtgagccaggacttctacagagacatggacatcgccaagctgaagggcgaggagaacaccgtgatgatcgactacgtgctgcccgacttcagcaccatcaagaagggcttctgcaagcccagagaggagatggtgctgagcggcaagtacaagagcggcgagcagatcctgagactggccaacgagagattcgccgtgcccgagatcctgttcaaccccagcgacatcggcatccaggagatgggcatccccgaggccatcgtgtacagcatccagaacctgcccgaggagatgcagccccacttcttcaagaacatcgtgctgaccggcggcaacagcctgttccccggcttcagagacagagtgtacagcgaggtgagatgcctgacccccaccgactacgacgtgagcgtggtgctgcccgagaaccccatcacctacgcctgggagggcggcaagctgatcagcgagaacgacgacttcgaggacatggtggtgaccagagaggactacgaggagaacggccacagcgtgtgcgaggagaagttcgacatctag

SEQ ID NO: 9204 - DNA, 1005 bp, Homo sapiens
  source 1..1005: mol_type = genomic DNA
atggagcccggccccaccgccgcccagagaagatgcagcctgcccccctggctgcccctgggcctgctgctgtggagcggcctggccctgggcgccctgcccttcggcagcagcccccacagagtgttccacgacctgctgagcgagcagcagctgctggaggtggaggacctgagcctgagcctgctgcagggcggcggcctgggccccctgagcctgccccccgacctgcccgacctggaccccgagtgcagagagctgctgctggacttcgccaacagcagcgccgagctgaccggctgcctggtgagaagcgccagacccgtgagactgtgccagacctgctaccccctgttccagcaggtggtgagcaagatggacaacatcagcagagccgccggcaacaccagcgagagccagagctgcgccagaagcctgctgatggccgacagaatgcagatcgtggtgatcctgagcgagttcttcaacaccacctggcaggaggccaactgcgccaactgcctgaccaacaacagcgaggagctgagcaacagcaccgtgtacttcctgaacctgttcaaccacaccctgacctgcttcgagcacaacctgcagggcaacgcccacagcctgctgcagaccaagaactacagcgaggtgtgcaagaactgcagagaggcctacaagaccctgagcagcctgtacagcgagatgcagaagatgaacgagctggagaacaaggccgagcccggcacccacctgtgcatcgacgtggaggacgccatgaacatcaccagaaagctgtggagcagaaccttcaactgcagcgtgccctgcagcgacaccgtgcccgtgatcgccgtgagcgtgttcatcctgttcctgcccgtggtgttctacctgagcagcttcctgcacagcgagcagaagaagagaaagctgatcctgcccaagagactgaagagcagcaccagcttcgccaacatccaggagaacagcaactag

SEQ ID NO: 9205 - DNA, 2172 bp, Homo sapiens
  source 1..2172: mol_type = genomic DNA
atgagcaccgccaccggccccgaggccgcccccaagcccagcgccaagagcatctacgagcagagaaagagatacagcaccgtggtgatggccgacgtgagccagtaccccgtgaaccacctggtgaccttctgcctgggcgaggacgacggcgtgcacaccgtggaggacgccagcagaaagctggccgtgatggacagccagggcagagtgtgggcccaggagatgctgctgagagtgagccccgaccacgtgaccctgctggaccccgccagcaaggaggagctggagagctaccccctgggcgccatcgtgagatgcgacgccgtgatgccccccggcagaagcagaagcctgctgctgctggtgtgccaggagcccgagagagcccagcccgacgtgcacttcttccagggcctgagactgggcgccgagctgatcagagaggacatccagggcgccctgcacaactacagaagcggcagaggcgagagaagagccgccgccctgagagccacccaggaggagctgcagagagacagaagccccgccgccgagaccccccccctgcagagaagacccagcgtgagagccgtgatcagcaccgtggagagaggcgccggcagaggcagaccccaggccaagcccatccccgaggccgaggaggcccagagacccgagcccgtgggcaccagcagcaacgccgacagcgccagccccgacctgggccccagaggccccgacctggccgtgctgcaggccgagagagaggtggacatcctgaaccacgtgttcgacgacgtggagagcttcgtgagcagactgcagaagagcgccgaggccgccagagtgctggagcacagagagagaggcagaagaagcagaagaagagccgccggcgagggcctgctgaccctgagagccaagccccccagcgaggccgagtacaccgacgtgctgcagaagatcaagtacgccttcagcctgctggccagactgagaggcaacatcgccgaccccagcagccccgagctgctgcacttcctgttcggccccctgcagatgatcgtgaacaccagcggcggccccgagttcgccagcagcgtgagaagaccccacctgaccagcgacgccgtggccctgctgagagacaacgtgacccccagagagaacgagctgtggaccagcctgggcgacagctggaccagacccggcctggagctgagccccgaggagggccccccctacagacccgagttcttcagcggctgggagccccccgtgaccgacccccagagcagagcctgggaggaccccgtggagaagcagctgcagcacgagagaagaagaagacagcagagcgccccccaggtggccgtgaacggccacagagacctggagcccgagagcgagccccagctggagagcgagaccgccggcaagtgggtgctgtgcaactacgacttccaggccagaaacagcagcgagctgagcgtgaagcagagagacgtgctggaggtgctggacgacagcagaaagtggtggaaggtgagagaccccgccggccaggagggctacgtgccctacaacatcctgaccccctaccccggccccagactgcaccacagccagagccccgccagaagcctgaacagcacccccccccccccccccgcccccgcccccgcccccccccccgccctggccagacccagatgggacagacccagatgggacagctgcgacagcctgaacggcctggaccccagcgagaaggagaagttcagccagatgctgatcgtgaacgaggagctgcaggccagactggcccagggcagaagcggccccagcagagccgtgcccggccccagagcccccgagccccagctgagccccggcagcgacgccagcgaggtgagagcctggctgcaggccaagggcttcagcagcggcaccgtggacgccctgggcgtgctgaccggcgcccagctgttcagcctgcagaaggaggagctgagagccgtgagccccgaggagggcgccagagtgtacagccaggtgaccgtgcagagaagcctgctggaggacaaggagaaggtgagcgagctggaggccgtgatggagaagcagaagaagaaggtggagggcgaggtggagatggaggtgatctag

SEQ ID NO: 9206 - DNA, 5622 bp, Homo sapiens
  source 1..5622: mol_type = genomic DNA
atgttcagcagaagaagccacggcgacgtgaagaagagcacccagaaggtgctggaccccaagaaggacgtgctgaccagactgaagcacctgagagccctgctggacaacgtggacgccaacgacctgaagcagttcttcgagaccaactacagccagatctacttcatcttctacgagaacttcatcgccctggagaacagcctgaagctgaagggcaacaacaagagccagagagaggagctggacagcatcctgttcctgttcgagaagatcctgcagttcctgcccgagagaatcttcttcagatggcactaccagagcatcggcagcaccctgaagaagctgctgcacaccggcaacagcatcaagatcagatgcgagggcatcagactgttcctgctgtggctgcaggccctgcagaccaactgcgccgaggagcaggtgctgatcttcgcctgcctggtgcccggcttccccgccgtgatgagcagcagaggcccctgcaccctggagaccctgatcaaccccagccccagcgtggccgacgtgaagatctaccccgaggagatcacccccctgctgcccgccatcagcggcgagaagatcgccgaggaccagacctgcttcttcctgcagatcctgctgaagtacatggtgatccaggccgccagcctggagtggaagaacaaggagaaccaggacaccggcttcaagttcctgttcaccctgttcagaaagtactacctgccccacctgttccccagcttcaccaagctgaccaacatctacaagcccgtgctggacatcccccacctgagacccaagcccgtgtacatcaccaccaccagagacaacgagaacatctacagcaccaagatcccctacatggccgccagagtggtgttcatcaagtggatcgtgaccttcttcctggagaagaagtacctgaccgccacccagaacaccaagaacggcgtggacgtgctgcccaagatcatccagaccgtgggcggcggcgccgtgcaggagagagcccccgagctggacggcggcggccccaccgagcaggacaagagccacagcaacagcagcaccctgagcgacagaagactgagcaacagcagcctgtgcagcatcgaggaggagcacagaatggtgtacgagatggtgcagagaatcctgctgagcaccagaggctacgtgaacttcgtgaacgaggtgttccaccaggccttcctgctgcccagctgcgagatcgccgtgaccagaaaggtggtgcaggtgtacagaaagtggatcctgcaggacaagcccgtgttcatggaggagcccgacagaaaggacgtggcccaggaggacgccgagaagctgggcttcagcgagaccgacagcaaggaggccagcagcgagagcagcggccacaagagaagcagcagctggggcagaacctacagcttcaccagcgccatgagcagaggctgcgtgaccgaggaggagaacaccaacgtgaaggccggcgtgcaggccctgctgcaggtgttcctgaccaacagcgccaacatcttcctgctggagccctgcgccgaggtgcccgtgctgctgaaggagcaggtggacgcctgcaaggccgtgctgatcatcttcagaagaatgatcatggagctgaccatgaacaagaagacctgggagcagatgctgcagatcctgctgagaatcaccgaggccgtgatgcagaagcccaaggacaagcagatcaaggacctgttcgcccagagcctggccggcctgctgttcagaaccctgatggtggcctggatcagagccaacctgtgcgtgtacatcagcagagagctgtgggacgacttcctgggcgtgctgagcagcctgaccgagtgggaggagctgatcaacgagtgggccaacatcatggacagcctgaccgccgtgctggccagaaccgtgtacggcgtggagatgaccaacctgcccctggacaagctgagcgagcagaaggagaagaagcagagaggcaagggctgcgtgctggacccccagaagggcaccaccgtgggcagaagcttcagcctgagctggagaagccaccccgacgtgaccgagcccatgagattcagaagcgccaccaccagcggcgcccccggcgtggagaaggccagaaacatcgtgagacagaaggccaccgaggtggaggagtgccagcagagcgagaacgcccccgccgccggcagcggccacctgaccgtgggccagcagcagcaggtgctgagaagcagcagcaccagcgacatccccgagcccctgtgcagcgacagcagccagggccagaaggccgagaacacccagaacagcagcagcagcgagccccagcccatccaggagaacaagggccacgtgaagagagagcacgagggcatcaccatcctggtgagaagaagcagcagccccgccgagctggacctgaaggacgacctgcagcagacccagggcaagtgcagagagagacagaagagcgagagcaccaacagcgacaccaccctgggctgcaccaacgaggccgagctgagcatgggcccctggcagacctgcgaggaggaccccgagctgaacacccccaccgacgtggtggccgacgccgacgccagacactggctgcagctgagccccaccgacgccagcaacctgaccgacagcagcgagtgcctgaccgacgactgcagcatcatcgccggcggcagcctgaccggctggcaccccgacagcgccgccgtgctgtggagaagagtgctgggcatcctgggcgacgtgaacaacatccagagccccaagatccacgccagagtgttctgctacctgtacgagctgtggtacaagctggccaagatcagagacaacctggccatcagcctggacaaccagagcagccccagcccccccgtgctgatcccccccctgagaatgttcgccagctggctgttcaaggccgccaccctgcccaacgagtacaaggagggcaagctgcaggcctacagactgatctgcgccatgatgaccagaagacaggacgtgctgcccaacagcgacttcctggtgcacttctacctggtgatgcacctgggcctgaccagcgaggaccaggacatcctgaacaccatcatcagacactgcccccccagattcttcagcctgggcttccccggcttcagcatgctggtgggcgacttcatcaccgccgccgccagagtgctgagcaccgacatcctgaccgcccccagaagcgaggccgtgaccgtgctgggcagcctggtgtgcttccccaacacctaccaggagatccccctgctgcagagcgtgcccgaggtgaacgaggccatcaccggcaccgaggacgtgaagcactacctgatcaacatcctgctgaagaacgccaccgaggagcccaacgagtacgccagatgcatcgccgtgtgcagcctgggcgtgtggatctgcgaggagctggcccagtgcaccagccacccccaggtgaaggaggccatcaacgtgatcggcgtgaccctgaagttccccaacaagatcgtggcccaggtggcctgcgacgtgctgcagctgctggtgagctactgggagaagctgcagatgttcgagaccagcctgcccagaaagatggccgagatcctggtggccaccgtggccttcctgctgcccagcgccgagtacagcagcgtggagaccgacaagaagttcatcgtgagcctgctgctgtgcctgctggactggtgcatggccctgcccgtgagcgtgctgctgcaccccgtgagcaccgccgtgctggaggagcagcacagcgccagagcccccctgctggactacatctacagagtgctgcactgctgcgtgtgcggcagcagcacctacacccagcagagccactacatcctgaccctggccgacctgagcagcaccgactacgaccccttcctgcccctggccaacgtgaagagcagcgagcccgtgcagtaccacagcagcgccgagctgggcaacctgctgaccgtggaggaggagaagaagagaagaagcctggagctgatccccctgaccgccagaatggtgatggcccacctggtgaaccacctgggccactaccccctgagcggcggccccgccatcctgcacagcctggtgagcgagaaccacgacaacgcccacgtggagggcagcgagctgagcttcgaggtgttcagaagccccaacctgcagctgttcgtgttcaacgacagcaccctgatcagctacctgcagacccccaccgagggccccgtgggcggcagccccgtgggcagcctgagcgacgtgagagtgatcgtgagagacatcagcggcaagtacagctgggacggcaaggtgctgtacggccccctggagggctgcctggcccccaacggcagaaaccccagcttcctgatcagcagctggcacagagacaccttcggcccccagaaggacagcagccaggtggaggagggcgacgacgtgctggacaagctgctggagaacatcggccacaccagccccgagtgcctgctgcccagccagctgaacctgaacgagcccagcctgaccccctgcggcatgaactacgaccaggagaaggagatcatcgaggtgatcctgagacagaacgcccaggaggacgagtacatccagagccacaacttcgacagcgccatgaaggtgaccagccagggccagcccagccccgtggagcccagaggccccttctacttctgcagactgctgctggacgacctgggcatgaacagctgggacagaagaaagaacttccacctgctgaagaagaacagcaagctgctgagagagctgaagaacctggacagcagacagtgcagagagacccacaagatcgccgtgttctacatcgccgagggccaggaggacaagtgcagcatcctgagcaacgagagaggcagccaggcctacgaggacttcgtggccggcctgggctgggaggtggacctgagcacccactgcggcttcatgggcggcctgcagagaaacggcagcaccggccagaccgccccctactacgccaccagcaccgtggaggtgatcttccacgtgagcaccagaatgcccagcgacagcgacgacagcctgaccaagaagctgagacacctgggcaacgacgaggtgcacatcgtgtggagcgagcacagcagagactacagaagaggcatcatccccaccgccttcggcgacgtgagcatcatcatctaccccatgaagaaccacatgttcttcatcgccatcaccaagaagcccgaggtgcccttcttcggccccctgttcgacggcgccatcgtgagcggcaagctgctgcccagcctggtgtgcgccacctgcatcaacgccagcagagccgtgaagtgcctgatccccctgtaccagagcttctacgaggagagagccctgtacctggaggccatcatccagaaccacagagaggtgatgaccttcgaggacttcgccgcccaggtgttcagccccagccccagctacagcctgagcggcaccgactag

SEQ ID NO: 9207 - DNA, 1041 bp, Homo sapiens
  source 1..1041: mol_type = genomic DNA
atggccagacccggccagagatggctgggcaagtggctggtggccatggtggtgtgggccctgtgcagactggccacccccctggccaagaacctggagcccgtgagctggagcagcctgaaccccaagttcctgagcggcaagggcctggtgatctaccccaagatcggcgacaagctggacatcatctgccccagagccgaggccggcagaccctacgagtactacaagctgtacctggtgagacccgagcaggccgccgcctgcagcaccgtgctggaccccaacgtgctggtgacctgcaacagacccgagcaggagatcagattcaccatcaagttccaggagttcagccccaactacatgggcctggagttcaagaagcaccacgactactacatcaccagcaccagcaacggcagcctggagggcctggagaacagagagggcggcgtgtgcagaaccagaaccatgaagatcatcatgaaggtgggccaggaccccaacgccgtgacccccgagcagctgaccaccagcagacccagcaaggaggccgacaacaccgtgaagatggccacccaggcccccggcagcagaggcagcctgggcgacagcgacggcaagcacgagaccgtgaaccaggaggagaagagcggccccggcgccagcggcggcagcagcggcgaccccgacggcttcttcaacagcaaggtggccctgttcgccgccgtgggcgccggctgcgtgatcttcctgctgatcatcatcttcctgaccgtgctgctgctgaagctgagaaagagacacagaaagcacacccagcagagagccgccgccctgagcctgagcaccctggccagccccaagggcggcagcggcaccgccggcaccgagcccagcgacatcatcatccccctgagaaccaccgagaacaactactgcccccactacgagaaggtgagcggcgactacggccaccccgtgtacatcgtgcaggagatgcccccccagagccccgccaacatctactacaaggtgtag

SEQ ID NO: 9208 - DNA, 1617 bp, Homo sapiens
  source 1..1617: mol_type = genomic DNA
atggccagcgaccccatcttcaccctggccccccccctgcactgccactacggcgccttcccccccaacgccagcggctgggagcagccccccaacgccagcggcgtgagcgtggccagcgccgccctggccgccagcgccgccagcagagtggccaccagcaccgaccccagctgcagcggcttcgccccccccgacttcaaccactgcctgaaggactgggactacaacggcctgcccgtgctgaccaccaacgccatcggccagtgggacctggtgtgcgacctgggctggcaggtgatcctggagcagatcctgttcatcctgggcttcgccagcggctacctgttcctgggctaccccgccgacagattcggcagaagaggcatcgtgctgctgaccctgggcctggtgggcccctgcggcgtgggcggcgccgccgccggcagcagcaccggcgtgatggccctgagattcctgctgggcttcctgctggccggcgtggacctgggcgtgtacctgatgagactggagctgtgcgaccccacccagagactgagagtggccctggccggcgagctggtgggcgtgggcggccacttcctgttcctgggcctggccctggtgagcaaggactggagattcctgcagagaatgatcaccgccccctgcatcctgttcctgttctacggctggcccggcctgttcctggagagcgccagatggctgatcgtgaagagacagatcgaggaggcccagagcgtgctgagaatcctggccgagagaaacagaccccacggccagatgctgggcgaggaggcccaggaggccctgcaggacctggagaacacctgccccctgcccgccaccagcagcttcagcttcgccagcctgctgaactacagaaacatctggaagaacctgctgatcctgggcttcaccaacttcatcgcccacgccatcagacactgctaccagcccgtgggcggcggcggcagccccagcgacttctacctgtgcagcctgctggccagcggcaccgccgccctggcctgcgtgttcctgggcgtgaccgtggacagattcggcagaagaggcatcctgctgctgagcatgaccctgaccggcatcgccagcctggtgctgctgggcctgtgggactgcgagcaccccatcttccccaccgtgtgggcccagcagggcaaccccaacagagacctgaacgaggccgccatcaccaccttcagcgtgctgggcctgttcagcagccaggccgccgccatcctgagcaccctgctggccgccgaggtgatccccaccaccgtgagaggcagaggcctgggcctgatcatggccctgggcgccctgggcggcctgagcggccccgcccagagactgcacatgggccacggcgccttcctgcagcacgtggtgctggccgcctgcgccctgctgtgcatcctgagcatcatgctgctgcccgagaccaagagaaagctgctgcccgaggtgctgagagacggcgagctgtgcagaagacccagcctgctgagacagcccccccccaccagatgcgaccacgtgcccctgctggccacccccaaccccgccctgtag

SEQ ID NO: 9209 - DNA, 1128 bp, Homo sapiens
  source 1..1128: mol_type = genomic DNA
atgagcaccgccggcaaggtgatcaagtgcaaggccgccgtgctgtgggagctgaagaagcccttcagcatcgaggaggtggaggtggccccccccaaggcccacgaggtgagaatcaagatggtggccgtgggcatctgcggcaccgacgaccacgtggtgagcggcaccatggtgacccccctgcccgtgatcctgggccacgaggccgccggcatcgtggagagcgtgggcgagggcgtgaccaccgtgaagcccggcgacaaggtgatccccctggccatcccccagtgcggcaagtgcagaatctgcaagaaccccgagagcaactactgcctgaagaacgacgtgagcaacccccagggcaccctgcaggacggcaccagcagattcacctgcagaagaaagcccatccaccacttcctgggcatcagcaccttcagccagtacaccgtggtggacgagaacgccgtggccaagatcgacgccgccagccccctggagaaggtgtgcctgatcggctgcggcttcagcaccggctacggcagcgccgtgaacgtggccaaggtgacccccggcagcacctgcgccgtgttcggcctgggcggcgtgggcctgagcgccatcatgggctgcaaggccgccggcgccgccagaatcatcgccgtggacatcaacaaggacaagttcgccaaggccaaggagctgggcgccaccgagtgcatcaacccccaggactacaagaagcccatccaggaggtgctgaaggagatgaccgacggcggcgtggacttcagcttcgaggtgatcggcagactggacaccatgatggccagcctgctgtgctgccacgaggcctgcggcaccagcgtgatcgtgggcgtgccccccgacagccagaacctgagcatgaaccccatgctgctgctgaccggcagaacctggaagggcgccatcctgggcggcttcaagagcaaggagtgcgtgcccaagctggtggccgacttcatggccaagaagttcagcctggacgccctgatcacccacgtgctgcccttcgagaagatcaacgagggcttcgacctgctgcacagcggcaagagcatcagaaccatcctgatgttctag

SEQ ID NO: 9210 - DNA, 1641 bp, Homo sapiens
  source 1..1641: mol_type = genomic DNA
atgtgcagcctgggcctgttccccccccccccccccagaggccaggtgaccctgtacgagcacaacaacgagctggtgaccggcagcagctacgagagccccccccccgacttcagaggccagtggatcaacctgcccgtgctgcagctgaccaaggaccccctgaagacccccggcagactggaccacggcaccagaaccgccttcatccaccacagagagcaggtgtggaagagatgcatcaacatctggagagacgtgggcctgttcggcgtgctgaacgagatcgccaacagcgaggaggaggtgttcgagtgggtgaagaccgccagcggctgggccctggccctgtgcagatgggccagcagcctgcacggcagcctgttcccccacctgagcctgagaagcgaggacctgatcgccgagttcgcccaggtgaccaactggagcagctgctgcctgagagtgttcgcctggcacccccacaccaacaagttcgccgtggccctgctggacgacagcgtgagagtgtacaacgccagcagcaccatcgtgcccagcctgaagcacagactgcagagaaacgtggccagcctggcctggaagcccctgagcgccagcgtgctggccgtggcctgccagagctgcatcctgatctggaccctggaccccaccagcctgagcaccagacccagcagcggctgcgcccaggtgctgagccaccccggccacacccccgtgaccagcctggcctgggcccccagcggcggcagactgctgagcgccagccccgtggacgccgccatcagagtgtgggacgtgagcaccgagacctgcgtgcccctgccctggttcagaggcggcggcgtgaccaacctgctgtggagccccgacggcagcaagatcctggccaccacccccagcgccgtgttcagagtgtgggaggcccagatgtggacctgcgagagatggcccaccctgagcggcagatgccagaccggctgctggagccccgacggcagcagactgctgttcaccgtgctgggcgagcccctgatctacagcctgagcttccccgagagatgcggcgagggcaagggctgcgtgggcggcgccaagagcgccaccatcgtggccgacctgagcgagaccaccatccagacccccgacggcgaggagagactgggcggcgaggcccacagcatggtgtgggaccccagcggcgagagactggccgtgctgatgaagggcaagcccagagtgcaggacggcaagcccgtgatcctgctgttcagaaccagaaacagccccgtgttcgagctgctgccctgcggcatcatccagggcgagcccggcgcccagccccagctgatcaccttccaccccagcttcaacaagggcgccctgctgagcgtgggctggagcaccggcagaatcgcccacatccccctgtacttcgtgaacgcccagttccccagattcagccccgtgctgggcagagcccaggagccccccgccggcggcggcggcagcatccacgacctgcccctgttcaccgagaccagccccaccagcgccccctgggaccccctgcccggccccccccccgtgctgccccacagcccccacagccacctgtag

SEQ ID NO: 9211 - DNA, 576 bp, Homo sapiens
  source 1..576: mol_type = genomic DNA
atgggcaagaagaccaagagaaccgccgacagcagcagcagcgaggacgaggaggagtacgtggtggagaaggtgctggacagaagagtggtgaagggccaggtggagtacctgctgaagtggaagggcttcagcgaggagcacaacacctgggagcccgagaagaacctggactgccccgagctgatcagcgagttcatgaagaagtacaagaagatgaaggagggcgagaacaacaagcccagagagaagagcgagagcaacaagagaaagagcaacttcagcaacagcgccgacgacatcaagagcaagaagaagagagagcagagcaacgacatcgccagaggcttcgagagaggcctggagcccgagaagatcatcggcgccaccgacagctgcggcgacctgatgttcctgatgaagtggaaggacaccgacgaggccgacctggtgctggccaaggaggccaacgtgaagtgcccccagatcgtgatcgccttctacgaggagagactgacctggcacgcctaccccgaggacgccgagaacaaggagaaggagaccgccaagagctag

SEQ ID NO: 9212 - DNA, 1554 bp, Homo sapiens
  source 1..1554: mol_type = genomic DNA
atgggcagaaagagcaagaagtggggcaagaaggtgagcagatacgagggcaaggtgagactgaagaaggtgcccgccaagaagctggtgcccgcctggaaggagaaggtgctgtgggccctgctggccgtgctgctggccagctggagactgtgggccatcaaggacttccaggagtgcacctggcaggtggtgctgaacgagttcaagagagtgggcgagagcggcgtgagcgacagcttcttcgagcaggagcccgtggacaccgtgagcagcctgttccacatgctggtggacagccccatcgaccccagcgagaagtacctgggcttcccctactacctgaagatcaactacagctgcgaggagaagcccagcgaggacctggtgagaatgggccacctgaccggcctgaagcccctggtgctggtgaccttccagagccccgtgaacttctacagatggaagatcgagcagctgcagatccagatggaggccgcccccttcagaagcaagggcggccccggcggcggcggcagagacagaaacctggccggcatgaacatcaacggcttcctgaagagagacagagacaacaacatccagttcaccgtgggcgaggagctgttcaacctgatgccccagtacttcgtgggcgtgagcagcagacccctgtggcacaccgtggaccagagccccgtgctgatcctgggcggcatccccaacgagaagtacgtgctgatgaccgacaccagcttcaaggacttcagcctggtggaggtgaacggcgtgggccagatgctgagcatcgacagctgctgggtgggcagcttctactgcccccacagcggcttcaccgccaccatctacgacaccatcgccaccgagagcaccctgttcatcagacagaaccagctggtgtactacttcaccggcacctacaccaccctgtacgagagaaacagaggcagcggcgagtgcgccgtggccggccccacccccggcgagggcaccctggtgaaccccagcaccgagggcagctggatcagagtgctggccagcgagtgcatcaagaagctgtgccccgtgtacttccacagcaacggcagcgagtacatcatggccctgaccaccggcaagcacgagggctacgtgcacttcggcaccatcagagtgaccacctgcagcatcatctggagcgagtacatcgccggcgagtacaccctgctgctgctggtggagagcggctacggcaacgccagcaagagattccaggtggtgagctacaacaccgccagcgacgacctggagctgctgtaccacatccccgagttcatccccgaggccagaggcctggagttcctgatgatcctgggcaccgagagctacaccagcaccgccatggcccccaagggcatcttctgcaacccctacaacaacctgatcttcatctggggcaacttcctgctgcagagaagcggcaccagctggagagccgccaccggcagcaccagctgcagcctgcccagagccggcagatgcaccagcgcctag

SEQ ID NO: 9213 - DNA, 1203 bp, Homo sapiens
  source 1..1203: mol_type = genomic DNA
atgagcggcagagtgggcgacctgagccccaagcaggccgagaccctggccaagttcagagagaacgtgcaggacgtgctgcccgccctgcccaaccccgacgactacttcctgctgagatggctgagagccagaaacttcgacctgcagaagagcgaggccctgctgagaaagtacatggagttcagaaagaccatggacatcgaccacatcctggactggcagccccccgaggtgatccagaagtacatgcccggcggcctgtgcggctacgacagagacggctgccccgtgtggtacgacatcatcggccccctggaccccaagggcctgctgttcagcgtgaccaagcaggacctgctgaagaccaagatgagagactgcgagagaatcctgcacgagtgcgacctgcagaccgagagactgggcaagaagatcgagaccatcgtgatgatcttcgactgcgagggcctgggcctgaagcacttctggaagcccctggtggaggtgtaccaggagttcttcggcctgctggaggagaactaccccgagaccctgaagttcatgctgatcgtgaaggccaccaagctgttccccgtgggctacaacctgatgaagcccttcctgagcgaggacaccagaagaaagatcatcgtgctgggcaacaactggaaggagggcctgctgaagctgatcagccccgaggagctgcccgcccagttcggcggcaccctgaccgaccccgacggcaaccccaagtgcctgaccaagatcaactacggcggcgagatccccaagagcatgtacgtgagagaccaggtgaagacccagtacgagcacagcgtgcagatcaacagaggcagcagccaccaggtggagtacgagatcctgttccccggctgcgtgctgagatggcagttcagcagcgacggcgccgacatcggcttcggcgtgttcctgaagaccaagatgggcgagagacagagagccggcgagatgaccgacgtgctgcccagccagagatacaacgcccacatggtgcccgaggacggcaacctgacctgcagcgaggccggcgtgtacgtgctgagattcgacaacacctacagcttcgtgcacgccaagaaggtgagcttcaccgtggaggtgctgctgcccgacgagggcatgcagaagtacgacaaggagctgacccccgtgtag

SEQ ID NO: 9214 - DNA, 636 bp, Homo sapiens
  source 1..636: mol_type = genomic DNA
atggccgagcagcacggcgcccccgagcaggccgccgccggcaagagccacggcgacctgggcggcagctacaaggtgatcctgtacgagctggagaacttccagggcaagagatgcgagctgagcgccgagtgccccagcctgaccgacagcctgctggagaaggtgggcagcatccaggtggagagcggcccctggctggccttcgagagcagagccttcagaggcgagcagttcgtgctggagaagggcgactaccccagatgggacgcctggagcaacagcagagacagcgacagcctgctgagcctgagacccctgaacatcgacagcccccaccacaagctgcacctgttcgagaaccccgccttcagcggcagaaagatggagatcgtggacgacgacgtgcccagcctgtgggcccacggcttccaggacagagtggccagcgtgagagccatcaacggcacctgggtgggctacgagttccccggctacagaggcagacagtacgtgttcgagagaggcgagtacagacactggaacgagtgggacgccagccagccccagctgcagagcgtgagaagaatcagagaccagaagtggcacaagagaggcagattccccagcagctag

SEQ ID NO: 9215 - DNA, 387 bp, Homo sapiens
  source 1..387: mol_type = genomic DNA
atgaccgaggccgacgtgaaccccaaggcctaccccctggccgacgcccacctgaccaagaagctgctggacctggtgcagcagagctgcaactacaagcagctgagaaagggcgccaacgaggccaccaagaccctgaacagaggcatcagcgagttcatcgtgatggccgccgacgccgagcccctggagatcatcctgcacctgcccctgctgtgcgaggacaagaacgtgccctacgtgttcgtgagaagcaagcaggccctgggcagagcctgcggcgtgagcagacccgtgatcgcctgcagcgtgaccatcaaggagggcagccagctgaagcagcagatccagagcatccagcagagcatcgagagactgctggtgtag

SEQ ID NO: 9216 - DNA, 2592 bp, Homo sapiens
  source 1..2592: mol_type = genomic DNA
atggccggccccagaggcgccctgctggcctggtgcagaagacagtgcgagggctacagaggcgtggagatcagagacctgagcagcagcttcagagacggcctggccttctgcgccatcctgcacagacacagacccgacctgctggacttcgacagcctgagcaaggacaacgtgttcgagaacaacagactggccttcgaggtggccgagaaggagctgggcatccccgccctgctggaccccaacgacatggtgagcatgagcgtgcccgactgcctgagcatcatgacctacgtgagccagtactacaaccacttctgcagccccggccaggccggcgtgagcccccccagaaagggcctggccccctgcagcccccccagcgtggcccccacccccgtggagcccgaggacgtggcccagggcgaggagctgagcagcggcagcctgagcgagcagggcaccggccagacccccagcagcacctgcgccgcctgccagcagcacgtgcacctggtgcagagatacctggccgacggcagactgtaccacagacactgcttcagatgcagaagatgcagcagcaccctgctgcccggcgcctacgagaacggccccgaggagggcaccttcgtgtgcgccgagcactgcgccagactgggccccggcaccagaagcggcaccagacccggccccttcagccagcccaagcagcagcaccagcagcagctggccgaggacgccaaggacgtgcccggcggcggccccagcagcagcgcccccgccggcgccgaggccgacggccccaaggccagccccgaggccagaccccagatccccaccaagcccagagtgcccggcaagctgcaggagctggccagcccccccgccggcagacccacccccgcccccagaaaggccagcgagagcaccacccccgccccccccacccccagacccagaagcagcctgcagcaggagaacctggtggagcaggccggcagcagcagcctggtgaacggcagactgcacgagctgcccgtgcccaagcccagaggcacccccaagcccagcgagggcacccccgcccccagaaaggaccccccctggatcaccctggtgcaggccgagcccaagaagaagcccgcccccctgccccccagcagcagccccggcccccccagccaggacagcagacaggtggagaacggcggcaccgaggaggtggcccagcccagccccaccgccagcctggagagcaagccctacaaccccttcgaggaggaggaggaggacaaggaggaggaggcccccgccgcccccagcctggccaccagccccgccctgggccaccccgagagcacccccaagagcctgcacccctggtacggcatcacccccaccagcagccccaagaccaagaagagacccgcccccagagcccccagcgccagccccctggccctgcacgccagcagactgagccacagcgagccccccagcgccacccccagccccgccctgagcgtggagagcctgagcagcgagagcgccagccagaccgccggcgccgagctgctggagccccccgccgtgcccaagagcagcagcgagcccgccgtgcacgcccccggcacccccggcaaccccgtgagcctgagcaccaacagcagcctggccagcagcggcgagctggtggagcccagagtggagcagatgccccaggccagccccggcctggcccccagaaccagaggcagcagcggcccccagcccgccaagccctgcagcggcgccacccccacccccctgctgctggtgggcgacagaagccccgtgcccagccccggcagcagcagcccccagctgcaggtgaagagcagctgcaaggagaaccccttcaacagaaagcccagccccgccgccagccccgccaccaagaaggccaccaagggcagcaagcccgtgagaccccccgcccccggccacggcttccccctgatcaagagaaaggtgcaggccgaccagtacatccccgaggaggacatccacggcgagatggacaccatcgagagaagactggacgccctggagcacagaggcgtgctgctggaggagaagctgagaggcggcctgaacgagggcagagaggacgacatgctggtggactggttcaagctgatccacgagaagcacctgctggtgagaagagagagcgagctgatctacgtgttcaagcagcagaacctggagcagagacaggccgacgtggagtacgagctgagatgcctgctgaacaagcccgagaaggactggaccgaggaggacagagccagagagaaggtgctgatgcaggagctggtgaccctgatcgagcagagaaacgccatcatcaactgcctggacgaggacagacagagagaggaggaggaggacaagatgctggaggccatgatcaagaagaaggagttccagagagaggccgagcccgagggcaagaagaagggcaagttcaagaccatgaagatgctgaagctgctgggcaacaagagagacgccaagagcaagagccccagagacaagagctag

SEQ ID NO: 9217 - DNA, 708 bp, Homo sapiens
  source 1..708: mol_type = genomic DNA
atgtggagaggcagagccggcgccctgctgagagtgtggggcttctggcccaccggcgtgcccagaagaagacccctgagctgcgacgccgccagccaggccggcagcaactaccccagatgctggaactgcggcggcccctggggccccggcagagaggacagattcttctgcccccagtgcagagccctgcaggcccccgaccccaccagagactacttcagcctgatggactgcaacagaagcttcagagtggacaccgccaagctgcagcacagataccagcagctgcagagactggtgcaccccgacttcttcagccagagaagccagaccgagaaggacttcagcgagaagcacagcaccctggtgaacgacgcctacaagaccctgctggcccccctgagcagaggcctgtacctgctgaagctgcacggcatcgagatccccgagagaaccgactacgagatggacagacagttcctgatcgagatcatggagatcaacgagaagctggccgaggccgagagcgaggccgccatgaaggagatcgagagcatcgtgaaggccaagcagaaggagttcaccgacaacgtgagcagcgccttcgagcaggacgacttcgaggaggccaaggagatcctgaccaagatgagatacttcagcaacatcgaggagaagatcaagctgaagaagatccccctgtag

SEQ ID NO: 9218 - DNA, 2010 bp, Homo sapiens
  source 1..2010: mol_type = genomic DNA
atggccaccgagagaagcagaagcgccatggacagccccgtgcccgccagcatgttcgcccccgagcccagcagccccggcgccgccagagccgccgccgccgccgccagactgcacggcggcttcgacagcgactgcagcgaggacggcgaggccctgaacggcgagcccgagctggacctgaccagcaagctggtgctggtgagccccaccagcgagcagtacgacagcctgctgagacagatgtgggagagaatggacgagggctgcggcgagaccatctacgtgatcggccagggcagcgacggcaccgagtacggcctgagcgaggccgacatggaggccagctacgccaccgtgaagagcatggccgagcagatcgaggccgacgtgatcctgctgagagagagacaggaggccggcggcagagtgagagactacctggtgagaaagagagtgggcgacaacgacttcctggaggtgagagtggccgtggtgggcaacgtggacgccggcaagagcaccctgctgggcgtgctgacccacggcgagctggacaacggcagaggcttcgccagacagaagctgttcagacacaagcacgagatcgagagcggcagaaccagcagcgtgggcaacgacatcctgggcttcgacagcgagggcaacgtggtgaacaagcccgacagccacggcggcagcctggagtggaccaagatctgcgagaagagcaccaaggtgatcaccttcatcgacctggccggccacgagaagtacctgaagaccaccgtgttcggcatgaccggccacctgcccgacttctgcatgctgatggtgggcagcaacgccggcatcgtgggcatgaccaaggagcacctgggcctggccctggccctgaacgtgcccgtgttcgtggtggtgaccaagatcgacatgtgccccgccaacatcctgcaggagaccctgaagctgctgcagagactgctgaagagccccggctgcagaaagatccccgtgctggtgcagagcaaggacgacgtgatcgtgaccgccagcaacttcagcagcgagagaatgtgccccatcttccagatcagcaacgtgaccggcgagaacctggacctgctgaagatgttcctgaacctgctgagccccagaaccagctacagagaggaggagcccgccgagttccagatcgacgacacctacagcgtgcccggcgtgggcaccgtggtgagcggcaccaccctgagaggcctgatcaagctgaacgacaccctgctgctgggccccgaccccctgggcaacttcctgagcatcgccgtgaagagcatccacagaaagagaatgcccgtgaaggaggtgagaggcggccagaccgccagcttcgccctgaagaagatcaagagaagcagcatcagaaagggcatggtgatggtgagccccagactgaacccccaggccagctgggagttcgaggccgagatcctggtgctgcaccaccccaccaccatcagccccagataccaggccatggtgcactgcggcagcatcagacagaccgccaccatcctgagcatggacaaggactgcctgagaaccggcgacaaggccaccgtgcacttcagattcatcaagacccccgagtacctgcacatcgaccagagactggtgttcagagagggcagaaccaaggccgtgggcaccatcaccaagctgctgcagaccaccaacaacagccccatgaacagcaagccccagcagatcaagatgcagagcaccaagaagggccccctgaccaagagagacgagggcggccccagcggcggccccgccgtgggcgcccccccccccggcgacgaggccagcagcgtgggcgccggccagcccgccgccagcagcaacctgcagccccagcccaagcccagcagcggcggcagaagaagaggcggccagagacacaaggtgaagagccagggcgcctgcgtgacccccgccagcggctgctag

SEQ ID NO: 9219 - DNA, 1656 bp, Homo sapiens
  source 1..1656: mol_type = genomic DNA
atggccgcccccgccctgagctggagactgcccctgctgatcctgctgctgcccctggccaccagctgggccagcgccgccgtgaacggcaccagccagttcacctgcttctacaacagcagagccaacatcagctgcgtgtggagccaggacggcgccctgcaggacaccagctgccaggtgcacgcctggcccgacagaagaagatggaaccagacctgcgagctgctgcccgtgagccaggccagctgggcctgcaacctgatcctgggcgcccccgacagccagaagctgaccaccgtggacatcgtgaccctgagagtgctgtgcagagagggcgtgagatggagagtgatggccatccaggacttcaagcccttcgagaacctgagactgatggcccccatcagcctgcaggtggtgcacgtggagacccacagatgcaacatcagctgggagatcagccaggccagccactacttcgagagacacctggagttcgaggccagaaccctgagccccggccacacctgggaggaggcccccctgctgaccctgaagcagaagcaggagtggatctgcctggagaccctgacccccgacacccagtacgagttccaggtgagagtgaagcccctgcagggcgagttcaccacctggagcccctggagccagcccctggccttcagaaccaagcccgccgccctgggcaaggacaccatcccctggctgggccacctgctggtgggcctgagcggcgccttcggcttcatcatcctggtgtacctgctgatcaactgcagaaacaccggcccctggctgaagaaggtgctgaagtgcaacacccccgaccccagcaagttcttcagccagctgagcagcgagcacggcggcgacgtgcagaagtggctgagcagccccttccccagcagcagcttcagccccggcggcctggcccccgagatcagccccctggaggtgctggagagagacaaggtgacccagctgctgctgcagcaggacaaggtgcccgagcccgccagcctgagcagcaaccacagcctgaccagctgcttcaccaaccagggctacttcttcttccacctgcccgacgccctggagatcgaggcctgccaggtgtacttcacctacgacccctacagcgaggaggaccccgacgagggcgtggccggcgcccccaccggcagcagcccccagcccctgcagcccctgagcggcgaggacgacgcctactgcaccttccccagcagagacgacctgctgctgttcagccccagcctgctgggcggccccagcccccccagcaccgcccccggcggcagcggcgccggcgaggagagaatgccccccagcctgcaggagagagtgcccagagactgggacccccagcccctgggcccccccacccccggcgtgcccgacctggtggacttccagcccccccccgagctggtgctgagagaggccggcgaggaggtgcccgacgccggccccagagagggcgtgagcttcccctggagcagaccccccggccagggcgagttcagagccctgaacgccagactgcccctgaacaccgacgcctacctgagcctgcaggagctgcagggccaggaccccacccacctggtgtag

SEQ ID NO: 9220 - DNA, 3516 bp, Homo sapiens
  source 1..3516: mol_type = genomic DNA
atggagaacaacctgaagacctgccccaaggaggacggcgacttcgtgagcgacaagatcaagttcaagatcgaggaggaggacgacgacggcatcccccccgacagcctggagagaatggacttcaagagcgagcaggaggacatgaagcagaccgacagcggcggcgagagagccggcctgggcggcaccggctgcagctgcaagccccccggcaagtacctgagcgccgagagcgaggacgactacggcgccctgttcagccagtacagcagcaccctgtacgacgtggccatggaggccgtgacccagagcctgctgagcagcagaaacatgagcagcagaaagaagagccccgcctggaagcacttcttcatcagccccagagacagcaccaaggccatctgcatgtactgcgtgaaggagttcagcagaggcaagaacgagaaggacctgagcaccagctgcctgatgagacacgtgagaagagcccaccccaccgtgctgatccaggagaacggcagcgtgagcgccgtgagcagcttccccagccccagcctgctgctgcccccccagcccgccgacgccggcgacctgagcaccatcctgagccccatcaagctggtgcagaaggtggccagcaagatccccagccccgacagaatcaccgaggagagcgtgagcgtggtgagcagcgaggagatcagcagcgacatgagcgtgagcgagaagtgcggcagagaggaggccctggtgggcagcagcccccacctgcccgccctgcactacgacgagcccgccgagaacctggccgagaagagcctgcccctgcccaagagcaccagcggcagcagaagaagaagcgccgtgtggaagcacttctacctgagccccctggacaacagcaaggccgtgtgcatccactgcatgaacgagttcagcagaggcaagaacggcaaggacctgggcaccagctgcctgatcagacacatgtggagagcccacagagccatcgtgctgcaggagaacggcggcaccggcatcccccccctgtacagcaccccccccaccctgctgcccagcctgctgccccccgagggcgagctgagcagcgtgagcagcagccccgtgaagcccgtgagagagagccccagcgccagcagcagccccgacagactgaccgaggacctgcagagccacctgaaccccggcgacggcctgatggaggacgtggccgccttcagcagcagcgacgacatcggcgaggccagcgccagcagccccgagaagcagcaggccgacggcctgagccccagactgttcgagagcggcgccatcttccagcagaacaagaaggtgatgaagagactgaagagcgaggtgtggcaccacttcagcctggcccccatggacagcctgaaggccgagtgcagatactgcggctgcgccatcagcagaggcaagaagggcgacgtgggcaccagctgcctgatgagacacctgtacagaagacaccccgaggtggtgggcagccagaagggcttcctgggcgccagcctggccaacagcccctacgccaccctggccagcgccgagagcagcagcagcaagctgaccgacctgcccaccgtggtgaccaagaacaaccaggtgatgttccccgtgaacagcaagaagaccagcaagctgtggaaccacttcagcatctgcagcgccgacagcaccaaggtggtgtgcctgcactgcggcagaaccatcagcagaggcaagaagcccaccaacctgggcaccagctgcctgctgagacacctgcagagattccacagcaacgtgctgaagaccgaggtgagcgagaccgccagacccagcagccccgacaccagagtgcccagaggcaccgagctgagcggcgccagcagcttcgacgacaccaacgagaagttctacgacagccaccccgtggccaagaagatcaccagcctgatcgccgagatgatcgccctggacctgcagccctacagcttcgtggacaacgtgggcttcaacagactgctggagtacctgaagccccagtacagcctgcccgcccccagctacttcagcagaaccgccatccccggcatgtacgacaacgtgaagcagatcatcatgagccacctgaaggaggccgagagcggcgtgatccacttcaccagcggcatctggatgagcaaccagaccagagagtacctgaccctgaccgcccactgggtgagcttcgagagccccgccagacccagatgcgacgaccaccactgcagcgccctgctggacgtgagccaggtggactgcgactacagcggcaacagcatccagaagcagctggagtgctggtgggaggcctgggtgaccagcaccggcctgcaggtgggcatcaccgtgaccgacaacgccagcatcggcaagaccctgaacgagggcgagcacagcagcgtgcagtgcttcagccacaccgtgaacctgatcgtgagcgaggccatcaagagccagagaatggtgcagaacctgctgagcctggccagaaagatctgcgagagagtgcacagaagccccaaggccaaggagaagctggccgagctgcagagagagtacgccctgccccagcaccacctgatccaggacgtgcccagcaagtggagcaccagcttccacatgctggagagactgatcgagcagaagagagccatcaacgagatgagcgtggagtgcaacttcagagagctgatcagctgcgaccagtgggaggtgatgcagagcgtgtgcagagccctgaagcccttcgaggccgccagcagagagatgagcacccagatgagcaccctgagccaggtgatccccatggtgcacatcctgaacagaaaggtggagatgctgttcgaggagaccatgggcatcgacaccatgctgagaagcctgaaggaggccatggtgagcagactgagcgccaccctgcacgaccccagatacgtgttcgccaccctgctggaccccagatacaaggccagcctgttcaccgaggaggaggccgagcagtacaagcaggacctgatcagagagctggagctgatgaacagcaccagcgaggacgtggccgccagccacagatgcgacgccggcagccccagcaaggacagcgccgccgaggagaacctgtggagcctggtggccaaggtgaagaagaaggaccccagagagaagctgcccgaggccatggtgctggcctacctggaggaggaggtgctggagcacagctgcgaccccctgacctactggaacctgaagaaggccagctggcccggcctgagcgccctggccgtgagattcctgggctgcccccccagcatcgtgcccagcgagaagctgttcaacacccccaccgagaacggcagcctgggccagagcagactgatgatggagcacttcgagaagctgatcttcctgaaggtgaacctgcccctgatctacttccagtactag

SEQ ID NO: 9221 - DNA, 744 bp, Homo sapiens
  source 1..744: mol_type = genomic DNA
atgcagcccatcctgctgctgctggccttcctgctgctgcccagagccgacgccggcgagatcatcggcggccacgaggccaagccccacagcagaccctacatggcctacctgatgatctgggaccagaagagcctgaagagatgcggcggcttcctgatcagagacgacttcgtgctgaccgccgcccactgctggggcagcagcatcaacgtgaccctgggcgcccacaacatcaaggagcaggagcccacccagcagttcatccccgtgaagagacccatcccccaccccgcctacaaccccaagaacttcagcaacgacatcatgctgctgcagctggagagaaaggccaagagaaccagagccgtgcagcccctgagactgcccagcaacaaggcccaggtgaagcccggccagacctgcagcgtggccggctggggccagaccgcccccctgggcaagcacagccacaccctgcaggaggtgaagatgaccgtgcaggaggacagaaagtgcgagagcgacctgagacactactacgacagcaccatcgagctgtgcgtgggcgaccccgagatcaagaagaccagcttcaagggcgacagcggcggccccctggtgtgcaacaaggtggcccagggcatcgtgagctacggcagaaacaacggcatgccccccagagcctgcaccaaggtgagcagcttcgtgcactggatcaagaagaccatgaagagatactag

SEQ ID NO: 9222 - DNA, 1062 bp, Homo sapiens
  source 1..1062: mol_type = genomic DNA
atggaggacggcgtgctgaaggagggcttcctggtgaagagaggccacatcgtgcacaactggaaggccagatggttcatcctgagacagaacaccctggtgtactacaagctggagggcggcagaagagtgaccccccccaagggcagaatcctgctggacggctgcaccatcacctgcccctgcctggagtacgagaacagacccctgctgatcaagctgaagacccagaccagcaccgagtacttcctggaggcctgcagcagagaggagagagacgcctgggccttcgagatcaccggcgccatccacgccggccagcccggcaaggtgcagcagctgcacagcctgagaaacagcttcaagctgcccccccacatcagcctgcacagaatcgtggacaagatgcacgacagcaacaccggcatcagaagcagccccaacatggagcagggcagcacctacaagaagaccttcctgggcagcagcctggtggactggctgatcagcaacagcttcaccgccagcagactggaggccgtgaccctggccagcatgctgatggaggagaacttcctgagacccgtgggcgtgagaagcatgggcgccatcagaagcggcgacctggccgagcagttcctggacgacagcaccgccctgtacaccttcgccgagagctacaagaagaagatcagccccaaggaggagatcagcctgagcaccgtggagctgagcggcaccgtggtgaagcagggctacctggccaagcagggccacaagagaaagaactggaaggtgagaagattcgtgctgagaaaggaccccgccttcctgcactactacgaccccagcaaggaggagaacagacccgtgggcggcttcagcctgagaggcagcctggtgagcgccctggaggacaacggcgtgcccaccggcgtgaagggcaacgtgcagggcaacctgttcaaggtgatcaccaaggacgacacccactactacatccaggccagcagcaaggccgagagagccgagtggatcgaggccatcaagaagctgacctag

SEQ ID NO: 9223 - DNA, 2025 bp, Homo sapiens
  source 1..2025: mol_type = genomic DNA
atggccgaggtgcccgaggactacgacagcggccccgacgaggacggcgagctggagcccgagagacccgagctgcccggcctgcacaagctgtacgagaacgccgagcccgacaccatggccaaggccgacagcaagctgcccgccgagatctaccaggagccccagcccgagaccgaggaggaggacttcaaggagggcgagcccgacagcgccaagaacgtgcagctgaagcccggcggcaccagccaggagggcatcgccaaggagagcaagagagacgtgcccagcgagaccgagcccggcatccaccaggaggtgaagagcgagaccagcagagagatgggcgagttcttcaaggacctggaggcccccatggacgagacccacaaggagagcgacctggagccccccgaggaggccaagcccaacgtgaccgaggacgtgttcctggagagcgccatggagaccgaccccgaccccgtgccccccaccgagaccatgagcgaggtgagcggcgccaccgtgagagagagaaacctggagctgctggaggaggagaccgagcccggcgtgcccgaggagagcctgagagtgcagcacgaggagaccggcctggagccccccgagcagaccaagcaggacttccccagcgagaagctgggcgagagcctggaggagaccgacctgcagccccccaagatgaccaagcccgagacccccgaggagacccagagagagagcaccgagaagaagagaaccgagccccccgagcaggccagactggagttcctggagaaggagcccagaaagagcagcgaggaggccggcctggagccccccgaggagacccagcccgaggtgcccgaggagatgcagagaaaggccaccgaggagaagggcaccgagctgcccgagagaaccaagcccgacttccccgaccacaagcccagaaagagcaccgacgagaacgtgcccgagcccctggaggagatcaagctggagttccccgaggaggagagcagaaagaccaacgaggagaccatcctggagcagagcgagatgatgaagcccgagagccccgaggagatcagaaagagcaacgagaagaagaacccccagccccccgaggagaccggccccgtgctgccccaggagatcaacccccaggtggaggagaagacccagaccaagcccaccgagaagatcctggagctgcccgacgagaccaagcccagagagacccacgtggagttcagcaaggaggacagacccgagcccatcaagagcaagtacagcgtgggcaacgacgagctggagcacagagagcccaagagaggcaagctgagcctgagcgacaagttcagaaaggagtactacgccctgggcagcctgagagagagcgaggagagcatcggcacccactacgagttcctgcagcccctgcagaagctgctgaacgtgagcgaggagtgcagctacagcgaccccagcgagagccagaccgagctgagcgagttcgtgcacgagaaggaggtggtggacctgagccaggagctgaaggagagagtgagcgaggacgacgagacccagcccgagaagggcaccgagctgcagttcgagcacctgaactgggaccccgaggaggtggccgagtggatcagccagctgggcttcccccagtacaaggagtgcttcatcaccaacttcatcagcggcagaaagctgatccacgtgaactgcagcaacctgccccagatgggcatcaccaacttcgaggacatgaaggccatcagcagacacacccaggagctgctggagatcgaggagcccctgttcaagagaagcatcagcctgccctacagagacatcatcggcctgtacctggagcagaagggccacaccggcatcaagagcgacagcctgaccctgagcgagttcgtgaaggccgccggcctgcaggactacgcccccgagatcaccgcccccgaggagaacgaggagctgccctgcaccgagccctag

SEQ ID NO: 9224 - DNA, 1689 bp, Homo sapiens
  source 1..1689: mol_type = genomic DNA
atgagacccgagcccggcggctgctgctgcagaagaaccgtgagagccaacggctgcgtggccaacggcgaggtgagaaacggctacgtgagaagcagcgccgccgccgccgccgccgccgccgccggccagatccaccacgtgacccagaacggcggcctgtacaagagacccttcaacgaggccttcgaggagacccccatgctggtggccgtgctgacctacgtgggctacggcgtgctgaccctgttcggctacctgagagacttcctgagatactggagaatcgagaagtgccaccacgccaccgagagagaggagcagaaggacttcgtgagcctgtaccaggacttcgagaacttctacaccagaaacctgtacatgagaatcagagacaactggaacagacccatctgcagcgtgcccggcgccagagtggacatcatggagagacagagccacgactacaactggagcttcaagtacaccggcaacatcatcaagggcgtgatcaacatgggcagctacaactacctgggcttcgccagaaacaccggcagctgccaggaggccgccgccaaggtgctggaggagtacggcgccggcgtgtgcagcaccagacaggagatcggcaacctggacaagcacgaggagctggaggagctggtggccagattcctgggcgtggaggccgccatggcctacggcatgggcttcgccaccaacagcatgaacatccccgccctggtgggcaagggctgcctgatcctgagcgacgagctgaaccacgccagcctggtgctgggcgccagactgagcggcgccaccatcagaatcttcaagcacaacaacatgcagagcctggagaagctgctgaaggacgccatcgtgtacggccagcccagaaccagaagaccctggaagaagatcctgatcctggtggagggcatctacagcatggagggcagcatcgtgagactgcccgaggtgatcgccctgaagaagaagtacaaggcctacctgtacctggacgaggcccacagcatcggcgccctgggccccaccggcagaggcgtggtggagtacttcggcctggaccccgaggacgtggacgtgatgatgggcaccttcaccaagagcttcggcgccagcggcggctacatcggcggcaagaaggagctgatcgactacctgagaacccacagccacagcgccgtgtacgccaccagcctgagcccccccgtggtggagcagatcatcaccagcatgaagtgcatcatgggccaggacggcaccagcctgggcaaggagtgcgtgcagcagctggccgagaacaccagatacttcagaagaagactgaaggagatgggcttcatcatctacggcaacgaggacagccccgtggtgcccctgatgctgtacatgcccgccaagatcggcgccttcggcagagagatgctgaagagaaacatcggcgtggtggtggtgggcttccccgccacccccatcatcgagagcagagccagattctgcctgagcgccgcccacaccaaggagatcctggacaccgccctgaaggagatcgacgaggtgggcgacctgctgcagctgaagtacagcagacacagactggtgcccctgctggacagacccttcgacgagaccacctacgaggagaccgaggactag

SEQ ID NO: 9225 - DNA, 2346 bp, Homo sapiens
  source 1..2346: mol_type = genomic DNA
atgagcagcagcagccccaccggccagatcgccagcgccgccgacatcaagcaggagaacggcatggagagcgccagcgagggccaggaggcccacagagaggtggccggcggcgccgccgtgggcctgagcccccccgcccccgcccccttccccctggagcccggcgacgccgccaccgccgccgccagagtgagcggcgaggagggcgccgtggccgccgccgccgccggcgccgccgccgaccaggtgcagctgcacagcgagctgctgggcagacaccaccacgccgccgccgccgccgcccagacccccctggccttcagccccgaccacgtggcctgcgtgtgcgaggccctgcagcagggcggcaacctggacagactggccagattcctgtggagcctgccccagagcgacctgctgagaggcaacgagagcctgctgaaggccagagccctggtggccttccaccagggcatctaccccgagctgtacagcatcctggagagccacagcttcgagagcgccaaccaccccctgctgcagcagctgtggtacaaggccagatacaccgaggccgagagagccagaggcagacccctgggcgccgtggacaagtacagactgagaagaaagttccccctgcccagaaccatctgggacggcgaggagaccgtgtactgcttcaaggagaagagcagaaacgccctgaaggagctgtacaagcagaacagataccccagccccgccgagaagagacacctggccaagatcaccggcctgagcctgacccaggtgagcaactggttcaagaacagaagacagagagacagaaaccccagcgagacccagagcaagagcgagagcgacggcaaccccagcaccgaggacgagagcagcaagggccacgaggacctgagcccccaccccctgagcagcagcagcgacggcatcaccaacctgagcctgagcagccacatggagcccgtgtacatgcagcagatcggcaacgccaagatcagcctgagcagcagcggcgtgctgctgaacggcagcctggtgcccgccagcaccagccccgtgttcctgaacggcaacagcttcatccagggccccagcggcgtgatcctgaacggcctgaacgtgggcaacacccaggccgtggccctgaacccccccaagatgagcagcaacatcgtgagcaacggcatcagcatgaccgacatcctgggcagcaccagccaggacgtgaaggagttcaaggtgctgcagagcagcgccaacagcgccaccaccaccagctacagccccagcgtgcccgtgagcttccccggcctgatccccagcaccgaggtgaagagagagggcatccagaccgtggccagccaggacggcggcagcgtggtgaccttcaccacccccgtgcagatcaaccagtacggcatcgtgcagatccccaacagcggcgccaacagccagttcctgaacggcagcatcggcttcagccccctgcagctgccccccgtgagcgtggccgccagccagggcaacatcagcgtgagcagcagcaccagcgacggcagcaccttcaccagcgagagcaccaccgtgcagcagggcaaggtgttcctgagcagcctggcccccagcgccgtggtgtacaccgtgcccaacaccggccagaccatcggcagcgtgaagcaggagggcctggagagaagcctggtgttcagccagctgatgcccgtgaaccagaacgcccaggtgaacgccaacctgagcagcgagaacatcagcggcagcggcctgcaccccctggccagcagcctggtgaacgtgagccccacccacaacttcagcctgagccccagcaccctgctgaaccccaccgagctgaacagagacatcgccgacagccagcccatgagcgcccccgtggccagcaagagcaccgtgaccagcgtgagcaacaccaactacgccaccctgcagaactgcagcctgatcaccggccaggacctgctgagcgtgcccatgacccaggccgccctgggcgagatcgtgcccaccgccgaggaccaggtgggccaccccagccccgccgtgcaccaggacttcgtgcaggagcacagactggtgctgcagagcgtggccaacatgaaggagaacttcctgagcaacagcgagagcaaggccaccagcagcctgatgatgctggacagcaagagcaagtacgtgctggacggcatggtggacaccgtgtgcgaggacctggagaccgacaagaaggagctggccaagctgcagaccgtgcagctggacgaggacatgcaggacctgtag

SEQ ID NO: 9226 - DNA, 1392 bp, Homo sapiens
  source 1..1392: mol_type = genomic DNA
atgggcaaggagaagacccacatcaacatcgtggtgatcggccacgtggacagcggcaagagcaccaccaccggccacctgatctacaagtgcggcggcatcgacaagagaaccatcgagaagttcgagaaggaggccgccgagatgggcaagggcagcttcaagtacgcctgggtgctggacaagctgaaggccgagagagagagaggcatcaccatcgacatcagcctgtggaagttcgagaccaccaagtactacatcaccatcatcgacgcccccggccacagagacttcatcaagaacatgatcaccggcaccagccaggccgactgcgccgtgctgatcgtggccgccggcgtgggcgagttcgaggccggcatcagcaagaacggccagaccagagagcacgccctgctggcctacaccctgggcgtgaagcagctgatcgtgggcgtgaacaagatggacagcaccgagcccgcctacagcgagaagagatacgacgagatcgtgaaggaggtgagcgcctacatcaagaagatcggctacaaccccgccaccgtgcccttcgtgcccatcagcggctggcacggcgacaacatgctggagcccagccccaacatgccctggttcaagggctggaaggtggagagaaaggagggcaacgccagcggcgtgagcctgctggaggccctggacaccatcctgccccccaccagacccaccgacaagcccctgagactgcccctgcaggacgtgtacaagatcggcggcatcggcaccgtgcccgtgggcagagtggagaccggcatcctgagacccggcatggtggtgaccttcgcccccgtgaacatcaccaccgaggtgaagagcgtggagatgcaccacgaggccctgagcgaggccctgcccggcgacaacgtgggcttcaacgtgaagaacgtgagcgtgaaggacatcagaagaggcaacgtgtgcggcgacagcaagagcgaccccccccaggaggccgcccagttcaccagccaggtgatcatcctgaaccaccccggccagatcagcgccggctacagccccgtgatcgactgccacaccgcccacatcgcctgcaagttcgccgagctgaaggagaagatcgacagaagaagcggcaagaagctggaggacaaccccaagagcctgaagagcggcgacgccgccatcgtggagatggtgcccggcaagcccatgtgcgtggagagcttcagccagtacccccccctgggcagattcgccgtgagagacatgagacagaccgtggccgtgggcgtgatcaagaacgtggagaagaagagcggcggcgccggcaaggtgaccaagagcgcccagaaggcccagaaggccggcaagtag

SEQ ID NO: 9227 - DNA, 600 bp, Homo sapiens
  source 1..600: mol_type = genomic DNA
atggccgccgccaacaagggcaagtgcctgcccggcgtggtgggcctggcccaggccctgcccgtgggccccggcagaagagccatcgccgccggcaacaagcccagagtgagaagcatcagattcgccgccggccacgacgccgagggcagccacagccacgtgcacttcgacgagaagctgcacgacagcgtggtgatggtgacccaggagagcgacagcagcttcctggtgaaggtgggcttcctgaagatcctgcacagatacgagatcaccttcaccctgccccccgtgcacagactgagcaaggacgtgagagaggcccccgtgcccagcctgcacctgaagctgctgagcgtggtgcccgtgcccgagggctacagcgtgaagtgcgagtacagcgcccacaaggagggcgtgctgaaggaggagatcctgctggcctgcgagggcggcaccggcacctgcgtgagagtgaccgtgcaggccagagtgatggacagacaccacggcacccccatgctgctggacggcgtgaagtgcgtgggcgccgagctggagtacgacagcgagcacagcgactggcacggcttcgactag

SEQ ID NO: 9228 - DNA, 270 bp, Homo sapiens
  source 1..270: mol_type = genomic DNA
atgcagctgcaggccagcctgagcttcctgctgatcctgaccctgtgcctggagctgagaagcgagctggccagagacaccatcaaggacctgctgcccaacgtgtgcgccttccccatggagaagggcccctgccagacctacatgaccagatggttcttcaacttcgagaccggcgagtgcgagctgttcgcctacggcggctgcggcggcaacagcaacaacttcctgagaaaggagaagtgcgagaagttctgcaagttcacctag

SEQ ID NO: 9229 - DNA, 1251 bp, Homo sapiens
  source 1..1251: mol_type = genomic DNA
atgagcgaggccgacggcctgagacagagaagacccctgagaccccaggtggtgaccgacgacgacggccaggcccccgaggccaaggacggcagcagcttcagcggcagagtgttcagagtgaccttcctgatgctggccgtgagcctgaccgtgcccctgctgggcgccatgatgctgctggagagccccatcgacccccagcccctgagcttcaaggagccccccctgctgctgggcgtgctgcaccccaacaccaagctgagacaggccgagagactgttcgagaaccagctggtgggccccgagagcatcgcccacatcggcgacgtgatgttcaccggcaccgccgacggcagagtggtgaagctggagaacggcgagatcgagaccatcgccagattcggcagcggcccctgcaagaccagagacgacgagcccgtgtgcggcagacccctgggcatcagagccggccccaacggcaccctgttcgtggccgacgcctacaagggcctgttcgaggtgaacccctggaagagagaggtgaagctgctgctgagcagcgagacccccatcgagggcaagaacatgagcttcgtgaacgacctgaccgtgacccaggacggcagaaagatctacttcaccgacagcagcagcaagtggcagagaagagactacctgctgctggtgatggagggcaccgacgacggcagactgctggagtacgacaccgtgaccagagaggtgaaggtgctgctggaccagctgagattccccaacggcgtgcagctgagccccgccgaggacttcgtgctggtggccgagaccaccatggccagaatcagaagagtgtacgtgagcggcctgatgaagggcggcgccgacctgttcgtggagaacatgcccggcttccccgacaacatcagacccagcagcagcggcggctactgggtgggcatgagcaccatcagacccaaccccggcttcagcatgctggacttcctgagcgagagaccctggatcaagagaatgatcttcaagctgttcagccaggagaccgtgatgaagttcgtgcccagatacagcctggtgctggagctgagcgacagcggcgccttcagaagaagcctgcacgaccccgacggcctggtggccacctacatcagcgaggtgcacgagcacgacggccacctgtacctgggcagcttcagaagccccttcctgtgcagactgagcctgcaggccgtgtag

SEQ ID NO: 9230 - DNA, 870 bp, Homo sapiens
  source 1..870: mol_type = genomic DNA
atggtgggcgtgaagcccgtgggcagcgaccccgacttccagcccgagctgagcggcgccggcagcagactggccgtggtgaagttcaccatgagaggctgcggcccctgcctgagaatcgcccccgccttcagcagcatgagcaacaagtacccccaggccgtgttcctggaggtggacgtgcaccagtgccagggcaccgccgccaccaacaacatcagcgccacccccaccttcctgttcttcagaaacaaggtgagaatcgaccagtaccagggcgccgacgccgtgggcctggaggagaagatcaagcagcacctggagaacgaccccggcagcaacgaggacaccgacatccccaagggctacatggacctgatgcccttcatcaacaaggccggctgcgagtgcctgaacgagagcgacgagcacggcttcgacaactgcctgagaaaggacaccaccttcctggagagcgactgcgacgagcagctgctgatcaccgtggccttcaaccagcccgtgaagctgtacagcatgaagttccagggccccgacaacggccagggccccaagtacgtgaagatcttcatcaacctgcccagaagcatggacttcgaggaggccgagagaagcgagcccacccaggccctggagctgaccgaggacgacatcaaggaggacggcatcgtgcccctgagatacgtgaagttccagaacgtgaacagcgtgaccatcttcgtgcagagcaaccagggcgaggaggagaccaccagaatcagctacttcaccttcatcggcacccccgtgcaggccaccaacatgaacgacttcaagagagtggtgggcaagaagggcgagagccactag

SEQ ID NO: 9231 - DNA, 1164 bp, Homo sapiens
  source 1..1164: mol_type = genomic DNA
atggtgttcgccttctggaaggtgttcctgatcctgagctgcctggccggccaggtgagcgtggtgcaggtgaccatccccgacggcttcgtgaacgtgaccgtgggcagcaacgtgaccctgatctgcatctacaccaccaccgtggccagcagagagcagctgagcatccagtggagcttcttccacaagaaggagatggagcccatcagcatctacttcagccagggcggccaggccgtggccatcggccagttcaaggacagaatcaccggcagcaacgaccccggcaacgccagcatcaccatcagccacatgcagcccgccgacagcggcatctacatctgcgacgtgaacaacccccccgacttcctgggccagaaccagggcatcctgaacgtgagcgtgctggtgaagcccagcaagcccctgtgcagcgtgcagggcagacccgagaccggccacaccatcagcctgagctgcctgagcgccctgggcacccccagccccgtgtactactggcacaagctggagggcagagacatcgtgcccgtgaaggagaacttcaaccccaccaccggcatcctggtgatcggcaacctgaccaacttcgagcagggctactaccagtgcaccgccatcaacagactgggcaacagcagctgcgagatcgacctgaccagcagccaccccgaggtgggcatcatcgtgggcgccctgatcggcagcctggtgggcgccgccatcatcatcagcgtggtgtgcttcgccagaaacaaggccaaggccaaggccaaggagagaaacagcaagaccatcgccgagctggagcccatgaccaagatcaaccccagaggcgagagcgaggccatgcccagagaggacgccacccagctggaggtgaccctgcccagcagcatccacgagaccggccccgacaccatccaggagcccgactacgagcccaagcccacccaggagcccgcccccgagcccgcccccggcagcgagcccatggccgtgcccgacctggacatcgagctggagctggagcccgagacccagagcgagctggagcccgagcccgagcccgagcccgagagcgagcccggcgtggtggtggagcccctgagcgaggacgagaagggcgtggtgaaggcctag

SEQ ID NO: 9232 - DNA, 1821 bp, Homo sapiens
  source 1..1821: mol_type = genomic DNA
atgagcgacaccagcgagagcggcgccggcctgaccagattccaggccgaggccagcgagaaggacagcagcagcatgatgcagaccctgctgaccgtgacccagaacgtggaggtgcccgagacccccaaggccagcaaggccctggaggtgagcgaggacgtgaaggtgagcaaggccagcggcgtgagcaaggccaccgaggtgagcaagacccccgaggccagagaggcccccgccacccaggccagcagcaccacccagctgaccgacacccaggtgctggccgccgagaacaagagcctggccgccgacaccaagaagcagaacgccgacccccaggccgtgaccatgcccgccaccgagaccaagaaggtgagccacgtggccgacaccaaggtgaacaccaaggcccaggagaccgaggccgcccccagccaggcccccgccgacgagcccgagcccgagagcgccgccgcccagagccaggagaaccaggacaccagacccaaggtgaaggccaagaaggccagaaaggtgaagcacctggacggcgaggaggacggcagcagcgaccagagccaggccagcggcaccaccggcggcagaagagtgagcaaggccctgatggccagcatggccagaagagccagcagaggccccatcgccttctgggccagaagagccagcagaaccagactggccgcctgggccagaagagccctgctgagcctgagaagccccaaggccagaagaggcaaggccagaagaagagccgccaagctgcagagcagccaggagcccgaggcccccccccccagagacgtggccctgctgcagggcagagccaacgacctggtgaagtacctgctggccaaggaccagaccaagatccccatcaagagaagcgacatgctgaaggacatcatcaaggagtacaccgacgtgtaccccgagatcatcgagagagccggctacagcctggagaaggtgttcggcatccagctgaaggagatcgacaagaacgaccacctgtacatcctgctgagcaccctggagcccaccgacgccggcatcctgggcaccaccaaggacagccccaagctgggcctgctgatggtgctgctgagcatcatcttcatgaacggcaacagaagcagcgaggccgtgatctgggaggtgctgagaaagctgggcctgagacccggcatccaccacagcctgttcggcgacgtgaagaagctgatcaccgacgagttcgtgaagcagaagtacctggactacgccagagtgcccaacagcaacccccccgagtacgagttcttctggggcctgagaagctactacgagaccagcaagatgaaggtgctgaagttcgcctgcaaggtgcagaagaaggaccccaaggagtgggccgcccagtacagagaggccatggaggccgacctgaaggccgccgccgaggccgccgccgaggccaaggccagagccgagatcagagccagaatgggcatcggcctgggcagcgagaacgccgccggcccctgcaactgggacgaggccgacatcggcccctgggccaaggccagaatccaggccggcgccgaggccaaggccaaggcccaggagagcggcagcgccagcaccggcgccagcaccagcaccaacaacagcgccagcgccagcgccagcaccagcggcggcttcagcgccggcgccagcctgaccgccaccctgaccttcggcctgttcgccggcctgggcggcgccggcgccagcaccagcggcagcagcggcgcctgcggcttcagctacaagtag

SEQ ID NO: 9233 - DNA, 369 bp, Homo sapiens
  source 1..369: mol_type = genomic DNA
atgaccaccgccaccagacaggaggtgctgggcctgtacagaagcatcttcagactggccagaaagtggcaggccaccagcggccagatggaggacaccatcaaggagaagcagtacatcctgaacgaggccagaaccctgttcagaaagaacaagaacctgaccgacaccgacctgatcaagcagtgcatcgacgagtgcaccgccagaatcgagatcggcctgcactacaagatcccctaccccagacccatccacctgccccccatgggcctgacccccctgagaggcagaggcctgagaagccaggagaagctgagaaagctgagcaagcccgtgtacctgagaagccacgacgaggtgagctag

SEQ ID NO: 9234 - DNA, 582 bp, Homo sapiens
  source 1..582: mol_type = genomic DNA
atgctgggcgtgctggagctgctgctgctgggcgccgcctggctggccggccccgccagaggccagaacgagaccgagcccatcgtgctggagggcaagtgcctggtggtgtgcgacagcaaccccaccagcgaccccaccggcaccgccctgggcatcagcgtgagaagcggcagcgccaaggtggccttcagcgccatcagaagcaccaaccacgagcccagcgagatgagcaacagaaccatgatcatctacttcgaccaggtgctggtgaacatcggcaacaacttcgacagcgagagaagcaccttcatcgcccccagaaagggcatctacagcttcaacttccacgtggtgaaggtgtacaacagacagaccatccaggtgagcctgatgctgaacggctggcccgtgatcagcgccttcgccggcgaccaggacgtgaccagagaggccgccagcaacggcgtgctgatccagatggagaagggcgacagagcctacctgaagctggagagaggcaacctgatgggcggctggaagtacagcaccttcagcggcttcctggtgttccccctgtag

SEQ ID NO: 9235 - DNA, 1578 bp, Homo sapiens
  source 1..1578: mol_type = genomic DNA
atgagcagacagctgctgcccgtgctgctgctgctgctgctgagagccagctgcccctggggccaggagcagggcgccagaagccccagcgaggagccccccgaggaggagatccccaaggaggacggcatcctggtgctgagcagacacaccctgggcctggccctgagagagcaccccgccctgctggtggagttctacgccccctggtgcggccactgccaggccctggcccccgagtacagcaaggccgccgccgtgctggccgccgagagcatggtggtgaccctggccaaggtggacggccccgcccagagagagctggccgaggagttcggcgtgaccgagtaccccaccctgaagttcttcagaaacggcaacagaacccaccccgaggagtacaccggccccagagacgccgagggcatcgccgagtggctgagaagaagagtgggccccagcgccatgagactggaggacgaggccgccgcccaggccctgatcggcggcagagacctggtggtgatcggcttcttccaggacctgcaggacgaggacgtggccaccttcctggccctggcccaggacgccctggacatgaccttcggcctgaccgacagacccagactgttccagcagttcggcctgaccaaggacaccgtggtgctgttcaagaagttcgacgagggcagagccgacttccccgtggacgaggagctgggcctggacctgggcgacctgagcagattcctggtgacccacagcatgagactggtgaccgagttcaacagccagaccagcgccaagatcttcgccgccagaatcctgaaccacctgctgctgttcgtgaaccagaccctggccgcccacagagagctgctggccggcttcggcgaggccgcccccagattcagaggccaggtgctgttcgtggtggtggacgtggccgccgacaacgagcacgtgctgcagtacttcggcctgaaggccgaggccgcccccaccctgagactggtgaacctggagaccaccaagaagtacgcccccgtggacggcggccccgtgaccgccgccagcatcaccgccttctgccacgccgtgctgaacggccaggtgaagccctacctgctgagccaggagatcccccccgactgggaccagagacccgtgaagaccctggtgggcaagaacttcgagcaggtggccttcgacgagaccaagaacgtgttcgtgaagttctacgccccctggtgcacccactgcaaggagatggcccccgcctgggaggccctggccgagaagtaccaggaccacgaggacatcatcatcgccgagctggacgccaccgccaacgagctggacgccttcgccgtgcacggcttccccaccctgaagtacttccccgccggccccggcagaaaggtgatcgagtacaagagcaccagagacctggagaccttcagcaagttcctggacaacggcggcgtgctgcccaccgaggagccccccgaggagcccgccgcccccttccccgagccccccgccaacagcaccatgggcagcaaggaggagctgtag

SEQ ID NO: 9236 - DNA, 2262 bp, Homo sapiens
  source 1..2262: mol_type = genomic DNA
atggccgacaagagaaagctgcagggcgagatcgacagatgcctgaagaaggtgagcgagggcgtggagcagttcgaggacatctggcagaagctgcacaacgccgccaacgccaaccagaaggagaagtacgaggccgacctgaagaaggagatcaagaagctgcagagactgagagaccagatcaagacctgggtggccagcaacgagatcaaggacaagagacagctgatcgacaacagaaagctgatcgagacccagatggagagattcaaggtggtggagagagagaccaagaccaaggcctacagcaaggagggcctgggcctggcccagaaggtggaccccgcccagaaggagaaggaggaggtgggccagtggctgaccaacaccatcgacaccctgaacatgcaggtggaccagttcgagagcgaggtggagagcctgagcgtgcagaccagaaagaagaagggcgacaaggacaagcaggacagaatcgagggcctgaagagacacatcgagaagcacagataccacgtgagaatgctggagaccatcctgagaatgctggacaacgacagcatcctggtggacgccatcagaaagatcaaggacgacgtggagtactacgtggacagcagccaggaccccgacttcgaggagaacgagttcctgtacgacgacctggacctggaggacatcccccaggccctggtggccaccagcccccccagccacagccacatggaggacgagatcttcaaccagagcagcagcacccccaccagcaccaccagcagcagccccatcccccccagccccgccaactgcaccaccgagaacagcgaggacgacaagaagagaggcagaagcaccgacagcgaggtgagccagagccccgccaagaacggcagcaagcccgtgcacagcaaccagcacccccagagccccgccgtgccccccacctaccccagcggccccccccccgccgccagcgccctgagcaccacccccggcaacaacggcgtgcccgcccccgccgccccccccagcgccctgggccccaaggccagccccgcccccagccacaacagcggcacccccgccccctacgcccaggccgtggccccccccgcccccagcggccccagcaccacccagcccagaccccccagcgtgcagcccagcggcggcggcggcggcggcagcggcggcggcggcagcagcagcagcagcaacagcagcgccggcggcggcgccggcaagcagaacggcgccaccagctacagcagcgtggtggccgacagccccgccgaggtggccctgagcagcagcggcggcaacaacgccagcagccaggccctgggcccccccagcggcccccacaaccccccccccagcaccagcaaggagcccagcgccgccgcccccaccggcgccggcggcgtggcccccggcagcggcaacaacagcggcggccccagcctgctggtgcccctgcccgtgaacccccccagcagccccacccccagcttcagcgacgccaaggccgccggcgccctgctgaacggccccccccagttcagcaccgcccccgagatcaaggcccccgagcccctgagcagcctgaagagcatggccgagagagccgccatcagcagcggcatcgaggaccccgtgcccaccctgcacctgaccgagagagacatcatcctgagcagcaccagcgccccccccgccagcgcccagccccccctgcagctgagcgaggtgaacatccccctgagcctgggcgtgtgccccctgggccccgtgcccctgaccaaggagcagctgtaccagcaggccatggaggaggccgcctggcaccacatgccccaccccagcgacagcgagagaatcagacagtacctgcccagaaacccctgccccacccccccctaccaccaccagatgccccccccccacagcgacaccgtggagttctaccagagactgagcaccgagaccctgttcttcatcttctactacctggagggcaccaaggcccagtacctggccgccaaggccctgaagaagcagagctggagattccacaccaagtacatgatgtggttccagagacacgaggagcccaagaccatcaccgacgagttcgagcagggcacctacatctacttcgactacgagaagtggggccagagaaagaaggagggcttcaccttcgagtacagatacctggaggacagagacctgcagtag

SEQ ID NO: 9237 - DNA, 1146 bp, Homo sapiens
  source 1..1146: mol_type = genomic DNA
atgcccttcggcaacacccacaacaagttcaagctgaactacaagcccgaggaggagtaccccgacctgagcaagcacaacaaccacatggccaaggtgctgaccctggagctgtacaagaagctgagagacaaggagacccccagcggcttcaccgtggacgacgtgatccagaccggcgtggacaaccccggccaccccttcatcatgaccgtgggctgcgtggccggcgacgaggagagctacgaggtgttcaaggagctgttcgaccccatcatcagcgacagacacggcggctacaagcccaccgacaagcacaagaccgacctgaaccacgagaacctgaagggcggcgacgacctggaccccaactacgtgctgagcagcagagtgagaaccggcagaagcatcaagggctacaccctgcccccccactgcagcagaggcgagagaagagccgtggagaagctgagcgtggaggccctgaacagcctgaccggcgagttcaagggcaagtactaccccctgaagagcatgaccgagaaggagcagcagcagctgatcgacgaccacttcctgttcgacaagcccgtgagccccctgctgctggccagcggcatggccagagactggcccgacgccagaggcatctggcacaacgacaacaagagcttcctggtgtgggtgaacgaggaggaccacctgagagtgatcagcatggagaagggcggcaacatgaaggaggtgttcagaagattctgcgtgggcctgcagaagatcgaggagatcttcaagaaggccggccaccccttcatgtggaaccagcacctgggctacgtgctgacctgccccagcaacctgggcaccggcctgagaggcggcgtgcacgtgaagctggcccacctgagcaagcaccccaagttcgaggagatcctgaccagactgagactgcagaagagaggcaccggcggcgtggacaccgccgccgtgggcagcgtgttcgacgtgagcaacgccgacagactgggcagcagcgaggtggagcaggtgcagctggtggtggacggcgtgaagctgatggtggagatggagaagaagctggagaagggccagagcatcgacgacatgatccccgcccagaagtag

SEQ ID NO: 9238 - DNA, 300 bp, Homo sapiens
  source 1..300: mol_type = genomic DNA
atggcccagggccagagaaagttccaggcccacaagcccgccaagagcaagaccgccgccgccgccagcgagaagaacagaggccccagaaagggcggcagagtgatcgcccccaagaaggccagagtggtgcagcagcagaagctgaagaagaacctggaggtgggcatcagaaagaagatcgagcacgacgtggtgatgaaggccagcagcagcctgcccaagaagctggccctgctgaaggcccccgccaagaagaagggcgccgccgccgccaccagcagcaagacccccagctag

SEQ ID NO: 9239 - DNA, 1491 bp, Homo sapiens
  source 1..1491: mol_type = genomic DNA
atggacgacgtgcccgcccccacccccgcccccgccccccccgccgccgccgcccccagagtgcccttccactgcagcgagtgcggcaagagcttcagatacagaagcgacctgagaagacacttcgccagacacaccgccctgaagccccacgcctgccccagatgcggcaagggcttcaagcacagcttcaacctggccaaccacctgagaagccacaccggcgagagaccctacagatgcagcgcctgccccaagggcttcagagacagcaccggcctgctgcaccaccaggtggtgcacaccggcgagaagccctactgctgcctggtgtgcgagctgagattcagcagcagaagcagcctgggcagacacctgaagagacagcacagaggcgtgctgcccagccccctgcagcccggccccggcctgcccgccctgagcgccccctgcagcgtgtgctgcaacgtgggcccctgcagcgtgtgcggcggcagcggcgccggcggcggcgagggccccgagggcgccggcgccggcctgggcagctggggcctggccgaggccgccgccgccgccgccgccagcctgccccccttcgcctgcggcgcctgcgccagaagattcgaccacggcagagagctggccgcccactgggccgcccacaccgacgtgaagcccttcaagtgccccagatgcgagagagacttcaacgcccccgccctgctggagagacacaagctgacccacgacctgcagggccccggcgccccccccgcccaggcctgggccgccggccccggcgccggccccgagaccgccggcgagggcaccgccgccgaggccggcgacgcccccctggccagcgacagaagactgctgctgggccccgccggcggcggcgtgcccaagctgggcggcctgctgcccgagggcggcggcgaggcccccgcccccgccgccgccgccgagcccagcgaggacaccctgtaccagtgcgactgcggcaccttcttcgccagcgccgccgccctggccagccacctggaggcccacagcggccccgccacctacggctgcggccactgcggcgccctgtacgccgccctggccgccctggaggagcacagaagagtgagccacggcgagggcggcggcgaggaggccgccaccgccgccagagagagagagcccgccagcggcgagccccccagcggcagcggcagaggcaagaagatcttcggctgcagcgagtgcgagaagctgttcagaagccccagagacctggagagacacgtgctggtgcacaccggcgagaagcccttcccctgcctggagtgcggcaagttcttcagacacgagtgctacctgaagagacacagactgctgcacggcaccgagagacccttcccctgccacatctgcggcaagggcttcatcaccctgagcaacctgagcagacacctgaagctgcacagaggcatggactag

SEQ ID NO: 9240 - DNA, 663 bp, Homo sapiens
  source 1..663: mol_type = genomic DNA
atgaagagcgtgatctaccacgccctgagccagaaggaggccaacgacagcgacgtgcagcccagcggcgcccagagagccgaggccttcgtgagagccttcctgaagagaagcacccccagaatgagcccccaggccagagaggaccagctgcagagaaaggccgtggtgctggagtacttcaccagacacaagagaaaggagaagaagaagaaggccaagggcctgagcgccagacagagaagagagctgagactgttcgacatcaagcccgagcagcagagatacagcctgttcctgcccctgcacgagctgtggaagcagtacatcagagacctgtgcagcggcctgaagcccgacacccagccccagatgatccaggccaagctgctgaaggccgacctgcacggcgccatcatcagcgtgaccaagagcaagtgccccagctacgtgggcatcaccggcatcctgctgcaggagaccaagcacatcttcaagatcatcaccaaggaggacagactgaaggtgatccccaagctgaactgcgtgttcaccgtggagaccgacggcttcatcagctacatctacggcagcaagttccagctgagaagcagcgagagaagcgccaagaagttcaaggccaagggcaccatcgacctgtag

SEQ ID NO: 9241 - DNA, 768 bp, Homo sapiens
  source 1..768: mol_type = genomic DNA
atggccagagccaaggccctgctgggcggccccggcgaggagctggaggccgacaccgagtacctggaccccttcgacgcccagccccaccccgccccccccgacgacggctacatggagccctacgacgcccagtgggtgatgagcgagctgcccggcagaggcgtgcagctgtacgacaccccctacgaggagcaggaccccgagaccgccgacggcccccccagcggccagaagcccagacagagcagaatgccccaggaggacgagagacccgccgacgagtacgaccagccctgggagtggaagaaggaccacatcagcagagccttcgccgtgcagttcgacagccccgagtgggagagaacccccggcagcgccaaggagctgagaagacccccccccagaagcccccagcccgccgagagagtggaccccgccctgcccctggagaagcagccctggttccacggccccctgaacagagccgacgccgagagcctgctgagcctgtgcaaggagggcagctacctggtgagactgagcgagaccaacccccaggactgcagcctgagcctgagaagcagccagggcttcctgcacctgaagttcgccagaaccagagagaaccaggtggtgctgggccagcacagcggccccttccccagcgtgcccgagctggtgctgcactacagcagcagacccctgcccgtgcagggcgccgagcacctggccctgctgtaccccgtggtgacccagaccccctag

SEQ ID NO: 9242 - DNA, 858 bp, Homo sapiens
  source 1..858: mol_type = genomic DNA
atgagcgacgacttcctgtggttcgagggcatcgccttccccaccatgggcttcagaagcgagaccctgagaaaggtgagagacgagttcgtgatcagagacgaggacgtgatcatcctgacctaccccaagagcggcaccaactggctggccgagatcctgtgcctgatgcacagcaagggcgacgccaagtggatccagagcgtgcccatctgggagagaagcccctgggtggagagcgagatcggctacaccgccctgagcgagaccgagagccccagactgttcagcagccacctgcccatccagctgttccccaagagcttcttcagcagcaaggccaaggtgatctacctgatgagaaaccccagagacgtgctggtgagcggctacttcttctggaagaacatgaagttcatcaagaagcccaagagctgggaggagtacttcgagtggttctgccagggcaccgtgctgtacggcagctggttcgaccacatccacggctggatgcccatgagagaggagaagaacttcctgctgctgagctacgaggagctgaagcaggacaccggcagaaccatcgagaagatctgccagttcctgggcaagaccctggagcccgaggagctgaacctgatcctgaagaacagcagcttccagagcatgaaggagaacaagatgagcaactacagcctgctgagcgtggactacgtggtggacaaggcccagctgctgagaaagggcgtgagcggcgactggaagaaccacttcaccgtggcccaggccgaggacttcgacaagctgttccaggagaagatggccgacctgcccagagagctgttcccctgggagtag

SEQ ID NO: 9243 - DNA, 1647 bp, Homo sapiens
  source 1..1647: mol_type = genomic DNA
atgaagacccccgccgacaccggcttcgccttccccgactgggcctacaagcccgagagcagccccggcagcagacagatccagctgtggcacttcatcctggagctgctgagaaaggaggagtaccagggcgtgatcgcctggcagggcgactacggcgagttcgtgatcaaggaccccgacgaggtggccagactgtggggcgtgagaaagtgcaagccccagatgaactacgacaagctgagcagagccctgagatactactacaacaagagaatcctgcacaagaccaagggcaagagattcacctacaagttcaacttcaacaagctggtgctggtgaactaccccttcatcgacgtgggcctggccggcggcgccgtgccccagagcgccccccccgtgcccagcggcggcagccacttcagattcccccccagcacccccagcgaggtgctgagccccaccgaggaccccagaagcccccccgcctgcagcagcagcagcagcagcctgttcagcgccgtggtggccagaagactgggcagaggcagcgtgagcgactgcagcgacggcaccagcgagctggaggagcccctgggcgaggaccccagagccagaccccccggcccccccgacctgggcgccttcagaggcccccccctggccagactgccccacgaccccggcgtgttcagagtgtaccccagacccagaggcggccccgagcccctgagccccttccccgtgagccccctggccggccccggcagcctgctgcccccccagctgagccccgccctgcccatgacccccacccacctggcctacacccccagccccaccctgagccccatgtaccccagcggcggcggcggccccagcggcagcggcggcggcagccacttcagcttcagccccgaggacatgaagagatacctgcaggcccacacccagagcgtgtacaactaccacctgagccccagagccttcctgcactaccccggcctggtggtgccccagccccagagacccgacaagtgccccctgccccccatggcccccgagaccccccccgtgcccagcagcgccagcagcagcagcagcagcagcagcagccccttcaagttcaagctgcagcccccccccctgggcagaagacagagagccgccggcgagaaggccgtggccggcgccgacaagagcggcggcagcgccggcggcctggccgagggcgccggcgccctggcccccccccccccccccccccagatcaaggtggagcccatcagcgagggcgagagcgaggaggtggaggtgaccgacatcagcgacgaggacgaggaggacggcgaggtgttcaagacccccagagccccccccgccccccccaagcccgagcccggcgaggcccccggcgccagccagtgcatgcccctgaagctgagattcaagagaagatggagcgaggactgcagactggagggcggcggcggccccgccggcggcttcgaggacgagggcgaggacaagaaggtgagaggcgagggccccggcgaggccggcggccccctgacccccagaagagtgagcagcgacctgcagcacgccaccgcccagctgagcctggagcacagagacagctag

SEQ ID NO: 9244 - DNA, 1530 bp, Homo sapiens
  source 1..1530: mol_type = genomic DNA
atgggcgtgctgaagttcaagcacatcttcttcagaagcttcgtgaagagcagcggcgtgagccagatcgtgttcaccttcctgctgatcccctgctgcctgaccctgaacttcagagccccccccgtgatccccaacgtgcccttcctgtgggcctggaacgcccccagcgagttctgcctgggcaagttcgacgagcccctggacatgagcctgttcagcttcatcggcagccccagaatcaacgccaccggccagggcgtgaccatcttctacgtggacagactgggctactacccctacatcgacagcatcaccggcgtgaccgtgaacggcggcatcccccagaagatcagcctgcaggaccacctggacaaggccaagaaggacatcaccttctacatgcccgtggacaacctgggcatggccgtgatcgactgggaggagtggagacccacctgggccagaaactggaagcccaaggacgtgtacaagaacagaagcatcgagctggtgcagcagcagaacgtgcagctgagcctgaccgaggccaccgagaaggccaagcaggagttcgagaaggccggcaaggacttcctggtggagaccatcaagctgggcaagctgctgagacccaaccacctgtggggctactacctgttccccgactgctacaaccaccactacaagaagcccggctacaacggcagctgcttcaacgtggagatcaagagaaacgacgacctgagctggctgtggaacgagagcaccgccctgtaccccagcatctacctgaacacccagcagagccccgtggccgccaccctgtacgtgagaaacagagtgagagaggccatcagagtgagcaagatccccgacgccaagagccccctgcccgtgttcgcctacaccagaatcgtgttcaccgaccaggtgctgaagttcctgagccaggacgagctggtgtacaccttcggcgagaccgtggccctgggcgccagcggcatcgtgatctggggcaccctgagcatcatgagaagcatgaagagctgcctgctgctggacaactacatggagaccatcctgaacccctacatcatcaacgtgaccctggccgccaagatgtgcagccaggtgctgtgccaggagcagggcgtgtgcatcagaaagaactggaacagcagcgactacctgcacctgaaccccgacaacttcgccatccagctggagaagggcggcaagttcaccgtgagaggcaagcccaccctggaggacctggagcagttcagcgagaagttctactgcagctgctacagcaccctgagctgcaaggagaaggccgacgtgaaggacaccgacgccgtggacgtgtgcatcgccgacggcgtgtgcatcgacgccttcctgaagccccccatggagaccgaggagccccagatcttctacaacgccagccccagcaccctgagcgccaccatgttcatcgtgagcatcctgttcctgatcatcagcagcgtggccagcctgtag

SEQ ID NO: 9245 - DNA, 1041 bp, Homo sapiens
  source 1..1041: mol_type = genomic DNA
atggagacccagctgagcaacggccccacctgcaacaacaccgccaacggccccaccaccatcaacaacaactgcagcagccccgtggacagcggcaacaccgaggacagcaagaccaacctgatcgtgaactacctgccccagaacatgacccaggaggagctgaagagcctgttcggcagcatcggcgagatcgagagctgcaagctggtgagagacaagatcaccggccagagcctgggctacggcttcgtgaactacatcgaccccaaggacgccgagaaggccatcaacaccctgaacggcctgagactgcagaccaagaccatcaaggtgagctacgccagacccagcagcgccagcatcagagacgccaacctgtacgtgagcggcctgcccaagaccatgacccagaaggagctggagcagctgttcagccagtacggcagaatcatcaccagcagaatcctggtggaccaggtgaccggcatcagcagaggcgtgggcttcatcagattcgacaagagaatcgaggccgaggaggccatcaagggcctgaacggccagaagccccccggcgccaccgagcccatcaccgtgaagttcgccaacaaccccagccagaagaccaaccaggccatcctgagccagctgtaccagagccccaacagaagataccccggccccctggcccagcaggcccagagattcagattcagccccatgaccatcgacggcatgaccagcctggccggcatcaacatccccggccaccccggcaccggctggtgcatcttcgtgtacaacctggcccccgacgccgacgagagcatcctgtggcagatgttcggccccttcggcgccgtgaccaacgtgaaggtgatcagagacttcaacaccaacaagtgcaagggcttcggcttcgtgaccatgaccaactacgacgaggccgccatggccatcgccagcctgaacggctacagactgggcgacagagtgctgcaggtgagcttcaagaccaacaagacccacaaggcctag

SEQ ID NO: 9246 - DNA, 1437 bp, Homo sapiens
  source 1..1437: mol_type = genomic DNA
atggcccacgtgcccgccagaaccagccccggccccggcccccagctgctgctgctgctgctgcccctgttcctgctgctgctgagagacgtggccggcagccacagagcccccgcctggagcgccctgcccgccgccgccgacggcctgcagggcgacagagacctgcagagacaccccggcgacgccgccgccaccctgggccccagcgcccaggacatggtggccgtgcacatgcacagactgtacgagaagtacagcagacagggcgccagacccggcggcggcaacaccgtgagaagcttcagagccagactggaggtggtggaccagaaggccgtgtacttcttcaacctgaccagcatgcaggacagcgagatgatcctgaccgccaccttccacttctacagcgagccccccagatggcccagagccctggaggtgctgtgcaagcccagagccaagaacgccagcggcagacccctgcccctgggcccccccaccagacagcacctgctgttcagaagcctgagccagaacaccgccacccagggcctgctgagaggcgccatggccctggcccccccccccagaggcctgtggcaggccaaggacatcagccccatcgtgaaggccgccagaagagacggcgagctgctgctgagcgcccagctggacagcgaggagagagaccccggcgtgcccagacccagcccctacgccccctacatcctggtgtacgccaacgacctggccatcagcgagcccaacagcgtggccgtgaccctgcagagatacgaccccttccccgccggcgaccccgagcccagagccgcccccaacaacagcgccgaccccagagtgagaagagccgcccaggccaccggccccctgcaggacaacgagctgcccggcctggacgagagaccccccagagcccacgcccagcacttccacaagcaccagctgtggcccagccccttcagagccctgaagcccagacccggcagaaaggacagaagaaagaagggccaggaggtgttcatggccgccagccaggtgctggacttcgacgagaagaccatgcagaaggccagaagaaagcagtgggacgagcccagagtgtgcagcagaagatacctgaaggtggacttcgccgacatcggctggaacgagtggatcatcagccccaagagcttcgacgcctactactgcgccggcgcctgcgagttccccatgcccaagatcgtgagacccagcaaccacgccaccatccagagcatcgtgagagccgtgggcatcatccccggcatccccgagccctgctgcgtgcccgacaagatgaacagcctgggcgtgctgttcctggacgagaacagaaacgtggtgctgaaggtgtaccccaacatgagcgtggacacctgcgcctgcagatag

SEQ ID NO: 9247 - DNA, 978 bp, Homo sapiens
  source 1..978: mol_type = genomic DNA
atggagagcaagatgggcgagctgcccctggacatcaacatccaggagcccagatgggaccagagcaccttcctgggcagagccagacacttcttcaccgtgaccgaccccagaaacctgctgctgagcggcgcccagctggaggccagcagaaacatcgtgcagaactacagagccggcgtggtgacccccggcatcaccgaggaccagctgtggagagccaagtacgtgtacgacagcgccttccaccccgacaccggcgagaaggtggtgctgatcggcagaatgagcgcccaggtgcccatgaacatgaccatcaccggctgcatgctgaccttctacagaaagacccccaccgtggtgttctggcagtgggtgaaccagagcttcaacgccatcgtgaactacagcaacagaagcggcgacacccccatcaccgtgagacagctgggcaccgcctacgtgagcgccaccaccggcgccgtggccaccgccctgggcctgaagagcctgaccaagcacctgccccccctggtgggcagattcgtgcccttcgccgccgtggccgccgccaactgcatcaacatccccctgatgagacagagagagctgcaggtgggcatccccgtggccgacgaggccggccagagactgggctacagcgtgaccgccgccaagcagggcatcttccaggtggtgatcagcagaatctgcatggccatccccgccatggccatcccccccctgatcatggacaccctggagaagaaggacttcctgaagagaagaccctggctgggcgcccccctgcaggtgggcctggtgggcttctgcctggtgttcgccacccccctgtgctgcgccctgttcccccagaagagcagcatccacatcagcaacctggagcccgagctgagagcccagatccacgagcagaaccccagcgtggaggtggtgtactacaacaagggcctgtag

SEQ ID NO: 9248 - DNA, 1068 bp, Homo sapiens
  source 1..1068: mol_type = genomic DNA
atggagccccacctgctgggcctgctgctgggcctgctgctgggcggcaccagagtgctggccggctaccccatctggtggagcctggccctgggccagcagtacaccagcctgggcagccagcccctgctgtgcggcagcatccccggcctggtgcccaagcagctgagattctgcagaaactacatcgagatcatgcccagcgtggccgagggcgtgaagctgggcatccaggagtgccagcaccagttcagaggcagaagatggaactgcaccaccatcgacgacagcctggccatcttcggccccgtgctggacaaggccaccagagagagcgccttcgtgcacgccatcgccagcgccggcgtggccttcgccgtgaccagaagctgcgccgagggcaccagcaccatctgcggctgcgacagccaccacaagggcccccccggcgagggctggaagtggggcggctgcagcgaggacgccgacttcggcgtgctggtgagcagagagttcgccgacgccagagagaacagacccgacgccagaagcgccatgaacaagcacaacaacgaggccggcagaaccaccatcctggaccacatgcacctgaagtgcaagtgccacggcctgagcggcagctgcgaggtgaagacctgctggtgggcccagcccgacttcagagccatcggcgacttcctgaaggacaagtacgacagcgccagcgagatggtggtggagaagcacagagagagcagaggctgggtggagaccctgagagccaagtacagcctgttcaagccccccaccgagagagacctggtgtactacgagaacagccccaacttctgcgagcccaaccccgagaccggcagcttcggcaccagagacagaacctgcaacgtgaccagccacggcatcgacggctgcgacctgctgtgctgcggcagaggccacaacaccagaaccgagaagagaaaggagaagtgccactgcatcttccactggtgctgctacgtgagctgccaggagtgcatcagaatctacgacgtgcacacctgcaagtag

SEQ ID NO: 9249 - DNA, 1437 bp, Homo sapiens
  source 1..1437: mol_type = genomic DNA
atggccgccagacccatcaccctgggcatcgacctgggcaccaccagcgtgaaggccgccctgctgagagccgcccccgacgaccccagcggcttcgccgtgctggccagctgcgccagagccgccagagccgaggccgccgtggagagcgccgtggccggcccccagggcagagagcaggacgtgagcagaatcctgcaggccctgcacgagtgcctggccgccctgcccagaccccagctgagaagcgtggtgggcatcggcgtgagcggccagatgcacggcgtggtgttctggaagaccggccagggctgcgagtggaccgagggcggcatcacccccgtgttcgagcccagagccgtgagccacctggtgacctggcaggacggcagatgcagcagcgagttcctggccagcctgccccagcccaagagccacctgagcgtggccaccggcttcggctgcgccaccatcttctggctgctgaagtacagacccgagttcctgaagagctacgacgccgccggcaccatccacgactacgtggtggccatgctgtgcggcctgcccagacccctgatgagcgaccagaacgccgccagctggggctacttcaacacccagagccagagctggaacgtggagaccctgagaagcagcggcttccccgtgcacctgctgcccgacatcgccgagcccggcagcgtggccggcagaaccagccacatgtggttcgagatccccaagggcacccaggtgggcgtggccctgggcgacctgcaggccagcgtgtacagctgcatggcccagagaaccgacgccgtgctgaacatcagcaccagcgtgcagctggccgccagcatgcccagcggcttccagcccgcccagacccccgaccccaccgcccccgtggcctacttcccctacttcaacagaacctacctgggcgtggccgccagcctgaacggcggcaacgtgctggccaccttcgtgcacatgctggtgcagtggatggccgacctgggcctggaggtggaggagagcaccgtgtacagcagaatgatccaggccgccgtgcagcagagagacacccacctgaccatcacccccaccgtgctgggcgagagacacctgcccgaccagctggccagcgtgaccagaatcagcagcagcgacctgagcctgggccacgtgaccagagccctgtgcagaggcatcgtgcagaacctgcacagcatgctgcccatccagcagctgcaggactggggcgtggagagagtgatgggcagcggcagcgccctgagcagaaacgacgtgctgaagcaggaggtgcagagagccttccccctgcccatgagcttcggccaggacgtggacgccgccgtgggcgccgccctggtgatgctgagaagacacctgaaccagaaggagagctag

SEQ ID NO: 9250 - DNA, 1578 bp, Homo sapiens
  source 1..1578: mol_type = genomic DNA
atgagaagaagaagaagaagagacggcttctaccccgcccccgacttcagagacagagaggccgaggacatggccggcgtgttcgacatcgacctggaccagcccgaggacgccggcagcgaggacgagctggaggagggcggccagctgaacgagagcatggaccacggcggcgtgggcccctacgagctgggcatggagcactgcgagaagttcgagatcagcgagaccagcgtgaacagaggccccgagaagatcagacccgagtgcttcgagctgctgagagtgctgggcaagggcggctacggcaaggtgttccaggtgagaaaggtgaccggcgccaacaccggcaagatcttcgccatgaaggtgctgaagaaggccatgatcgtgagaaacgccaaggacaccgcccacaccaaggccgagagaaacatcctggaggaggtgaagcaccccttcatcgtggacctgatctacgccttccagaccggcggcaagctgtacctgatcctggagtacctgagcggcggcgagctgttcatgcagctggagagagagggcatcttcatggaggacaccgcctgcttctacctggccgagatcagcatggccctgggccacctgcaccagaagggcatcatctacagagacctgaagcccgagaacatcatgctgaaccaccagggccacgtgaagctgaccgacttcggcctgtgcaaggagagcatccacgacggcaccgtgacccacaccttctgcggcaccatcgagtacatggcccccgagatcctgatgagaagcggccacaacagagccgtggactggtggagcctgggcgccctgatgtacgacatgctgaccggcgccccccccttcaccggcgagaacagaaagaagaccatcgacaagatcctgaagtgcaagctgaacctgcccccctacctgacccaggaggccagagacctgctgaagaagctgctgaagagaaacgccgccagcagactgggcgccggccccggcgacgccggcgaggtgcaggcccaccccttcttcagacacatcaactgggaggagctgctggccagaaaggtggagccccccttcaagcccctgctgcagagcgaggaggacgtgagccagttcgacagcaagttcaccagacagacccccgtggacagccccgacgacagcaccctgagcgagagcgccaaccaggtgttcctgggcttcacctacgtggcccccagcgtgctggagagcgtgaaggagaagttcagcttcgagcccaagatcagaagccccagaagattcatcggcagccccagaacccccgtgagccccgtgaagttcagccccggcgacttctggggcagaggcgccagcgccagcaccgccaacccccagacccccgtggagtaccccatggagaccagcggcatcgagcagatggacgtgaccatgagcggcgaggccagcgcccccctgcccatcagacagcccaacagcggcccctacaagaagcaggccttccccatgatcagcaagagacccgagcacctgagaatgaacctgtag

SEQ ID NO: 9251 - DNA, 987 bp, Homo sapiens
  source 1..987: mol_type = genomic DNA
atggccagaaccgtggtgctgatcaccggctgcagcagcggcatcggcctgcacctggccgtgagactggccagcgaccccagccagagcttcaaggtgtacgccaccctgagagacctgaagacccagggcagactgtgggaggccgccagagccctggcctgcccccccggcagcctggagaccctgcagctggacgtgagagacagcaagagcgtggccgccgccagagagagagtgaccgagggcagagtggacgtgctggtgtgcaacgccggcctgggcctgctgggccccctggaggccctgggcgaggacgccgtggccagcgtgctggacgtgaacgtggtgggcaccgtgagaatgctgcaggccttcctgcccgacatgaagagaagaggcagcggcagagtgctggtgaccggcagcgtgggcggcctgatgggcctgcccttcaacgacgtgtactgcgccagcaagttcgccctggagggcctgtgcgagagcctggccgtgctgctgctgcccttcggcgtgcacctgagcctgatcgagtgcggccccgtgcacaccgccttcatggagaaggtgctgggcagccccgaggaggtgctggacagaaccgacatccacaccttccacagattctaccagtacctggcccacagcaagcaggtgttcagagaggccgcccagaaccccgaggaggtggccgaggtgttcctgaccgccctgagagcccccaagcccaccctgagatacttcaccaccgagagattcctgcccctgctgagaatgagactggacgaccccagcggcagcaactacgtgaccgccatgcacagagaggtgttcggcgacgtgcccgccaaggccgaggccggcgccgaggccggcggcggcgccggccccggcgccgaggacgaggccggcagaggcgccgtgggcgaccccgagctgggcgacccccccgccgccccccagtag

SEQ ID NO: 9252 - DNA, 1626 bp, Homo sapiens
  source 1..1626: mol_type = genomic DNA
atgcccggcctgagaagagacagactgctgaccctgctgctgctgggcgccctgctgagcgccgacctgtacttccacctgtggccccaggtgcagagacagctgagacccagagagagacccagaggctgcccctgcaccggcagagccagcagcctggccagagacagcgccgccgccgccagcgaccccggcaccatcgtgcacaacttcagcagaaccgagcccagaaccgagcccgccggcggcagccacagcggcagcagcagcaagctgcaggccctgttcgcccaccccctgtacaacgtgcccgaggagccccccctgctgggcgccgaggacagcctgctggccagccaggaggccctgagatactacagaagaaaggtggccagatggaacagaagacacaagatgtacagagagcagatgaacctgaccagcctggacccccccctgcagctgagactggaggccagctgggtgcagttccacctgggcatcaacagacacggcctgtacagcagaagcagccccgtggtgagcaagctgctgcaggacatgagacacttccccaccatcagcgccgactacagccaggacgagaaggccctgctgggcgcctgcgactgcacccagatcgtgaagcccagcggcgtgcacctgaagctggtgctgagattcagcgacttcggcaaggccatgttcaagcccatgagacagcagagagacgaggagacccccgtggacttcttctacttcatcgacttccagagacacaacgccgagatcgccgccttccacctggacagaatcctggacttcagaagagtgccccccaccgtgggcagaatcgtgaacgtgaccaaggagatcctggaggtgaccaagaacgagatcctgcagagcgtgttcttcgtgagccccgccagcaacgtgtgcttcttcgccaagtgcccctacatgtgcaagaccgagtacgccgtgtgcggcaacccccacctgctggagggcagcctgagcgccttcctgcccagcctgaacctggcccccagactgagcgtgcccaacccctggatcagaagctacaccctggccggcaaggaggagtgggaggtgaaccccctgtactgcgacaccgtgaagcagatctacccctacaacaacagccagagactgctgaacgtgatcgacatggccatcttcgacttcctgatcggcaacatggacagacaccactacgagatgttcaccaagttcggcgacgacggcttcctgatccacctggacaacgccagaggcttcggcagacacagccacgacgagatcagcatcctgagccccctgagccagtgctgcatgatcaagaagaagaccctgctgcacctgcagctgctggcccaggccgactacagactgagcgacgtgatgagagagagcctgctggaggaccagctgagccccgtgctgaccgagccccacctgctggccctggacagaagactgcagaccatcctgagaaccgtggagggctgcatcgtggcccacggccagcagagcgtgatcgtggacggccccgtggagcagctggcccccgacagcggccaggccaacctgaccagctag

SEQ ID NO: 9253 - DNA, 954 bp, Homo sapiens
  source 1..954: mol_type = genomic DNA
atgaagaccgccctgatcctgctgagcatcctgggcatggcctgcgccttcagcatgaagaacctgcacagaagagtgaagatcgaggacagcgaggagaacggcgtgttcaagtacagacccagatactacctgtacaagcacgcctacttctacccccacctgaagagattccccgtgcagggcagcagcgacagcagcgaggagaacggcgacgacagcagcgaggaggaggaggaggaggaggagaccagcaacgagggcgagaacaacgaggagagcaacgaggacgaggacagcgaggccgagaacaccaccctgagcgccaccaccctgggctacggcgaggacgccacccccggcaccggctacaccggcctggccgccatccagctgcccaagaaggccggcgacatcaccaacaaggccaccaaggagaaggagagcgacgaggaggaggaggaggaggaggagggcaacgagaacgaggagagcgaggccgaggtggacgagaacgagcagggcatcaacggcaccagcaccaacagcaccgaggccgagaacggcaacggcagcagcggcggcgacaacggcgaggagggcgaggaggagagcgtgaccggcgccaacgccgaggacaccaccgagaccggcagacagggcaagggcaccagcaagaccaccaccagccccaacggcggcttcgagcccaccacccccccccaggtgtacagaaccaccagcccccccttcggcaagaccaccaccgtggagtacgagggcgagtacgagtacaccggcgccaacgagtacgacaacggctacgagatctacgagagcgagaacggcgagcccagaggcgacaactacagagcctacgaggacgagtacagctacttcaagggccagggctacgacggctacgacggccagaactactaccaccaccagtag

SEQ ID NO: 9254 - DNA, 345 bp, Homo sapiens
  source 1..345: mol_type = genomic DNA
atgagcctgcccagcagcagagccgccagagtgcccggccccagcggcagcctgtgcgccctgctggccctgctgctgctgctgaccccccccggccccctggccagcgccggccccgtgagcgccgtgctgaccgagctgagatgcacctgcctgagagtgaccctgagagtgaaccccaagaccatcggcaagctgcaggtgttccccgccggcccccagtgcagcaaggtggaggtggtggccagcctgaagaacggcaagcaggtgtgcctggaccccgaggcccccttcctgaagaaggtgatccagaagatcctggacagcggcaacaagaagaactag

SEQ ID NO: 9255 - DNA, 2100 bp, Homo sapiens
  source 1..2100: mol_type = genomic DNA
atgcccagcctgtggagagagatcctgctggagagcctgctgggctgcgtgagctggagcctgtaccacgacctgggccccatgatctactacttccccctgcagaccctggagctgaccggcctggagggcttcagcatcgccttcctgagccccatcttcctgaccatcacccccttctggaagctggtgaacaagaagtggatgctgaccctgctgagaatcatcaccatcggcagcatcgccagcttccaggcccccaacgccaagctgagactgatggtgctggccctgggcgtgagcagcagcctgatcgtgcaggccgtgacctggtggagcggcagccacctgcagagatacctgagaatctggggcttcatcctgggccagatcgtgctggtggtgctgagaatctggtacaccagcctgaaccccatctggagctaccagatgagcaacaaggtgatcctgaccctgagcgccatcgccaccctggacagaatcggcaccgacggcgactgcagcaagcccgaggagaagaagaccggcgaggtggccaccggcatggccagcagacccaactggctgctggccggcgccgccttcggcagcctggtgttcctgacccactgggtgttcggcgaggtgagcctggtgagcagatgggccgtgagcggccacccccaccccggccccgaccccaaccccttcggcggcgccgtgctgctgtgcctggccagcggcctgatgctgcccagctgcctgtggttcagaggcaccggcctgatctggtgggtgaccggcaccgccagcgccgccggcctgctgtacctgcacacctgggccgccgccgtgagcggctgcgtgttcgccatcttcaccgccagcatgtggccccagaccctgggccacctgatcaacagcggcaccaaccccggcaagaccatgaccatcgccatgatcttctacctgctggagatcttcttctgcgcctggtgcaccgccttcaagttcgtgcccggcggcgtgtacgccagagagagaagcgacgtgctgctgggcaccatgatgctgatcatcggcctgaacatgctgttcggccccaagaagaacctggacctgctgctgcagaccaagaacagcagcaaggtgctgttcagaaagagcgagaagtacatgaagctgttcctgtggctgctggtgggcgtgggcctgctgggcctgggcctgagacacaaggcctacgagagaaagctgggcaaggtggcccccaccaaggaggtgagcgccgccatctggcccttcagattcggctacgacaacgagggctggagcagcctggagagaagcgcccacctgctgaacgagaccggcgccgacttcatcaccatcctggagagcgacgccagcaagccctacatgggcaacaacgacctgaccatgtggctgggcgagaagctgggcttctacaccgacttcggccccagcaccagataccacacctggggcatcatggccctgagcagataccccatcgtgaagagcgagcaccacctgctgcccagccccgagggcgagatcgcccccgccatcaccctgaccgtgaacatcagcggcaagctggtggacttcgtggtgacccacttcggcaaccacgaggacgacctggacagaaagctgcaggccatcgccgtgagcaagctgctgaagagcagcagcaaccaggtgatcttcctgggctacatcaccagcgcccccggcagcagagactacctgcagctgaccgagcacggcaacgtgaaggacatcgacagcaccgaccacgacagatggtgcgagtacatcatgtacagaggcctgatcagactgggctacgccagaatcagccacgccgagctgagcgacagcgagatccagatggccaagttcagaatccccgacgaccccaccaactacagagacaaccagaaggtggtgatcgaccacagagaggtgagcgagaagatccacttcaaccccagattcggcagctacaaggagggccacaactacgagaacaaccaccacttccacatgaacacccccaagtacttcctgtag

SEQ ID NO: 9256 - DNA, 1449 bp, Homo sapiens
  source 1..1449: mol_type = genomic DNA
atgctgttcgagggcaaggtgaacccccagacccagagcctgctggccgagtgcggcgagtggaccagaagaagcctgcacctgagagtgctgggcagacagctgatcctgcccaccgacaagggcgtgcagcacttccagggcagcacccccgccagcgccgtgcacagaccccccctgagcgcctgcggccacagcagcaacatcagagagctgtgcatcagcggcagccagatcgtgcccgccgccctgagcgccagcgccctgcccggccccgacgacaccggcgtggccgacctgaccgccagaagcagcctggaggaggaggtgtaccacgtggacggcaagatcgaggagtacttcgccttcgacagaaaggaggacgacgacgagtgcctggagcagaagcccgcccagcccggcagaaagtggagaaagctgggcctgccccccgtgagccccagagactgcgtgaaggacgccgtggccgccgaggtgttcgaccacgtgtggaccaacatggtggagctgctggaggagctgatcagaaagcactgggagaccaccctgaccgagggcaagaagcagagagagaccctgaaggtggccggcaacagattcccccacgtgctggtgccccacgcccacgccgacggcgccagcggcccccccagcggccacgccgaggcccacggcatcagcctggccagcagactgaaccccccccagatccaccacttcagcagcagcttctacagcgacatgaacggcgtgatgaccatccaggccaagcccctgcagagaagacccgcctacttcgccgacagaacccagaacgagaaggaggacaaggccagcggcggcggcgccggcgccctgagcagcgccccccacagactgggcagagccagcgacacccacggcctgagccccagcgccaagaagacccccgtgccctggagactgcccagcctggccagcgacagccagagactgaagacccccaacatctacagcgacgaggtgctgagaggcaccaagctgcccaccggcgtggaccacatggccagccccctggtgcagaccagcagaagcagattcccccccctggtgaccgagaccagaggccagaacaccgccgtgcccggctgcagactggtgagctacagaggcagacacctgcagaacagagtgctgagcgccatgcccgacggcaccgagagaagcagactgagagagagaaccgccaccctggagagactgagcagacccagcaccacccacaccttcagacagagcgacacccccagaaagagcagcctgacccagatggagttcgccgcccacacctggaccggccagagcatcctgaccggcagccagtacgtgcccaagagcttccagagaaccaccctgaccttcaagagaagattccaggtgaccagctag

SEQ ID NO: 9257 - DNA, 1392 bp, Homo sapiens
  source 1..1392: mol_type = genomic DNA
atgggcgccggccccagcctgctgctggccgccctgctgctgctgctgagcggcgacggcgccgtgagatgcgacacccccgccaactgcacctacctggacctgctgggcacctgggtgttccaggtgggcagcagcggcagccagagagacgtgaactgcagcgtgatgggcccccaggagaagaaggtggtggtgtacctgcagaagctggacaccgcctacgacgacctgggcaacagcggccacttcaccatcatctacaaccagggcttcgagatcgtgctgaacgactacaagtggttcgccttcttcaagtacaaggaggagggcagcaaggtgaccacctactgcaacgagaccatgaccggctgggtgcacgacgtgctgggcagaaactgggcctgcttcaccggcaagaaggtgggcaccgccagcgagaacgtgtacgtgaacatcgcccacctgaagaacagccaggagaagtacagcaacagactgtacaagtacgaccacaacttcgtgaaggccatcaacgccatccagaagagctggaccgccaccacctacatggagtacgagaccctgaccctgggcgacatgatcagaagaagcggcggccacagcagaaagatccccagacccaagcccgcccccctgaccgccgagatccagcagaagatcctgcacctgcccaccagctgggactggagaaacgtgcacggcatcaacttcgtgagccccgtgagaaaccaggccagctgcggcagctgctacagcttcgccagcatgggcatgctggaggccagaatcagaatcctgaccaacaacagccagacccccatcctgagcccccaggaggtggtgagctgcagccagtacgcccagggctgcgagggcggcttcccctacctgatcgccggcaagtacgcccaggacttcggcctggtggaggaggcctgcttcccctacaccggcaccgacagcccctgcaagatgaaggaggactgcttcagatactacagcagcgagtaccactacgtgggcggcttctacggcggctgcaacgaggccctgatgaagctggagctggtgcaccacggccccatggccgtggccttcgaggtgtacgacgacttcctgcactacaagaagggcatctaccaccacaccggcctgagagaccccttcaaccccttcgagctgaccaaccacgccgtgctgctggtgggctacggcaccgacagcgccagcggcatggactactggatcgtgaagaacagctggggcaccggctggggcgagaacggctacttcagaatcagaagaggcaccgacgagtgcgccatcgagagcatcgccgtggccgccacccccatccccaagctgtag

SEQ ID NO: 9258 - DNA, 1941 bp, Homo sapiens
  source 1..1941: mol_type = genomic DNA
atgagcaagggccccgccgtgggcatcgacctgggcaccacctacagctgcgtgggcgtgttccagcacggcaaggtggagatcatcgccaacgaccagggcaacagaaccacccccagctacgtggccttcaccgacaccgagagactgatcggcgacgccgccaagaaccaggtggccatgaaccccaccaacaccgtgttcgacgccaagagactgatcggcagaagattcgacgacgccgtggtgcagagcgacatgaagcactggcccttcatggtggtgaacgacgccggcagacccaaggtgcaggtggagtacaagggcgagaccaagagcttctaccccgaggaggtgagcagcatggtgctgaccaagatgaaggagatcgccgaggcctacctgggcaagaccgtgaccaacgccgtggtgaccgtgcccgcctacttcaacgacagccagagacaggccaccaaggacgccggcaccatcgccggcctgaacgtgctgagaatcatcaacgagcccaccgccgccgccatcgcctacggcctggacaagaaggtgggcgccgagagaaacgtgctgatcttcgacctgggcggcggcaccttcgacgtgagcatcctgaccatcgaggacggcatcttcgaggtgaagagcaccgccggcgacacccacctgggcggcgaggacttcgacaacagaatggtgaaccacttcatcgccgagttcaagagaaagcacaagaaggacatcagcgagaacaagagagccgtgagaagactgagaaccgcctgcgagagagccaagagaaccctgagcagcagcacccaggccagcatcgagatcgacagcctgtacgagggcatcgacttctacaccagcatcaccagagccagattcgaggagctgaacgccgacctgttcagaggcaccctggaccccgtggagaaggccctgagagacgccaagctggacaagagccagatccacgacatcgtgctggtgggcggcagcaccagaatccccaagatccagaagctgctgcaggacttcttcaacggcaaggagctgaacaagagcatcaaccccgacgaggccgtggcctacggcgccgccgtgcaggccgccatcctgagcggcgacaagagcgagaacgtgcaggacctgctgctgctggacgtgacccccctgagcctgggcatcgagaccgccggcggcgtgatgaccgtgctgatcaagagaaacaccaccatccccaccaagcagacccagaccttcaccacctacagcgacaaccagcccggcgtgctgatccaggtgtacgagggcgagagagccatgaccaaggacaacaacctgctgggcaagttcgagctgaccggcatcccccccgcccccagaggcgtgccccagatcgaggtgaccttcgacatcgacgccaacggcatcctgaacgtgagcgccgtggacaagagcaccggcaaggagaacaagatcaccatcaccaacgacaagggcagactgagcaaggaggacatcgagagaatggtgcaggaggccgagaagtacaaggccgaggacgagaagcagagagacaaggtgagcagcaagaacagcctggagagctacgccttcaacatgaaggccaccgtggaggacgagaagctgcagggcaagatcaacgacgaggacaagcagaagatcctggacaagtgcaacgagatcatcaactggctggacaagaaccagaccgccgagaaggaggagttcgagcaccagcagaaggagctggagaaggtgtgcaaccccatcatcaccaagctgtaccagagcgccggcggcatgcccggcggcatgcccggcggcttccccggcggcggcgccccccccagcggcggcgccagcagcggccccaccatcgaggaggtggactag

SEQ ID NO: 9259 - DNA, 1017 bp, Homo sapiens
  source 1..1017: mol_type = genomic DNA
atgtgggaggccaaccccgagatgttccacaaggccgaggagctgttcagcaagaccaccaacaacgaggtggacgacatggacaccagcgacacccagtggggctggttctacctggccgagtgcggcaagtggcacatgttccagcccgacaccaacagccagtgcagcgtgagcagcgaggacatcgagaagagcttcaagaccaacccctgcggcagcatcagcttcaccaccagcaagttcagctacaagatcgacttcgccgagatgaagcagatgaacctgaccaccggcaagcagagactgatcaagagagcccccttcagcatcagcgccttcagctacatctgcgagaacgaggccatccccatgcccccccactgggagaacgtgaacacccaggtgccctaccagctgatccccctgcacaaccagacccacgagtacaacgaggtggccaacctgttcggcaagaccatggacagaaacagaatcaagagaatccagagaatccagaacctggacctgtgggagttcttctgcagaaagaaggcccagctgaagaagaagagaggcgtgccccagatcaacgagcagatgctgttccacggcaccagcagcgagttcgtggaggccatctgcatccacaacttcgactggagaatcaacggcatccacggcgccgtgttcggcaagggcacctacttcgccagagacgccgcctacagcagcagattctgcaaggacgacatcaagcacggcaacaccttccagatccacggcgtgagcctgcagcagagacacctgttcagaacctacaagagcatgttcctggccagagtgctgatcggcgactacatcaacggcgacagcaagtacatgagaccccccagcaaggacggcagctacgtgaacctgtacgacagctgcgtggacgacacctggaaccccaagatcttcgtggtgttcgacgccaaccagatctaccccgagtacctgatcgacttccactag

SEQ ID NO: 9260 - DNA, 1059 bp, Homo sapiens
  source 1..1059: mol_type = genomic DNA
atggtgagacccgtgagacacaagaagcccgtgaactacagccagttcgaccacagcgacagcgacgacgacttcgtgagcgccaccgtgcccctgaacaagaagagcagaaccgcccccaaggagctgaagcaggacaagcccaagcccaacctgaacaacctgagaaaggaggagatccccgtgcaggagaagacccccaagaagagactgcccgagggcaccttcagcatccccgccagcgccgtgccctgcaccaagatggccctggacgacaagctgtaccagagagacctggaggtggccctggccctgagcgtgaaggagctgcccaccgtgaccaccaacgtgcagaacagccaggacaagagcatcgagaagcacggcagcagcaagatcgagaccatgaacaagagcccccacatcagcaactgcagcgtggccagcgactacctggacctggacaagatcaccgtggaggacgacgtgggcggcgtgcagggcaagagaaaggccgccagcaaggccgccgcccagcagagaaagatcctgctggagggcagcgacggcgacagcgccaacgacaccgagcccgacttcgcccccggcgaggacagcgaggacgacagcgacttctgcgagagcgaggacaacgacgaggacttcagcatgagaaagagcaaggtgaaggagatcaagaagaaggaggtgaaggtgaagagccccgtggagaagaaggagaagaagagcaagagcaagtgcaacgccctggtgaccagcgtggacagcgcccccgccgccgtgaagagcgagagccagagcctgcccaagaaggtgagcctgagcagcgacaccaccagaaagcccctggagatcagaagccccagcgccgagagcaagaagcccaagtgggtgccccccgccgccagcggcggcagcagaagcagcagcagccccctggtggtggtgagcgtgaagagccccaaccagagcctgagactgggcctgagcagactggccagagtgaagcccctgcaccccaacgccaccagcacctag

SEQ ID NO: 9261 - DNA, 1488 bp, Homo sapiens
  source 1..1488: mol_type = genomic DNA
atgaccgtgatgagcggcgagaacgtggacgaggccagcgccgcccccggccacccccaggacggcagctaccccagacaggccgaccacgacgaccacgagtgctgcgagagagtggtgatcaacatcagcggcctgagattcgagacccagctgaagaccctggcccagttccccaacaccctgctgggcaaccccaagaagagaatgagatacttcgaccccctgagaaacgagtacttcttcgacagaaacagacccagcttcgacgccatcctgtactactaccagagcggcggcagactgagaagacccgtgaacgtgcccctggacatgttcagcgaggagatcaagttctacgagctgggcgaggaggccatggagaagttcagagaggacgagggcttcatcaaggaggaggagagacccctgcccgagaaggagtaccagagacaggtgtggctgctgttcgagtaccccgagagcagcggccccgccagagtgatcgccatcgtgagcgtgatggtgatcctgatcagcatcgtgatcttctgcctggagaccctgcccgagctgaaggacgacaaggacttcaccggcaccgtgcacagaatcgacaacaccaccgtgatctacaacagcaacatcttcaccgaccccttcttcatcgtggagaccctgtgcatcatctggttcagcttcgagctggtggtgagattcttcgcctgccccagcaagaccgacttcttcaagaacatcatgaacttcatcgacatcgtggccatcatcccctacttcatcaccctgggcaccgagatcgccgagcaggagggcaaccagaagggcgagcaggccaccagcctggccatcctgagagtgatcagactggtgagagtgttcagaatcttcaagctgagcagacacagcaagggcctgcagatcctgggccagaccctgaaggccagcatgagagagctgggcctgctgatcttcttcctgttcatcggcgtgatcctgttcagcagcgccgtgtacttcgccgaggccgaggaggccgagagccacttcagcagcatccccgacgccttctggtgggccgtggtgagcatgaccaccgtgggctacggcgacatgtaccccgtgaccatcggcggcaagatcgtgggcagcctgtgcgccatcgccggcgtgctgaccatcgccctgcccgtgcccgtgatcgtgagcaacttcaactacttctaccacagagagaccgagggcgaggagcaggcccagctgctgcacgtgagcagccccaacctggccagcgacagcgacctgagcagaagaagcagcagcaccatgagcaagagcgagtacatggagatcgaggaggacatgaacaacagcatcgcccactacagacaggtgaacatcagaaccgccaactgcaccaccgccaaccagaactgcgtgaacaagagcaagctgctgaccgacgtgtag

SEQ ID NO: 9262 - DNA, 1632 bp, Homo sapiens
  source 1..1632: mol_type = genomic DNA
atgagaaagcccgccgccggcttcctgcccagcctgctgaaggtgctgctgctgcccctggcccccgccgccgcccaggacagcacccaggccagcacccccggcagccccctgagccccaccgagtacgagagattcttcgccctgctgacccccacctggaaggccgagaccacctgcagactgagagccacccacggctgcagaaaccccaccctggtgcagctggaccagtacgagaaccacggcctggtgcccgacggcgccgtgtgcagcaacctgccctacgccagctggttcgagagcttctgccagttcacccactacagatgcagcaaccacgtgtactacgccaagagagtgctgtgcagccagcccgtgagcatcctgagccccaacaccctgaaggagatcgaggccagcgccgaggtgagccccaccaccatgaccagccccatcagcccccacttcaccgtgaccgagagacagaccttccagccctggcccgagagactgagcaacaacgtggaggagctgctgcagagcagcctgagcctgggcggccaggagcaggcccccgagcacaagcaggagcagggcgtggagcacagacaggagcccacccaggagcacaagcaggaggagggccagaagcaggaggagcaggaggaggagcaggaggaggagggcaagcaggaggagggccagggcaccaaggagggcagagaggccgtgagccagctgcagaccgacagcgagcccaagttccacagcgagagcctgagcagcaaccccagcagcttcgcccccagagtgagagaggtggagagcacccccatgatcatggagaacatccaggagctgatcagaagcgcccaggagatcgacgagatgaacgagatctacgacgagaacagctactggagaaaccagaaccccggcagcctgctgcagctgccccacaccgaggccctgctggtgctgtgctacagcatcgtggagaacacctgcatcatcacccccaccgccaaggcctggaagtacatggaggaggagatcctgggcttcggcaagagcgtgtgcgacagcctgggcagaagacacatgagcacctgcgccctgtgcgacttctgcagcctgaagctggagcagtgccacagcgaggccagcctgcagagacagcagtgcgacaccagccacaagacccccttcgtgagccccctgctggccagccagagcctgagcatcggcaaccaggtgggcagccccgagagcggcagattctacggcctggacctgtacggcggcctgcacatggacttctggtgcgccagactggccaccaagggctgcgaggacgtgagagtgagcggctggctgcagaccgagttcctgagcttccaggacggcgacttccccaccaagatctgcgacaccgactacatccagtaccccaactactgcagcttcaagagccagcagtgcctgatgagaaacagaaacagaaaggtgagcagaatgagatgcctgcagaacgagacctacagcgccctgagccccggcaagagcgaggacgtggtgctgagatggagccaggagttcagcaccctgaccctgggccagttcggctag

SEQ ID NO: 9263 - DNA, 666 bp, Homo sapiens
  source 1..666: mol_type = genomic DNA
atgagcggctgggccgacgagagaggcggcgagggcgacggcagaatctacgtgggcaacctgcccaccgacgtgagagagaaggacctggaggacctgttctacaagtacggcagaatcagagagatcgagctgaagaacagacacggcctggtgcccttcgccttcgtgagattcgaggaccccagagacgccgaggacgccatctacggcagaaacggctacgactacggccagtgcagactgagagtggagttccccagaacctacggcggcagaggcggctggcccagaggcggcagaaacggcccccccaccagaagaagcgacttcagagtgctggtgagcggcctgccccccagcggcagctggcaggacctgaaggaccacatgagagaggccggcgacgtgtgctacgccgacgtgcagaaggacggcgtgggcatggtggagtacctgagaaaggaggacatggagtacgccctgagaaagctggacgacaccaagttcagaagccacgagggcgagaccagctacatcagagtgtaccccgagagaagcaccagctacggctacagcagaagcagaagcggcagcagaggcagagacagcccctaccagagcagaggcagcccccactacttcagccccttcagaccctactag

SEQ ID NO: 9264 - DNA, 2523 bp, Homo sapiens
  source 1..2523: mol_type = genomic DNA
atgagcgccttcagactgtggcccggcctgctgatcatgctgggcagcctgtgccacagaggcagcccctgcggcctgagcacccacgtggagatcggccacagagccctggagttcctgcagctgcacaacggcagagtgaactacagagagctgctgctggagcaccaggacgcctaccaggccggcatcgtgttccccgactgcttctaccccagcatctgcaagggcggcaagttccacgacgtgagcgagagcacccactggacccccttcctgaacgccagcgtgcactacatcagagagaactaccccctgccctgggagaaggacaccgagaagctggtggccttcctgttcggcatcaccagccacatggccgccgacgtgagctggcacagcctgggcctggagcagggcttcctgagaaccatgggcgccatcgacttccacggcagctacagcgaggcccacagcgccggcgacttcggcggcgacgtgctgagccagttcgagttcaacttcaactacctggccagaagatggtacgtgcccgtgaaggacctgctgggcatctacgagaagctgtacggcagaaaggtgatcaccgagaacgtgatcgtggactgcagccacatccagttcctggagatgtacggcgagatgctggccgtgagcaagctgtaccccacctacagcaccaagagccccttcctggtggagcagttccaggagtacttcctgggcggcctggacgacatggccttctggagcaccaacatctaccacctgaccagcttcatgctggagaacggcaccagcgactgcaacctgcccgagaaccccctgttcatcgcctgcggcggccagcagaaccacacccagggcagcaagatgcagaagaacgacttccacagaaacctgaccaccagcctgaccgagagcgtggacagaaacatcaactacaccgagagaggcgtgttcttcagcgtgaacagctggacccccgacagcatgagcttcatctacaaggccctggagagaaacatcagaaccatgttcatcggcggcagccagctgagccagaagcacgtgagcagccccctggccagctacttcctgagcttcccctacgccagactgggctgggccatgaccagcgccgacctgaaccaggacggccacggcgacctggtggtgggcgcccccggctacagcagacccggccacatccacatcggcagagtgtacctgatctacggcaacgacctgggcctgccccccgtggacctggacctggacaaggaggcccacagaatcctggagggcttccagcccagcggcagattcggcagcgccctggccgtgctggacttcaacgtggacggcgtgcccgacctggccgtgggcgcccccagcgtgggcagcgagcagctgacctacaagggcgccgtgtacgtgtacttcggcagcaagcagggcggcatgagcagcagccccaacatcaccatcagctgccaggacatctactgcaacctgggctggaccctgctggccgccgacgtgaacggcgacagcgagcccgacctggtgatcggcagccccttcgcccccggcggcggcaagcagaagggcatcgtggccgccttctacagcggccccagcctgagcgacaaggagaagctgaacgtggaggccgccaactggaccgtgagaggcgaggaggacttcagctggttcggctacagcctgcacggcgtgaccgtggacaacagaaccctgctgctggtgggcagccccacctggaagaacgccagcagactgggccacctgctgcacatcagagacgagaagaagagcctgggcagagtgtacggctacttcccccccaacggccagagctggttcaccatcagcggcgacaaggccatgggcaagctgggcaccagcctgagcagcggccacgtgctgatgaacggcaccctgaagcaggtgctgctggtgggcgcccccacctacgacgacgtgagcaaggtggccttcctgaccgtgaccctgcaccagggcggcgccaccagaatgtacgccctgaccagcgacgcccagcccctgctgctgagcaccttcagcggcgacagaagattcagcagattcggcggcgtgctgcacctgagcgacctggacgacgacggcctggacgagatcatcatggccgcccccctgagaatcgccgacgtgaccagcggcctgatcggcggcgaggacggcagagtgtacgtgtacaacggcaaggagaccaccctgggcgacatgaccggcaagtgcaagagctggatcaccccctgccccgaggagaaggcccagtacgtgctgatcagccccgaggccagcagcagattcggcagcagcctgatcaccgtgagaagcaaggccaagaaccaggtggtgatcgccgccggcagaagcagcctgggcgccagactgagcggcgccctgcacgtgtacagcctgggcagcgactag

SEQ ID NO: 9265 - DNA, 972 bp, Homo sapiens
  source 1..972: mol_type = genomic DNA
atgaagagcgccctgttcaccagattcttcatcctgctgccctggatcctgatcgtgatcatcatgctggacgtggacaccagaagacccgtgccccccctgacccccagaccctacttcagcccctacgccgtgggcagaggcggcgccagactgcccctgagaagaggcggccccgcccacggcacccagaagagaaaccagagcagaccccagccccagcccgagccccagctgcccaccatctacgccatcacccccacctacagcagacccgtgcagaaggccgagctgaccagactggccaacaccttcagacaggtggcccagctgcactggatcctggtggaggacgccgccgccagaagcgagctggtgagcagattcctggccagagccggcctgcccagcacccacctgcacgtgcccacccccagaagatacaagagacccggcctgcccagagccaccgagcagagaaacgccggcctggcctggctgagacagagacaccagcaccagagagcccagcccggcgtgctgttcttcgccgacgacgacaacacctacagcctggagctgttccaggagatgagaaccaccagaaaggtgagcgtgtggcccgtgggcctggtgggcggcagaagatacgagagacccctggtggagaacggcaaggtggtgggctggtacaccggctggagagccgacagacccttcgccatcgacatggccggcttcgccgtgagcctgcaggtgatcctgagcaaccccaaggccgtgttcaagagaagaggcagccagcccggcatgcaggagagcgacttcctgaagcagatcaccaccgtggaggagctggagcccaaggccaacaactgcaccaaggtgctggtgtggcacaccagaaccgagaaggtgaacctggccaacgagcccaagtaccacctggacaccgtgaagatcgaggtgtag

SEQ ID NO: 9266 - DNA, 3213 bp, Homo sapiens
  source 1..3213: mol_type = genomic DNA
atgggcgccgccagaggcagccccgccagacccagaagactgcccctgctgagcgtgctgctgctgcccctgctgggcggcacccagaccgccatcgtgttcatcaagcagcccagcagccaggacgccctgcagggcagaagagccctgctgagatgcgaggtggaggcccccggccccgtgcacgtgtactggctgctggacggcgcccccgtgcaggacaccgagagaagattcgcccagggcagcagcctgagcttcgccgccgtggacagactgcaggacagcggcaccttccagtgcgtggccagagacgacgtgaccggcgaggaggccagaagcgccaacgccagcttcaacatcaagtggatcgaggccggccccgtggtgctgaagcaccccgccagcgaggccgagatccagccccagacccaggtgaccctgagatgccacatcgacggccaccccagacccacctaccagtggttcagagacggcacccccctgagcgacggccagagcaaccacaccgtgagcagcaaggagagaaacctgaccctgagacccgccggccccgagcacagcggcctgtacagctgctgcgcccacagcgccttcggccaggcctgcagcagccagaacttcaccctgagcatcgccgacgagagcttcgccagagtggtgctggccccccaggacgtggtggtggccagatacgaggaggccatgttccactgccagttcagcgcccagcccccccccagcctgcagtggctgttcgaggacgagacccccatcaccaacagaagcagacccccccacctgagaagagccaccgtgttcgccaacggcagcctgctgctgacccaggtgagacccagaaacgccggcatctacagatgcatcggccagggccagagaggcccccccatcatcctggaggccaccctgcacctggccgagatcgaggacatgcccctgttcgagcccagagtgttcaccgccggcagcgaggagagagtgacctgcctgccccccaagggcctgcccgagcccagcgtgtggtgggagcacgccggcgtgagactgcccacccacggcagagtgtaccagaagggccacgagctggtgctggccaacatcgccgagagcgacgccggcgtgtacacctgccacgccgccaacctggccggccagagaagacaggacgtgaacatcaccgtggccaccgtgcccagctggctgaagaagccccaggacagccagctggaggagggcaagcccggctacctggactgcctgacccaggccacccccaagcccaccgtggtgtggtacagaaaccagatgctgatcagcgaggacagcagattcgaggtgttcaagaacggcaccctgagaatcaacagcgtggaggtgtacgacggcacctggtacagatgcatgagcagcacccccgccggcagcatcgaggcccaggccagagtgcaggtgctggagaagctgaagttcaccccccccccccagccccagcagtgcatggagttcgacaaggaggccaccgtgccctgcagcgccaccggcagagagaagcccaccatcaagtgggagagagccgacggcagcagcctgcccgagtgggtgaccgacaacgccggcaccctgcacttcgccagagtgaccagagacgacgccggcaactacacctgcatcgccagcaacggcccccagggccagatcagagcccacgtgcagctgaccgtggccgtgttcatcaccttcaaggtggagcccgagagaaccaccgtgtaccagggccacaccgccctgctgcagtgcgaggcccagggcgaccccaagcccctgatccagtggaagggcaaggacagaatcctggaccccaccaagctgggccccagaatgcacatcttccagaacggcagcctggtgatccacgacgtggcccccgaggacagcggcagatacacctgcatcgccggcaacagctgcaacatcaagcacaccgaggcccccctgtacgtggtggacaagcccgtgcccgaggagagcgagggccccggcagcccccccccctacaagatgatccagaccatcggcctgagcgtgggcgccgccgtggcctacatcatcgccgtgctgggcctgatgttctactgcaagaagagatgcaaggccaagagactgcagaagcagcccgagggcgaggagcccgagatggagtgcctgaacggcggccccctgcagaacggccagcccagcgccgagatccaggaggaggtggccctgaccagcctgggcagcggccccgccgccaccaacaagagacacagcaccagcgacaagatgcacttccccagaagcagcctgcagcccatcaccaccctgggcaagagcgagttcggcgaggtgttcctggccaaggcccagggcctggaggagggcgtggccgagaccctggtgctggtgaagagcctgcagagcaaggacgagcagcagcagctggacttcagaagagagctggagatgttcggcaagctgaaccacgccaacgtggtgagactgctgggcctgtgcagagaggccgagccccactacatggtgctggagtacgtggacctgggcgacctgaagcagttcctgagaatcagcaagagcaaggacgagaagctgaagagccagcccctgagcaccaagcagaaggtggccctgtgcacccaggtggccctgggcatggagcacctgagcaacaacagattcgtgcacaaggacctggccgccagaaactgcctggtgagcgcccagagacaggtgaaggtgagcgccctgggcctgagcaaggacgtgtacaacagcgagtactaccacttcagacaggcctgggtgcccctgagatggatgagccccgaggccatcctggagggcgacttcagcaccaagagcgacgtgtgggccttcggcgtgctgatgtgggaggtgttcacccacggcgagatgccccacggcggccaggccgacgacgaggtgctggccgacctgcaggccggcaaggccagactgccccagcccgagggctgccccagcaagctgtacagactgatgcagagatgctgggccctgagccccaaggacagacccagcttcagcgagatcgccagcgccctgggcgacagcaccgtggacagcaagccctag

SEQ ID NO: 9267 - DNA, 1521 bp, Homo sapiens
  source 1..1521: mol_type = genomic DNA
atgcccctgctgggcctgctgcccagaagagcctgggccagcctgctgagccagctgctgagacccccctgcgccagctgcaccggcgccgtgagatgccagagccaggtggccgaggccgtgctgaccagccagctgaaggcccaccaggagaagcccaacttcatcatcaagacccccaagggcaccagagacctgagcccccagcacatggtggtgagagagaagatcctggacctggtgatcagctgcttcaagagacacggcgccaagggcatggacacccccgccttcgagctgaaggagaccctgaccgagaagtacggcgaggacagcggcctgatgtacgacctgaaggaccagggcggcgagctgctgagcctgagatacgacctgaccgtgcccttcgccagatacctggccatgaacaaggtgaagaagatgaagagataccacgtgggcaaggtgtggagaagagagagccccaccatcgtgcagggcagatacagagagttctgccagtgcgacttcgacatcgccggccagttcgaccccatgatccccgacgccgagtgcctgaagatcatgtgcgagatcctgagcggcctgcagctgggcgacttcctgatcaaggtgaacgacagaagaatcgtggacggcatgttcgccgtgtgcggcgtgcccgagagcaagttcagagccatctgcagcagcatcgacaagctggacaagatggcctggaaggacgtgagacacgagatggtggtgaagaagggcctggcccccgaggtggccgacagaatcggcgactacgtgcagtgccacggcggcgtgagcctggtggagcagatgttccaggaccccagactgagccagaacaagcaggccctggagggcctgggcgacctgaagctgctgttcgagtacctgaccctgttcggcatcgccgacaagatcagcttcgacctgagcctggccagaggcctggactactacaccggcgtgatctacgaggccgtgctgctgcagacccccacccaggccggcgaggagcccctgaacgtgggcagcgtggccgccggcggcagatacgacggcctggtgggcatgttcgaccccaagggccacaaggtgccctgcgtgggcctgagcatcggcgtggagagaatcttctacatcgtggagcagagaatgaagaccaagggcgagaaggtgagaaccaccgagacccaggtgttcgtggccaccccccagaagaacttcctgcaggagagactgaagctgatcgccgagctgtgggacagcggcatcaaggccgagatgctgtacaagaacaaccccaagctgctgacccagctgcactactgcgagagcaccggcatccccctggtggtgatcatcggcgagcaggagctgaaggagggcgtgatcaagatcagaagcgtggccagcagagaggaggtggccatcaagagagagaacttcgtggccgagatccagaagagactgagcgagagctag

SEQ ID NO: 9268 - DNA, 912 bp, Homo sapiens
  source 1..912: mol_type = genomic DNA
atgagagcctggatcttcttcctgctgtgcctggccggcagagccctggccgccccccagcaggaggccctgcccgacgagaccgaggtggtggaggagaccgtggccgaggtgaccgaggtgagcgtgggcgccaaccccgtgcaggtggaggtgggcgagttcgacgacggcgccgaggagaccgaggaggaggtggtggccgagaacccctgccagaaccaccactgcaagcacggcaaggtgtgcgagctggacgagaacaacacccccatgtgcgtgtgccaggaccccaccagctgccccgcccccatcggcgagttcgagaaggtgtgcagcaacgacaacaagaccttcgacagcagctgccacttcttcgccaccaagtgcaccctggagggcaccaagaagggccacaagctgcacctggactacatcggcccctgcaagtacatccccccctgcctggacagcgagctgaccgagttccccctgagaatgagagactggctgaagaacgtgctggtgaccctgtacgagagagacgaggacaacaacctgctgaccgagaagcagaagctgagagtgaagaagatccacgagaacgagaagagactggaggccggcgaccaccccgtggagctgctggccagagacttcgagaagaactacaacatgtacatcttccccgtgcactggcagttcggccagctggaccagcaccccatcgacggctacctgagccacaccgagctggcccccctgagagcccccctgatccccatggagcactgcaccaccagattcttcgagacctgcgacctggacaacgacaagtacatcgccctggacgagtgggccggctgcttcggcatcaagcagaaggacatcgacaaggacctggtgatctag

SEQ ID NO: 9269 - DNA, 2634 bp, Homo sapiens
  source 1..2634: mol_type = genomic DNA
atggccagacccagaagagccagagagcccctgctggtggccctgctgcccctggcctggctggcccaggccggcctggccagagccgccggcagcgtgagactggccggcggcctgaccctgggcggcctgttccccgtgcacgccagaggcgccgccggcagagcctgcggccagctgaagaaggagcagggcgtgcacagactggaggccatgctgtacgccctggacagagtgaacgccgaccccgagctgctgcccggcgtgagactgggcgccagactgctggacacctgcagcagagacacctacgccctggagcaggccctgagcttcgtgcaggccctgatcagaggcagaggcgacggcgacgaggtgggcgtgagatgccccggcggcgtgccccccctgagacccgccccccccgagagagtggtggccgtggtgggcgccagcgccagcagcgtgagcatcatggtggccaacgtgctgagactgttcgccatcccccagatcagctacgccagcaccgcccccgagctgagcgacagcaccagatacgacttcttcagcagagtggtgccccccgacagctaccaggcccaggccatggtggacatcgtgagagccctgggctggaactacgtgagcaccctggccagcgagggcaactacggcgagagcggcgtggaggccttcgtgcagatcagcagagaggccggcggcgtgtgcatcgcccagagcatcaagatccccagagagcccaagcccggcgagttcagcaaggtgatcagaagactgatggagacccccaacgccagaggcatcatcatcttcgccaacgaggacgacatcagaagagtgctggaggccgccagacaggccaacctgaccggccacttcctgtgggtgggcagcgacagctggggcgccaagaccagccccatcctgagcctggaggacgtggccgtgggcgccatcaccatcctgcccaagagagccagcatcgacggcttcgaccagtacttcatgaccagaagcctggagaacaacagaagaaacatctggttcgccgagttctgggaggagaacttcaactgcaagctgaccagcagcggcacccagagcgacgacagcaccagaaagtgcaccggcgaggagagaatcggcagagacagcacctacgagcaggagggcaaggtgcagttcgtgatcgacgccgtgtacgccatcgcccacgccctgcacagcatgcaccaggccctgtgccccggccacaccggcctgtgccccgccatggagcccaccgacggcagaatgctgctgcagtacatcagagccgtgagattcaacggcagcgccggcacccccgtgatgttcaacgagaacggcgacgcccccggcagatacgacatcttccagtaccaggccaccaacggcagcgccagcagcggcggctaccaggccgtgggccagtgggccgagaccctgagactggacgtggaggccctgcagtggagcggcgacccccacgaggtgcccagcagcctgtgcagcctgccctgcggccccggcgagagaaagaagatggtgaagggcgtgccctgctgctggcactgcgaggcctgcgacggctacagattccaggtggacgagttcacctgcgaggcctgccccggcgacatgagacccacccccaaccacaccggctgcagacccacccccgtggtgagactgagctggagcagcccctgggccgccccccccctgctgctggccgtgctgggcatcgtggccaccaccaccgtggtggccaccttcgtgagatacaacaacacccccatcgtgagagccagcggcagagagctgagctacgtgctgctgaccggcatcttcctgatctacgccatcaccttcctgatggtggccgagcccggcgccgccgtgtgcgccgccagaagactgttcctgggcctgggcaccaccctgagctacagcgccctgctgaccaagaccaacagaatctacagaatcttcgagcagggcaagagaagcgtgacccccccccccttcatcagccccaccagccagctggtgatcaccttcagcctgaccagcctgcaggtggtgggcatgatcgcctggctgggcgccagacccccccacagcgtgatcgactacgaggagcagagaaccgtggaccccgagcaggccagaggcgtgctgaagtgcgacatgagcgacctgagcctgatcggctgcctgggctacagcctgctgctgatggtgacctgcaccgtgtacgccatcaaggccagaggcgtgcccgagaccttcaacgaggccaagcccatcggcttcaccatgtacaccacctgcatcatctggctggccttcgtgcccatcttcttcggcaccgcccagagcgccgagaagatctacatccagaccaccaccctgaccgtgagcctgagcctgagcgccagcgtgagcctgggcatgctgtacgtgcccaagacctacgtgatcctgttccaccccgagcagaacgtgcagaagagaaagagaagcctgaaggccaccagcaccgtggccgccccccccaagggcgaggacgccgaggcccacaagtag

SEQ ID NO: 9270 - DNA, 798 bp, Homo sapiens
  source 1..798: mol_type = genomic DNA
atggccgccgccgtgcccaagagaatgagaggccccgcccaggccaagctgctgcccggcagcgccatccaggccctggtgggcctggccagacccctggtgctggccctgctgctggtgagcgccgccctgagcagcgtggtgagcagaaccgacagccccagccccaccgtgctgaacagccacatcagcacccccaacgtgaacgccctgacccacgagaaccagaccaagcccagcatcagccagatcagcaccaccctgccccccaccaccagcaccaagaagagcggcggcgccagcgtggtgccccaccccagccccacccccctgagccaggaggaggccgacaacaacgaggaccccagcatcgaggaggaggacctgctgatgctgaacagcagccccagcaccgccaaggacaccctggacaacggcgactacggcgagcccgactacgactggaccaccggccccagagacgacgacgagagcgacgacaccctggaggagaacagaggctacatggagatcgagcagagcgtgaagagcttcaagatgcccagcagcaacatcgaggaggaggacagccacttcttcttccacctgatcatcttcgccttctgcatcgccgtggtgtacatcacctaccacaacaagagaaagatcttcctgctggtgcagagcagaaagtggagagacggcctgtgcagcaagaccgtggagtaccacagactggaccagaacgtgaacgaggccatgcccagcctgaagatcaccaacgactacatcttctag

SEQ ID NO: 9271 - DNA, 2349 bp, Homo sapiens
  source 1..2349: mol_type = genomic DNA
atggcccccagcgcctgggccatctgctggctgctgggcggcctgctgctgcacggcggcagcagcggccccagccccggccccagcgtgcccagactgagactgagctacagagacctgctgagcgccaacagaagcgccatcttcctgggcccccagggcagcctgaacctgcaggccatgtacctggacgagtacagagacagactgttcctgggcggcctggacgccctgtacagcctgagactggaccaggcctggcccgaccccagagaggtgctgtggcccccccagcccggccagagagaggagtgcgtgagaaagggcagagaccccctgaccgagtgcgccaacttcgtgagagtgctgcagccccacaacagaacccacctgctggcctgcggcaccggcgccttccagcccacctgcgccctgatcaccgtgggccacagaggcgagcacgtgctgcacctggagcccggcagcgtggagagcggcagaggcagatgcccccacgagcccagcagacccttcgccagcaccttcatcgacggcgagctgtacaccggcctgaccgccgacttcctgggcagagaggccatgatcttcagaagcggcggccccagacccgccctgagaagcgacagcgaccagagcctgctgcacgaccccagattcgtgatggccgccagaatccccgagaacagcgaccaggacaacgacaaggtgtacttcttcttcagcgagaccgtgcccagccccgacggcggcagcaaccacgtgaccgtgagcagagtgggcagagtgtgcgtgaacgacgccggcggccagagagtgctggtgaacaagtggagcaccttcctgaaggccagactggtgtgcagcgtgcccggccccggcggcgccgagacccacttcgaccagctggaggacgtgttcctgctgtggcccaaggccggcaagagcctggaggtgtacgccctgttcagcaccgtgagcgccgtgttccagggcttcgccgtgtgcgtgtaccacatggccgacatctgggaggtgttcaacggccccttcgcccacagagacggcccccagcaccagtggggcccctacggcggcaaggtgcccttccccagacccggcgtgtgccccagcaagatgaccgcccagcccggcagacccttcggcagcaccaaggactaccccgacgaggtgctgcagttcgccagagcccaccccctgatgttctggcccgtgagacccagacacggcagacccgtgctggtgaagacccacctggcccagcagctgcaccagatcgtggtggacagagtggaggccgaggacggcacctacgacgtgatcttcctgggcaccgacagcggcagcgtgctgaaggtgatcgccctgcaggccggcggcagcgccgagcccgaggaggtggtgctggaggagctgcaggtgttcaaggtgcccacccccatcaccgagatggagatcagcgtgaagagacagatgctgtacgtgggcagcagactgggcgtggcccagctgagactgcaccagtgcgagacctacggcaccgcctgcgccgagtgctgcctggccagagacccctactgcgcctgggacggcgccagctgcacccactacagacccagcctgggcaagagaagattcagaagacaggacatcagacacggcaaccccgccctgcagtgcctgggccagagccaggaggaggaggccgtgggcctggtggccgccaccatggtgtacggcaccgagcacaacagcaccttcctggagtgcctgcccaagagcccccaggccgccgtgagatggctgctgcagagacccggcgacgagggccccgaccaggtgaagaccgacgagagagtgctgcacaccgagagaggcctgctgttcagaagactgagcagattcgacgccggcacctacacctgcaccaccctggagcacggcttcagccagaccgtggtgagactggccctggtggtgatcgtggccagccagctggacaacctgttcccccccgagcccaagcccgaggagccccccgccagaggcggcctggccagcaccccccccaaggcctggtacaaggacatcctgcagctgatcggcttcgccaacctgcccagagtggacgagtactgcgagagagtgtggtgcagaggcaccaccgagtgcagcggctgcttcagaagcagaagcagaggcaagcaggccagaggcaagagctgggccggcctggagctgggcaagaagatgaagagcagagtgcacgccgagcacaacagaacccccagagaggtggaggccacctag

SEQ ID NO: 9272 - DNA, 1725 bp, Homo sapiens
  source 1..1725: mol_type = genomic DNA
atggtggaggacggcgccgaggagctggaggacctggtgcacttcagcgtgagcgagctgcccagcagaggctacggcgtgatggaggagatcagaagacagggcaagctgtgcgacgtgaccctgaagatcggcgaccacaagttcagcgcccacagaatcgtgctggccgccagcatcccctacttccacgccatgttcaccaacgacatgatggagtgcaagcaggacgagatcgtgatgcagggcatggaccccagcgccctggaggccctgatcaacttcgcctacaacggcaacctggccatcgaccagcagaacgtgcagagcctgctgatgggcgccagcttcctgcagctgcagagcatcaaggacgcctgctgcaccttcctgagagagagactgcaccccaagaactgcctgggcgtgagacagttcgccgagaccatgatgtgcgccgtgctgtacgacgccgccaacagcttcatccaccagcacttcgtggaggtgagcatgagcgaggagttcctggccctgcccctggaggacgtgctggagctggtgagcagagacgagctgaacgtgaagagcgaggagcaggtgttcgaggccgccctggcctgggtgagatacgacagagagcagagaggcccctacctgcccgagctgctgagcaacatcagactgcccctgtgcagaccccagttcctgagcgacagagtgcagcaggacgacctggtgagatgctgccacaagtgcagagacctggtggacgaggccaaggactaccacctgatgcccgagagaagaccccacctgcccgccttcagaaccagacccagatgctgcaccagcatcgccggcctgatctacgccgtgggcggcctgaacagcgccggcgacagcctgaacgtggtggaggtgttcgaccccatcgccaactgctgggagagatgcagacccatgaccaccgccagaagcagagtgggcgtggccgtggtgaacggcctgctgtacgccatcggcggctacgacggccagctgagactgagcaccgtggaggcctacaaccccgagaccgacacctggaccagagtgggcagcatgaacagcaagagaagcgccatgggcaccgtggtgctggacggccagatctacgtgtgcggcggctacgacggcaacagcagcctgagcagcgtggagacctacagccccgagaccgacaagtggaccgtggtgaccagcatgagcagcaacagaagcgccgccggcgtgaccgtgttcgagggcagaatctacgtgagcggcggccacgacggcctgcagatcttcagcagcgtggagcactacaaccaccacaccgccacctggcaccccgccgccggcatgctgaacaagagatgcagacacggcgccgccagcctgggcagcaagatgttcgtgtgcggcggctacgacggcagcggcttcctgagcatcgccgagatgtacagcagcgtggccgaccagtggtgcctgatcgtgcccatgcacaccagaagaagcagagtgagcctggtggccagctgcggcagactgtacgccgtgggcggctacgacggccagagcaacctgagcagcgtggagatgtacgaccccgagaccgactgctggaccttcatggcccccatggcctgccacgagggcggcgtgggcgtgggctgcatccccctgctgaccatctag

SEQ ID NO: 9273 - DNA, 486 bp, Homo sapiens
  source 1..486: mol_type = genomic DNA
atggccaaggaggagccccagagcatcagcagagacctgcaggagctgcagaagaagctgagcctgctgatcgacagcttccagaacaacagcaaggtggtggccttcatgaagagccccgtgggccagtacctggacagccaccccttcctggccttcaccctgctggtgttcatcgtgatgagcgccgtgcccgtgggcttcttcctgctgatcgtggtgctgaccaccctggccgccctgctgggcgtgatcatcctggagggcctggtgatcagcgtgggcggcttcagcctgctgtgcatcctgtgcggcctgggcttcgtgagcctggccatgagcggcatgatgatcgccagctacgtggtggtgagcagcctgatcagctgctggttcagccccagacccctgacccagcagaacaccagctgcgacttcctgcccgccatgaagagcgccgagttcgagggcctgtaccaggagtag

SEQ ID NO: 9274 - DNA, 4503 bp, Homo sapiens
  source 1..4503: mol_type = genomic DNA
atgaccagaatcctgaccgccttcaaggtggtgagaaccctgaagaccggcttcggcttcaccaacgtgaccgcccaccagaagtggaagttcagcagacccggcatcagactgctgagcgtgaaggcccagaccgcccacatcgtgctggaggacggcaccaagatgaagggctacagcttcggccaccccagcagcgtggccggcgaggtggtgttcaacaccggcctgggcggctaccccgaggccatcaccgaccccgcctacaagggccagatcctgaccatggccaaccccatcatcggcaacggcggcgcccccgacaccaccgccctggacgagctgggcctgagcaagtacctggagagcaacggcatcaaggtgagcggcctgctggtgctggactacagcaaggactacaaccactggctggccaccaagagcctgggccagtggctgcaggaggagaaggtgcccgccatctacggcgtggacaccagaatgctgaccaagatcatcagagacaagggcaccatgctgggcaagatcgagttcgagggccagcccgtggacttcgtggaccccaacaagcagaacctgatcgccgaggtgagcaccaaggacgtgaaggtgtacggcaagggcaaccccaccaaggtggtggccgtggactgcggcatcaagaacaacgtgatcagactgctggtgaagagaggcgccgaggtgcacctggtgccctggaaccacgacttcaccaagatggagtacgacggcatcctgatcgccggcggccccggcaaccccgccctggccgagcccctgatccagaacgtgagaaagatcctggagagcgacagaaaggagcccctgttcggcatcagcaccggcaacctgatcaccggcctggccgccggcgccaagacctacaagatgagcatggccaacagaggccagaaccagcccgtgctgaacatcaccaacaagcaggccttcatcaccgcccagaaccacggctacgccctggacaacaccctgcccgccggctggaagcccctgttcgtgaacgtgaacgaccagaccaacgagggcatcatgcacgagagcaagcccttcttcgccgtgcagttccaccccgaggtgacccccggccccatcgacaccgagtacctgttcgacagcttcttcagcctgatcaagaagggcaaggccaccaccatcaccagcgtgctgcccaagcccgccctggtggccagcagagtggaggtgagcaaggtgctgatcctgggcagcggcggcctgagcatcggccaggccggcgagttcgactacagcggcagccaggccgtgaaggccatgaaggaggagaacgtgaagaccgtgctgatgaaccccaacatcgccagcgtgcagaccaacgaggtgggcctgaagcaggccgacaccgtgtacttcctgcccatcaccccccagttcgtgaccgaggtgatcaaggccgagcagcccgacggcctgatcctgggcatgggcggccagaccgccctgaactgcggcgtggagctgttcaagagaggcgtgctgaaggagtacggcgtgaaggtgctgggcaccagcgtggagagcatcatggccaccgaggacagacagctgttcagcgacaagctgaacgagatcaacgagaagatcgcccccagcttcgccgtggagagcatcgaggacgccctgaaggccgccgacaccatcggctaccccgtgatgatcagaagcgcctacgccctgggcggcctgggcagcggcatctgccccaacagagagaccctgatggacctgagcaccaaggccttcgccatgaccaaccagatcctggtggagaagagcgtgaccggctggaaggagatcgagtacgaggtggtgagagacgccgacgacaactgcgtgaccgtgtgcaacatggagaacgtggacgccatgggcgtgcacaccggcgacagcgtggtggtggcccccgcccagaccctgagcaacgccgagttccagatgctgagaagaaccagcatcaacgtggtgagacacctgggcatcgtgggcgagtgcaacatccagttcgccctgcaccccaccagcatggagtactgcatcatcgaggtgaacgccagactgagcagaagcagcgccctggccagcaaggccaccggctaccccctggccttcatcgccgccaagatcgccctgggcatccccctgcccgagatcaagaacgtggtgagcggcaagaccagcgcctgcttcgagcccagcctggactacatggtgaccaagatccccagatgggacctggacagattccacggcaccagcagcagaatcggcagcagcatgaagagcgtgggcgaggtgatggccatcggcagaaccttcgaggagagcttccagaaggccctgagaatgtgccaccccagcatcgagggcttcacccccagactgcccatgaacaaggagtggcccagcaacctggacctgagaaaggagctgagcgagcccagcagcaccagaatctacgccatcgccaaggccatcgacgacaacatgagcctggacgagatcgagaagctgacctacatcgacaagtggttcctgtacaagatgagagacatcctgaacatggagaagaccctgaagggcctgaacagcgagagcatgaccgaggagaccctgaagagagccaaggagatcggcttcagcgacaagcagatcagcaagtgcctgggcctgaccgaggcccagaccagagagctgagactgaagaagaacatccacccctgggtgaagcagatcgacaccctggccgccgagtaccccagcgtgaccaactacctgtacgtgacctacaacggccaggagcacgacgtgaacttcgacgaccacggcatgatggtgctgggctgcggcccctaccacatcggcagcagcgtggagttcgactggtgcgccgtgagcagcatcagaaccctgagacagctgggcaagaagaccgtggtggtgaactgcaaccccgagaccgtgagcaccgacttcgacgagtgcgacaagctgtacttcgaggagctgagcctggagagaatcctggacatctaccaccaggaggcctgcggcggctgcatcatcagcgtgggcggccagatccccaacaacctggccgtgcccctgtacaagaacggcgtgaagatcatgggcaccagccccctgcagatcgacagagccgaggacagaagcatcttcagcgccgtgctggacgagctgaaggtggcccaggccccctggaaggccgtgaacaccctgaacgaggccctggagttcgccaagagcgtggactacccctgcctgctgagacccagctacgtgctgagcggcagcgccatgaacgtggtgttcagcgaggacgagatgaagaagttcctggaggaggccaccagagtgagccaggagcaccccgtggtgctgaccaagttcgtggagggcgccagagaggtggagatggacgccgtgggcaaggacggcagagtgatcagccacgccatcagcgagcacgtggaggacgccggcgtgcacagcggcgacgccaccctgatgctgcccacccagaccatcagccagggcgccatcgagaaggtgaaggacgccaccagaaagatcgccaaggccttcgccatcagcggccccttcaacgtgcagttcctggtgaagggcaacgacgtgctggtgatcgagtgcaacctgagagccagcagaagcttccccttcgtgagcaagaccctgggcgtggacttcatcgacgtggccaccaaggtgatgatcggcgagaacgtggacgagaagcacctgcccaccctggaccaccccatcatccccgccgactacgtggccatcaaggcccccatgttcagctggcccagactgagagacgccgaccccatcctgagatgcgagatggccagcaccggcgaggtggcctgcttcggcgagggcatccacaccgccttcctgaaggccatgctgagcaccggcttcaagatcccccagaagggcatcctgatcggcatccagcagagcttcagacccagattcctgggcgtggccgagcagctgcacaacgagggcttcaagctgttcgccaccgaggccaccagcgactggctgaacgccaacaacgtgcccgccacccccgtggcctggcccagccaggagggccagaaccccagcctgagcagcatcagaaagctgatcagagacggcagcatcgacctggtgatcaacctgcccaacaacaacaccaagttcgtgcacgacaactacgtgatcagaagaaccgccgtggacagcggcatccccctgctgaccaacttccaggtgaccaagctgttcgccgaggccgtgcagaagagcagaaaggtggacagcaagagcctgttccactacagacagtacagcgccggcaaggccgcctag

SEQ ID NO: 9275 - DNA, 846 bp, Homo sapiens
  source 1..846: mol_type = genomic DNA
atggccgtgaacgtgtacagcaccagcgtgaccagcgagaacctgagcagacacgacatgctggcctgggtgaacgacagcctgcacctgaactacaccaagatcgagcagctgtgcagcggcgccgcctactgccagttcatggacatgctgttccccggctgcgtgcacctgagaaaggtgaagttccaggccaagctggagcacgagtacatccacaacttcaaggtgctgcaggccgccttcaagaagatgggcgtggacaagatcatccccgtggagaagctggtgaagggcaagttccaggacaacttcgagttcatccagtggttcaagaagttcttcgacgccaactacgacggcaaggactacaaccccctgctggccagacagggccaggacgtggcccccccccccaaccccggcgaccagatcttcaacaagagcaagaagctgatcggcaccgccgtgccccagagaaccagccccaccggccccaagaacatgcagaccagcggcagactgagcaacgtggcccccccctgcatcctgagaaagaacccccccagcgccagaaacggcggccacgagaccgacgcccagatcctggagctgaaccagcagctggtggacctgaagctgaccgtggacggcctggagaaggagagagacttctacttcagcaagctgagagacatcgagctgatctgccaggagcacgagagcgagaacagccccgtgatcagcggcatcatcggcatcctgtacgccaccgaggagggcttcgccccccccgaggacgacgagatcgaggagcaccagcaggaggaccaggacgagtactag

SEQ ID NO: 9276 - DNA, 531 bp, Homo sapiens
  source 1..531: mol_type = genomic DNA
atggccctgtggagagcctaccagagagccctggccgcccacccctggaaggtgcaggtgctgaccgccggcagcctgatgggcctgggcgacatcatcagccagcagctggtggagagaagaggcctgcaggagcaccagagaggcagaaccctgaccatggtgagcctgggctgcggcttcgtgggccccgtggtgggcggctggtacaaggtgctggacagattcatccccggcaccaccaaggtggacgccctgaagaagatgctgctggaccagggcggcttcgccccctgcttcctgggctgcttcctgcccctggtgggcgccctgaacggcctgagcgcccaggacaactgggccaagctgcagagagactaccccgacgccctgatcaccaactactacctgtggcccgccgtgcagctggccaacttctacctggtgcccctgcactacagactggccgtggtgcagtgcgtggccgtgatctggaacagctacctgagctggaaggcccacagactgtag

SEQ ID NO: 9277 - DNA, 1143 bp, Homo sapiens
  source 1..1143: mol_type = genomic DNA
atggccagcctgcccgtgctgcagaaggagagcgtgttccagagcggcgcccacgcctacagaatccccgccctgctgtacctgcccggccagcagagcctgctggccttcgccgagcagagagccagcaagaaggacgagcacgccgagctgatcgtgctgagaagaggcgactacgacgcccccacccaccaggtgcagtggcaggcccaggaggtggtggcccaggccagactggacggccacagaagcatgaacccctgccccctgtacgacgcccagaccggcaccctgttcctgttcttcatcgccatccccggccaggtgaccgagcagcagcagctgcagaccagagccaacgtgaccagactgtgccaggtgaccagcaccgaccacggcagaacctggagcagccccagagacctgaccgacgccgccatcggccccgcctacagagagtggagcaccttcgccgtgggccccggccactgcctgcagctgcacgacagagccagaagcctggtggtgcccgcctacgcctacagaaagctgcaccccatccagagacccatccccagcgccttctgcttcctgagccacgaccacggcagaacctgggccagaggccacttcgtggcccaggacaccctggagtgccaggtggccgaggtggagaccggcgagcagagagtggtgaccctgaacgccagaagccacctgagagccagagtgcaggcccagagcaccaacgacggcctggacttccaggagagccagctggtgaagaagctggtggagccccccccccagggctgccagggcagcgtgatcagcttccccagccccagaagcggccccggcagccccgcccagtggctgctgtacacccaccccacccacagctggcagagagccgacctgggcgcctacctgaaccccagaccccccgcccccgaggcctggagcgagcccgtgctgctggccaagggcagctgcgcctacagcgacctgcagagcatgggcaccggccccgacggcagccccctgttcggctgcctgtacgaggccaacgactacgaggagatcgtgttcctgatgttcaccctgaagcaggccttccccgccgagtacctgccccagtag

SEQ ID NO: 9278 - DNA, 3165 bp, Homo sapiens
  source 1..3165: mol_type = genomic DNA
atggccgccgtgaaggagcccctggagttccacgccaagagaccctggagacccgaggaggccgtggaggaccccgacgaggaggacgaggacaacaccagcgaggccgagaacggcttcagcctggaggaggtgctgagactgggcggcaccaagcaggactacctgatgctggccaccctggacgagaacgaggaggtgatcgacggcggcaagaagggcgccatcgacgacctgcagcagggcgagctggaggccttcatccagaacctgaacctggccaagtacaccaaggccagcctggtggaggaggacgagcccgccgagaaggagaacagcagcaagaaggaggtgaagatccccaagatcaacaacaagaacaccgccgagagccagagaaccagcgtgaacaaggtgaagaacaagaacagacccgagccccacagcgacgagaacggcagcaccacccccaaggtgaagaaggacaagcagaacatcttcgagttcttcgagagacagaccctgctgctgagacccggcggcaagtggtacgacctggagtacagcaacgagtacagcctgaagccccagccccaggacgtggtgagcaagtacaagaccctggcccagaagctgtaccagcacgagatcaacctgttcaagagcaagaccaacagccagaagggcgccagcagcacctggatgaaggccatcgtgagcagcggcaccctgggcgacagaatggccgccatgatcctgctgatccaggacgacgccgtgcacaccctgcagttcgtggagaccctggtgaacctggtgaagaagaagggcagcaagcagcagtgcctgatggccctggacaccttcaaggagctgctgatcaccgacctgctgcccgacaacagaaagctgagaatcttcagccagagacccttcgacaagctggagcagctgagcagcggcaacaaggacagcagagacagaagactgatcctgtggtacttcgagcaccagctgaagcacctggtggccgagttcgtgcaggtgctggagaccctgagccacgacaccctggtgaccaccaagaccagagccctgaccgtggcccacgagctgctgtgcaacaagcccgaggaggagaaggccctgctggtgcaggtggtgaacaagctgggcgacccccagaacagaatcgccaccaaggccagccacctgctggagaccctgctgtgcaagcaccccaacatgaagggcgtggtgagcggcgaggtggagagactgctgttcagaagcaacatcagcagcaaggcccagtactacgccatctgcttcctgaaccagatggccctgagccacgaggagagcgagctggccaacaagctgatcaccgtgtacttctgcttcttcagaacctgcgtgaagaagaaggacgtggagagcaagatgctgagcgccctgctgaccggcgtgaacagagcctacccctacagccagaccggcgacgacaaggtgagagagcagatcgacaccctgttcaaggtgctgcacatcgtgaacttcaacaccagcgtgcaggccctgatgctgctgttccaggtgatgaacagccagcagaccatcagcgacagatactacaccgccctgtacagaaagatgctggaccccggcctgatgacctgcagcaagcaggccatgttcctgaacctggtgtacaagagcctgaaggccgacatcgtgctgagaagagtgaaggccttcgtgaagagactgctgcaggtgacctgccagcagatgccccccttcatctgcggcgccctgtacctggtgagcgagatcctgaaggccaagcccggcctgagaagccagctggacgaccaccccgagagcgacgacgaggagaacttcatcgacgccaacgacgacgaggacatggagaagttcaccgacgccgacaaggagaccgagatcgtgaagaagctggagaccgaggagaccgtgcccgagaccgacgtggagaccaagaagcccgaggtggccagctgggtgcacttcgacaacctgaagggcggcaagcagctgaacaagtacgaccccttcagcagaaaccccctgttctgcggcgccgagaacaccagcctgtgggagctgaagaagctgagcgtgcacttccaccccagcgtggccctgttcgccaagaccatcctgcagggcaactacatccagtacagcggcgaccccctgcaggacttcaccctgatgagattcctggacagattcgtgtacagaaaccccaagccccacaagggcaaggagaacaccgacagcgtggtgatgcagcccaagagaaagcacttcatcaaggacatcagacacctgcccgtgaacagcaaggagttcctggccaaggaggagagccagatccccgtggacgaggtgttcttccacagatactacaagaaggtggccgtgaaggagaagcagaagagagacgccgacgaggagagcatcgaggacgtggacgacgaggagttcgaggagctgatcgacaccttcgaggacgacaactgcttcagcagcggcaaggacgacatggacttcgccggcaacgtgaagaagagaaccaagggcgccaaggacaacaccctggacgaggacagcgagggcagcgacgacgagctgggcaacctggacgacgacgaggtgagcctgggcagcatggacgacgaggagttcgccgaggtggacgaggacggcggcaccttcatggacgtgctggacgacgagagcgagagcgtgcccgagctggaggtgcacagcaaggtgagcaccaagaagagcaagagaaagggcaccgacgacttcgacttcgccggcagcttccagggccccagaaagaagaagagaaacctgaacgacagcagcctgttcgtgagcgccgaggagttcggccacctgctggacgagaacatgggcagcaagttcgacaacatcggcatgaacgccatggccaacaaggacaacgccagcctgaagcagctgagatgggaggccgagagagacgactggctgcacaacagagacgccaagagcatcatcaagaagaagaagcacttcaagaagaagagaatcaagaccacccagaagaccaagaagcagagaaagtag

SEQ ID NO: 9279 - DNA, 1107 bp, Homo sapiens
  source 1..1107: mol_type = genomic DNA
atggagcccggccagcccagagagccccaggagcccagagagcccggccccggcgccgagaccgccgccgcccccgtgtgggaggaggccaagatcttctacgacaacctggcccccaagaagaagcccaagagccccaagccccagaacgccgtgaccatcgccgtgagcagcagagccctgttcagaatggacgaggagcagcagatctacaccgagcagggcgtggaggagtacgtgagataccagctggagcacgagaacgagcccttcagccccggccccgccttccccttcgtgaaggccctggaggccgtgaacagaagactgagagagctgtaccccgacagcgaggacgtgttcgacatcgtgctgatgaccaacaaccacgcccaggtgggcgtgagactgatcaacagcatcaaccactacgacctgttcatcgagagattctgcatgaccggcggcaacagccccatctgctacctgaaggcctaccacaccaacctgtacctgagcgccgacgccgagaaggtgagagaggccatcgacgagggcatcgccgccgccaccatcttcagccccagcagagacgtggtggtgagccagagccagctgagagtggccttcgacggcgacgccgtgctgttcagcgacgagagcgagagaatcgtgaaggcccacggcctggacagattcttcgagcacgagaaggcccacgagaacaagcccctggcccagggccccctgaagggcttcctggaggccctgggcagactgcagaagaagttctacagcaagggcctgagactggagtgccccatcagaacctacctggtgaccgccagaagcgccgccagcagcggcgccagagccctgaagaccctgagaagctggggcctggagaccgacgaggccctgttcctggccggcgcccccaagggccccctgctggagaagatcagaccccacatcttcttcgacgaccagatgttccacgtggccggcgcccaggagatgggcaccgtggccgcccacgtgccctacggcgtggcccagacccccagaagaaccgcccccgccaagcaggcccccagcgcccagtag

SEQ ID NO: 9280 - DNA, 1080 bp, Homo sapiens
  source 1..1080: mol_type = genomic DNA
atgctgagcgccgccagcagagtggtgagcagagccgccgtgcactgcgccctgagaagccccccccccgaggccagagccctggccatgagcagaccccccccccccagagtggccagcgtgctgggcaccatggagatgggcagaagaatggacgcccccgccagcgccgccgccgtgagagccttcctggagagaggccacaccgagctggacaccgccttcatgtacagcgacggccagagcgagaccatcctgggcggcctgggcctgggcctgggcggcggcgactgcagagtgaagatcgccaccaaggccaacccctgggacggcaagagcctgaagcccgacagcgtgagaagccagctggagaccagcctgaagagactgcagtgcccccaggtggacctgttctacctgcacgcccccgaccacggcacccccgtggaggagaccctgcacgcctgccagagactgcaccaggagggcaagttcgtggagctgggcctgagcaactacgccagctgggaggtggccgagatctgcaccctgtgcaagagcaacggctggatcctgcccaccgtgtaccagggcatgtacaacgccaccaccagacaggtggagaccgagctgttcccctgcctgagacacttcggcctgagattctacgcctacaaccccctggccggcggcctgctgaccggcaagtacaagtacgaggacaaggacggcaagcagcccgtgggcagattcttcggcaacagctgggccgagacctacagaaacagattctggaaggagcaccacttcgaggccatcgccctggtggagaaggccctgcaggccgcctacggcgccagcgcccccagcgtgaccagcgccgccctgagatggatgtaccaccacagccagctgcagggcgcccacggcgacgccgtgatcctgggcatgagcagcctggagcagctggagcagaacctggccgccaccgaggagggccccctggagcccgccgtggtggacgccttcaaccaggcctggcacctggtggcccacgagtgccccaactacttcagatag

SEQ ID NO: 9281 - DNA, 561 bp, Homo sapiens
  source 1..561: mol_type = genomic DNA
atggacgccgacagcgacgtggccctggacatcctgatcaccaacgtggtgtgcgtgttcagaaccagatgccacctgaacctgagaaagatcgccctggagggcgccaacgtgatctacaagagagacgtgggcaaggtgctgatgaagctgagaaagcccagaatcaccgccaccatctggagcagcggcaagatcatctgcaccggcgccaccagcgaggaggaggccaagttcggcgccagaagactggccagaagcctgcagaagctgggcttccaggtgatcttcaccgacttcaaggtggtgaacgtgctggccgtgtgcaacatgcccttcgagatcagactgcccgagttcaccaagaacaacagaccccacgccagctacgagcccgagctgcaccccgccgtgtgctacagaatcaagagcctgagagccaccctgcagatcttcagcaccggcagcatcaccgtgaccggccccaacgtgaaggccgtggccaccgccgtggagcagatctaccccttcgtgttcgagagcagaaaggagatcctgtag

SEQ ID NO: 9282 - DNA, 537 bp, Homo sapiens
  source 1..537: mol_type = genomic DNA
atggccgcccccctgggcggcatgttcagcggccagccccccggccccccccaggccccccccggcctgcccggccaggccagcctgctgcaggccgcccccggcgcccccagacccagcagcagcaccctggtggacgagctggagagcagcttcgaggcctgcttcgccagcctggtgagccaggactacgtgaacggcaccgaccaggaggagatcagaaccggcgtggaccagtgcatccagaagttcctggacatcgccagacagaccgagtgcttcttcctgcagaagagactgcagctgagcgtgcagaagcccgagcaggtgatcaaggaggacgtgagcgagctgagaaacgagctgcagagaaaggacgccctggtgcagaagcacctgaccaagctgagacactggcagcaggtgctggaggacatcaacgtgcagcacaagaagcccgccgacatcccccagggcagcctggcctacctggagcaggccagcgccaacatccccgcccccctgaagcccacctag

SEQ ID NO: 9283 - DNA, 738 bp, Homo sapiens
  source 1..738: mol_type = genomic DNA
atggagaagaccgagctgatccagaaggccaagctggccgagcaggccgagagatacgacgacatggccacctgcatgaaggccgtgaccgagcagggcgccgagctgagcaacgaggagagaaacctgctgagcgtggcctacaagaacgtggtgggcggcagaagaagcgcctggagagtgatcagcagcatcgagcagaagaccgacaccagcgacaagaagctgcagctgatcaaggactacagagagaaggtggagagcgagctgagaagcatctgcaccaccgtgctggagctgctggacaagtacctgatcgccaacgccaccaaccccgagagcaaggtgttctacctgaagatgaagggcgactacttcagatacctggccgaggtggcctgcggcgacgacagaaagcagaccatcgacaacagccagggcgcctaccaggaggccttcgacatcagcaagaaggagatgcagcccacccaccccatcagactgggcctggccctgaacttcagcgtgttctactacgagatcctgaacaaccccgagctggcctgcaccctggccaagaccgccttcgacgaggccatcgccgagctggacaccctgaacgaggacagctacaaggacagcaccctgatcatgcagctgctgagagacaacctgaccctgtggaccagcgacagcgccggcgaggagtgcgacgccgccgagggcgccgagaactag

SEQ ID NO: 9284 - DNA, 534 bp, Homo sapiens
  source 1..534: mol_type = genomic DNA
atgcccggcctgaccgcctacttcggcctgctggagatctgcggcgtgaagggcggcgagaccgtgatggtgaacgccgccgccggcgccgtgggcagcgtggtgggccagatcgccaagctgaagggctgcaaggtggtgggcgccgtgggcagcgacgagaaggtggcctacctgcagaagctgggcttcgacgtggtgttcaactacaagaccgtggagagcctggaggagaccctgaagaaggccagccccgacggctacgactgctacttcgacaacgtgggcggcgagttcagcaacaccgtgatcggccagatgaagaagttcggcagaatcgccatctgcggcgccatcagcacctacaacagaaccggccccctgccccccggccccccccccgagatcgtgatctaccaggagctgagaatggaggccttcgtggtgtacagatggcagggcgacgccagacagaaggccctgaaggacctgctgaagtgggtgctggagctgccctacttcgtgatcgactag

SEQ ID NO: 9285 - DNA, 3660 bp, Homo sapiens
  source 1..3660: mol_type = genomic DNA
atgttcggcgccggcgacgaggacgacaccgacttcctgagccccagcggcggcgccagactggccagcctgttcggcctggaccaggccgccgccggccacggcaacgagttcttccagtacaccgcccccaagcagcccaagaagggccagggcaccgccgccaccggcaaccaggccacccccaagaccgcccccgccaccatgagcacccccaccatcctggtggccaccgccgtgcacgcctacagatacaccaacggccagtacgtgaagcagggcaagttcggcgccgccgtgctgggcaaccacaccgccagagagtacagaatcctgctgtacatcagccagcagcagcccgtgaccgtggccagaatccacgtgaacttcgagctgatggtgagacccaacaactacagcaccttctacgacgaccagagacagaactggagcatcatgttcgagagcgagaaggccgccgtggagttcaacaagcaggtgtgcatcgccaagtgcaacagcaccagcagcctggacgccgtgctgagccaggacctgatcgtggccgacggccccgccgtggaggtgggcgacagcctggaggtggcctacaccggctggctgttccagaaccacgtgctgggccaggtgttcgacagcaccgccaacaaggacaagctgctgagactgaagctgggcagcggcaaggtgatcaagggctgggaggacggcatgctgggcatgaagaagggcggcaagagactgctgatcgtgccccccgcctgcgccgtgggcagcgagggcgtgatcggctggacccaggccaccgacagcatcctggtgttcgaggtggaggtgagaagagtgaagttcgccagagacagcggcagcgacggccacagcgtgagcagcagagacagcgccgcccccagccccatccccggcgccgacaacctgagcgccgaccccgtggtgagcccccccaccagcatccccttcaagagcggcgagcccgccctgagaaccaagagcaacagcctgagcgagcagctggccatcaacaccagccccgacgccgtgaaggccaagctgatcagcagaatggccaagatgggccagcccatgctgcccatcctgcccccccagctggacagcaacgacagcgagatcgaggacgtgaacaccctgcagggcggcggccagcccgtggtgacccccagcgtgcagcccagcctgcaccccgcccaccccgccctgccccagatgaccagccaggccccccagcccagcgtgaccggcctgcaggcccccagcgccgccctgatgcaggtgagcagcctggacagccacagcgccgtgagcggcaacgcccagagcttccagccctacgccggcatgcaggcctacgcctacccccaggccagcgccgtgaccagccagctgcagcccgtgagacccctgtaccccgcccccctgagccagcccccccacttccagggcagcggcgacatggccagcttcctgatgaccgaggccagacagcacaacaccgagatcagaatggccgtgagcaaggtggccgacaagatggaccacctgatgaccaaggtggaggagctgcagaagcacagcgccggcaacagcatgctgatccccagcatgagcgtgaccatggagaccagcatgatcatgagcaacatccagagaatcatccaggagaacgagagactgaagcaggagatcctggagaagagcaacagaatcgaggagcagaacgacaagatcagcgagctgatcgagagaaaccagagatacgtggagcagagcaacctgatgatggagaagagaaacaacagcctgcagaccgccaccgagaacacccaggccagagtgctgcacgccgagcaggagaaggccaaggtgaccgaggagctggccgccgccaccgcccaggtgagccacctgcagctgaagatgaccgcccaccagaagaaggagaccgagctgcagatgcagctgaccgagagcctgaaggagaccgacctgctgagaggccagctgaccaaggtgcaggccaagctgagcgagctgcaggagaccagcgagcaggcccagagcaagttcaagagcgagaagcagaacagaaagcagctggagctgaaggtgaccagcctggaggaggagctgaccgacctgagagtggagaaggagagcctggagaagaacctgagcgagagaaagaagaagagcgcccaggagagaagccaggccgaggaggagatcgacgagatcagaaagagctaccaggaggagctggacaagctgagacagctgctgaagaagaccagagtgagcaccgaccaggccgccgccgagcagctgagcctggtgcaggccgagctgcagacccagtgggaggccaagtgcgagcacctgctggccagcgccaaggacgagcacctgcagcagtaccaggaggtgtgcgcccagagagacgcctaccagcagaagctggtgcagctgcaggagaagtgcctggccctgcaggcccagatcaccgccctgaccaagcagaacgagcagcacatcaaggagctggagaagaacaagagccagatgagcggcgtggaggccgccgccagcgaccccagcgagaaggtgaagaagatcatgaaccaggtgttccagagcctgagaagagagttcgagctggaggagagctacaacggcagaaccatcctgggcaccatcatgaacaccatcaagatggtgaccctgcagctgctgaaccagcaggagcaggagaaggaggagagcagcagcgaggaggaggaggagaaggccgaggagagacccagaagacccagccaggagcagagcgccagcgccagcagcggccagccccaggcccccctgaacagagagagacccgagagccccatggtgcccagcgagcaggtggtggaggaggccgtgcccctgcccccccaggccctgaccaccagccaggacggccacagaagaaagggcgacagcgaggccgaggccctgagcgagatcaaggacggcagcctgccccccgagctgagctgcatccccagccacagagtgctgggcccccccaccagcatcccccccgagcccctgggccccgtgagcatggacagcgagtgcgaggagagcctggccgccagccccatggccgccaagcccgacaaccccagcggcaaggtgtgcgtgagagaggtggcccccgacggccccctgcaggagagcagcaccagactgagcctgaccagcgaccccgaggagggcgaccccctggccctgggccccgagagccccggcgagccccagcccccccagctgaagaaggacgacgtgaccagcagcaccggcccccacaaggagctgagcagcaccgaggccggcagcaccgtggccggcgccgccctgagacccagccaccacagccagagaagcagcctgagcggcgacgaggaggacgagctgttcaagggcgccaccctgaaggccctgagacccaaggcccagcccgaggaggaggacgaggacgaggtgagcatgaagggcagacccccccccacccccctgttcggcgacgacgacgacgacgacgacatcgactggctgggctag

SEQ ID NO: 9286 - DNA, 6978 bp, Homo sapiens
  source 1..6978: mol_type = genomic DNA
atgaagaagggcagccagcagaagatcttcagcaaggccaagatccccagcagcagccacagccccatccccagcagcatgagcaacatgagaagcagaagcctgagccccctgatcggcagcgagaccctgcccttccacagcggcggccagtggtgcgagcaggtggagatcgccgacgagaacaacatgctgctggactaccaggaccacaagggcgccgacagccacgccggcgtgagatacatcaccgaggccctgatcaagaagctgaccaagcaggacaacctggccctgatcaagagcctgaacctgagcctgagcaaggacggcggcaagaagttcaagtacatcgagaacctggagaagtgcgtgaagctggaggtgctgaacctgagctacaacctgatcggcaagatcgagaagctggacaagctgctgaagctgagagagctgaacctgagctacaacaagatcagcaagatcgagggcatcgagaacatgtgcaacctgcagaagctgaacctggccggcaacgagatcgagcacatccccgtgtggctgggcaagaagctgaagagcctgagagtgctgaacctgaagggcaacaagatcagcagcctgcaggacatcagcaagctgaagcccctgcaggacctgatcagcctgatcctggtggagaaccccgtggtgaccctgccccactacctgcagttcaccatcttccacctgagaagcctggagagcctggagggccagcccgtgaccacccaggacagacaggaggccttcgagagattcagcctggaggaggtggagagactggagagagacctggagaagaagatgatcgagaccgaggagctgaagagcaagcagaccagattcctggaggagatcaagaaccaggacaagctgaacaagagcctgaaggaggaggccatgctgcagaagcagagctgcgaggagctgaagagcgacctgaacaccaagaacgagctgctgaagcagaagaccatcgagctgaccagagcctgccagaagcagtacgagctggagcaggagctggccttctacaagatcgacgccaagttcgagcccctgaactactaccccagcgagtacgccgagatcgacaaggcccccgacgagagcccctacatcggcaagagcagatacaagagaaacatgttcgccaccgagagctacatcatcgacagcgcccaggccgtgcagatcaagaagatggagcccgacgagcagctgagaaacgaccacatgaacctgagaggccacacccccctggacacccagctggaggacaaggagaagaagatcagcgccgcccagaccagactgagcgagctgcacgacgagatcgagaaggccgagcagcagatcctgagagccaccgaggagttcaagcagctggaggaggccatccagctgaagaagatcagcgaggccggcaaggacctgctgtacaagcagctgagcggcagactgcagctggtgaacaagctgagacaggaggccctggacctggagctgcagatggagaagcagaagcaggagatcgccggcaagcagaaggagatcaaggacctgcagatcgccatcgacagcctggacagcaaggaccccaagcacagccacatgaaggcccagaagagcggcaaggagcagcagctggacatcatgaacaagcagtaccagcagctggagagcagactggacgagatcctgagcagaatcgccaaggagaccgaggagatcaaggacctggaggagcagctgaccgagggccagatcgccgccaacgaggccctgaagaaggacctggagggcgtgatcagcggcctgcaggagtacctgggcaccatcaagggccaggccacccaggcccagaacgagtgcagaaagctgagagacgagaaggagaccctgctgcagagactgaccgaggtggagcaggagagagaccagctggagatcgtggccatggacgccgagaacatgagaaaggagctggccgagctggagagcgccctgcaggagcagcacgaggtgaacgccagcctgcagcagacccagggcgacctgagcgcctacgaggccgagctggaggccagactgaacctgagagacgccgaggccaaccagctgaaggaggagctggagaaggtgaccagactgacccagctggagcagagcgccctgcaggccgagctggagaaggagagacaggccctgaagaacgccctgggcaaggcccagttcagcgaggagaaggagcaggagaacagcgagctgcacgccaagctgaagcacctgcaggacgacaacaacctgctgaagcagcagctgaaggacttccagaaccacctgaaccacgtggtggacggcctggtgagacccgaggaggtggccgccagagtggacgagctgagaagaaagctgaagctgggcaccggcgagatgaacatccacagccccagcgacgtgctgggcaagagcctggccgacctgcagaagcagttcagcgagatcctggccagaagcaagtgggagagagacgaggcccaggtgagagagagaaagctgcaggaggagatggccctgcagcaggagaagctggccaccggccaggaggagttcagacaggcctgcgagagagccctggaggccagaatgaacttcgacaagagacagcacgaggccagaatccagcagatggagaacgagatccactacctgcaggagaacctgaagagcatggaggagatccagggcctgaccgacctgcagctgcaggaggccgacgaggagaaggagagaatcctggcccagctgagagagctggagaagaagaagaagctggaggacgccaagagccaggagcaggtgttcggcctggacaaggagctgaagaagctgaagaaggccgtggccaccagcgacaagctggccaccgccgagctgaccatcgccaaggaccagctgaagagcctgcacggcaccgtgatgaagatcaaccaggagagagccgaggagctgcaggaggccgagagattcagcagaaaggccgcccaggccgccagagacctgaccagagccgaggccgagatcgagctgctgcagaacctgctgagacagaagggcgagcagttcagactggagatggagaagaccggcgtgggcaccggcgccaacagccaggtgctggagatcgagaagctgaacgagaccatggagagacagagaaccgagatcgccagactgcagaacgtgctggacctgaccggcagcgacaacaagggcggcttcgagaacgtgctggaggagatcgccgagctgagaagagaggtgagctaccagaacgactacatcagcagcatggccgaccccttcaagagaagaggctactggtacttcatgccccccccccccagcagcaaggtgagcagccacagcagccaggccaccaaggacagcggcgtgggcctgaagtacagcgccagcacccccgtgagaaagcccagacccggccagcaggacggcaaggagggcagccagcccccccccgccagcggctactgggtgtacagccccatcagaagcggcctgcacaagctgttccccagcagagacgccgacagcggcggcgacagccaggaggagagcgagctggacgaccaggaggagccccccttcgtgcccccccccggctacatgatgtacaccgtgctgcccgacggcagccccgtgccccagggcatggccctgtacgccccccccccccccctgcccaacaacagcagacccctgacccccggcaccgtggtgtacggccccccccccgccggcgcccccatggtgtacggcccccccccccccaacttcagcatccccttcatccccatgggcgtgctgcactgcaacgtgcccgagcaccacaacctggagaacgaggtgagcagactggaggacatcatgcagcacctgaagagcaagaagagagaggagagatggatgagagccagcaagagacagagcgagaaggagatggaggagctgcaccacaacatcgacgacctgctgcaggagaagaagagcctggagtgcgaggtggaggagctgcacagaaccgtgcagaagagacagcagcagaaggacttcatcgacggcaacgtggagagcctgatgaccgagctggagatcgagaagagcctgaagcaccacgaggacatcgtggacgagatcgagtgcatcgagaagaccctgctgaagagaagaagcgagctgagagaggccgacagactgctggccgaggccgagagcgagctgagctgcaccaaggagaagaccaagaacgccgtggagaagttcaccgacgccaagagaagcctgctgcagaccgagagcgacgccgaggagctggagagaagagcccaggagaccgccgtgaacctggtgaaggccgaccagcagctgagaagcctgcaggccgacgccaaggacctggagcagcacaagatcaagcaggaggagatcctgaaggagatcaacaagatcgtggccgccaaggacagcgacttccagtgcctgagcaagaagaaggagaagctgaccgaggagctgcagaagctgcagaaggacatcgagatggccgagagaaacgaggaccaccacctgcaggtgctgaaggagagcgaggtgctgctgcaggccaagagagccgagctggagaagctgaagagccaggtgaccagccagcagcaggagatggccgtgctggacagacagctgggccacaagaaggaggagctgcacctgctgcagggcagcatggtgcaggccaaggccgacctgcaggaggccctgagactgggcgagaccgaggtgaccgagaagtgcaaccacatcagagaggtgaagagcctgctggaggagctgagcttccagaagggcgagctgaacgtgcagatcagcgagagaaagacccagctgaccctgatcaagcaggagatcgagaaggaggaggagaacctgcaggtggtgctgagacagatgagcaagcacaagaccgagctgaagaacatcctggacatgctgcagctggagaaccacgagctgcagggcctgaagctgcagcacgaccagagagtgagcgagctggagaagacccaggtggccgtgctggaggagaagctggagctggagaacctgcagcagatcagccagcagcagaagggcgagatcgagtggcagaagcagctgctggagagagacaagagagagatcgagagaatgaccgccgagagcagagccctgcagagctgcgtggagtgcctgagcaaggagaaggaggacctgcaggagaagtgcgacatctgggagaagaagctggcccagaccaagagagtgctggccgccgccgaggagaacagcaagatggagcagagcaacctggagaagctggagctgaacgtgagaaagctgcagcaggagctggaccagctgaacagagacaagctgagcctgcacaacgacatcagcgccatgcagcagcagctgcaggagaagagagaggccgtgaacagcctgcaggaggagctggccaacgtgcaggaccacctgaacctggccaagcaggacctgctgcacaccaccaagcaccaggacgtgctgctgagcgagcagaccagactgcagaaggacatcagcgagtgggccaacagattcgaggactgccagaaggaggaggagaccaagcagcagcagctgcaggtgctgcagaacgagatcgaggagaacaagctgaagctggtgcagcaggagatgatgttccagagactgcagaaggagagagagagcgaggagagcaagctggagaccagcaaggtgaccctgaaggagcagcagcaccagctggagaaggagctgaccgaccagaagagcaagctggaccaggtgctgagcaaggtgctggccgccgaggagagagtgagaaccctgcaggaggaggagagatggtgcgagagcctggagaagaccctgagccagaccaagagacagctgagcgagagagagcagcagctggtggagaagagcggcgagctgctggccctgcagaaggaggccgacagcatgagagccgacttcagcctgctgagaaaccagttcctgaccgagagaaagaaggccgagaagcaggtggccagcctgaaggaggccctgaagatccagagaagccagctggagaagaacctgctggagcagaagcaggagaacagctgcatccagaaggagatggccaccatcgagctggtggcccaggacaaccacgagagagccagaagactgatgaaggagctgaaccagatgcagtacgagtacaccgagctgaagaagcagatggccaaccagaaggacctggagagaagacagatggagatcagcgacgccatgagaaccctgaagagcgaggtgaaggacgagatcagaaccagcctgaagaacctgaaccagttcctgcccgagctgcccgccgacctggaggccatcctggagagaaacgagaacctggagggcgagctggagagcctgaaggagaacctgcccttcaccatgaacgagggccccttcgaggagaagctgaacttcagccaggtgcacatcatggacgagcactggagaggcgaggccctgagagagaagctgagacacagagaggacagactgaaggcccagctgagacactgcatgagcaagcaggccgaggtgctgatcaagggcaagagacagaccgagggcaccctgcacagcctgagaagacaggtggacgccctgggcgagctggtgaccagcaccagcgccgacagcgccagcagccccagcctgagccagctggagagcagcctgaccgaggacagccagctgggccagaaccaggagaagaacgccagcgccagatag

SEQ ID NO: 9287 - DNA, 2811 bp, Homo sapiens
  source 1..2811: mol_type = genomic DNA
atggagcccgacatcatcagaatgtacagcagcagccccccccccctggacaacggcgccgaggacgacgacgacgacgagttcggcgagttcggcggcttcagcgaggtgagccccagcggcgtgggcttcgtggacttcgacacccccgactacaccagacccaaggaggagttcgtgcccagcaaccacttcatgcccatccacgagttcagcgagaacgtggacagcctgaccagcttcaagagcatcaagaacggcaacgacaaggacatcaccgccgagctgagcgcccccgtgaagggccagagcgacgtgctgctgagcaccaccagcaaggagatcatcagcagcgagatgctggccaccagcatcgacggcatggagagacccggcaacctgaacaaggtggtggagcagagacagaacgtgggcaccctggagagcttcagccccggcgacttcagaaccaacatgaacgtggtgcaccagaacaagcagctggagagctgcaacggcgagaagcccccctgcctggagatcctgaccaacggcttcgccgtgctggagaccgtgaacccccagggcaccgacgacctggacaacgtggccgacagcaagggcagaaagcccctgagcacccacagcaccgagtacaacctggacagcgtgcccagccccgccgaggagttcgccgacttcgccaccttcagcaagaaggagagaatccagctggaggagatcgagtgcgccgtgctgaacgacagagaggccctgaccatcagagagaacaacaagatcaacagagtgaacgagctgaacagcgtgaaggaggtggccctgggcagaagcctggacaacaagggcgacaccgacggcgaggaccaggtgtgcgtgagcgagatcagcatcgtgaccaacagaggcttcagcgtggagaagcagggcctgcccaccctgcagcaggacgagttcctgcagagcggcgtgcagagcaaggcctggagcctggtggacagcgccgacaacagcgaggccatcagaagagagcagtgcaagaccgaggagaagctggacctgctgaccagcaagtgcgcccacctgtgcatggacagcgtgaagaccagcgacgacgaggtgggcagccccaaggaggagagcagaaagttcaccaacttccagagccccaacatcgaccccaccgaggagaacgacctggacgacagcctgagcgtgaagaacggcgacagcagcaacgacttcgtgacctgcaacgacatcaacgaggacgacttcggcgacttcggcgacttcggcagcgccagcggcagcaccccccccttcgtgaccggcacccaggacagcatgagcgacgccaccttcgaggagagcagcgagcacttcccccacttcagcgagcccggcgacgacttcggcgagttcggcgacatcaacgccgtgagctgccaggaggagaccatcctgaccaagagcgacctgaagcagaccagcgacaacctgagcgaggagtgccagctggccagaaagagcagcggcaccggcaccgagcccgtggccaagctgaagaacggccaggagggcgagatcggccacttcgacagcgtgcccaacatccaggacgactgcaacggcttccaggacagcgacgacttcgccgacttcagcagcgccggccccagccaggtggtggactggaacgccttcgaggacgagcagaaggacagctgcagctgggccgccttcggcgaccagcaggccaccgagagccaccacagaaaggaggcctggcagagccacagaaccgacgagaacatcgacacccccggcacccccaagacccacagcgtgcccagcgccaccagcaagggcgccgtggccagcggccacctgcaggagagcgccaccagcgtgcagaccgccctgctgaacagactggagagaatcttcgaggcctgcttccccagcatcctggtgcccgacgccgaggaggaggtgaccagcctgaagcacctgctggagaccagcaccctgcccatcaagaccagagaggccctgcccgagagcggcgagctgctggacgtgtggaccgagctgcaggacatccacgacgcccacggcctgagataccagtggggcggcagccacagcaacaagaagctgctgagcagcctgggcatcgacaccagaaacatcctgttcaccggcaacaagaagcagcccgtgatcgtgcccatgtacgccgccggcctgggcatgctggagcccaccaaggagcccctgaagcccctgagcgccgccgagaagatcgccagcatcggccagaccgccaccatgagccccgacatgaacacctgcaccagcgaccagttccaggagagcctgccccccgtgcagttcgactggagcagcagcggcctgaccaaccccctggacgccagcggcggcagcaccctgctgaacctggacttcttcggccccgtggacgacagcagcagcagcagcagcaccaccatccccggcgtggaccccgagctgtacgagctgaccaccagcaagctggagatcagcaccagcagcctgaaggtgaccgacgccttcgccagactgatgagcaccgtggagaagaccagcaccagcaccagaaagcccaagagagaggagcacctgagcgaggaggccatcaaggtgatcgccggcctgcccgacctgaccttcatgcacgccaaggtgctgatgttccccgccaccctgacccccagcaccagcagccaggagaaggccgacggctag

SEQ ID NO: 9288 - DNA, 2730 bp, Homo sapiens
  source 1..2730: mol_type = genomic DNA
atggagcccgacatcatcagaatgtacagcagcagccccccccccctggacaacggcgccgaggacgacgacgacgacgagttcggcgagttcggcggcttcagcgaggtgagccccagcggcgtgggcttcgtggacttcgacacccccgactacaccagacccaaggaggagttcgtgcccagcaaccacttcatgcccatccacgagttcagcgagaacgtggacagcctgaccagcttcaagagcatcaagaacggcaacgacaaggacatcaccgccgagctgagcgcccccgtgaagggccagagcgacgtgctgctgagcaccaccagcaaggagatcatcagcagcgagatgctggccaccagcatcgacggcatggagagacccggcaacctgaacaaggtggtggagcagagacagaacgtgggcaccctggagagcttcagccccggcgacttcagaaccaacatgaacgtggtgcaccagaacaagcagctggagagctgcaacggcgagaagcccccctgcctggagatcctgaccaacggcttcgccgtgctggagaccgtgaacccccagggcaccgacgacctggacaacgtggccgacagcaagggcagaaagcccctgagcacccacagcaccgagtacaacctggacagcgtgcccagccccgccgaggagttcgccgacttcgccaccttcagcaagaaggagagaatccagctggaggagatcgagtgcgccgtgctgaacgacagagaggccctgaccatcagagagaacaacaagatcaacagagtgaacgagctgaacagcgtgaaggaggtggccctgggcagaagcctggacaacaagggcgacaccgacggcgaggaccaggtgtgcgtgagcgagatcagcatcgtgaccaacagaggcttcagcgtggagaagcagggcctgcccaccctgcagcaggacgagttcctgcagagcggcgtgcagagcaaggcctggagcctggtggacagcgccgacaacagcgaggccatcagaagagagcagtgcaagaccgaggagaagctggacctgctgaccagcaagtgcgcccacctgtgcatggacagcgtgaagaccagcgacgacgaggtgggcagccccaaggaggagagcagaaagttcaccaacttccagagccccaacatcgaccccaccgaggagaacgacctggacgacagcctgagcgtgaagaacggcgacagcagcaacgacttcgtgacctgcaacgacatcaacgaggacgacttcggcgacttcggcgacttcggcagcgccagcggcagcaccccccccttcgtgaccggcacccaggacagcatgagcgacgccaccttcgaggagagcagcgagcacttcccccacttcagcgagcccggcgacgacttcggcgagttcggcgacatcaacgccgtgagctgccaggaggagaccatcctgaccaagagcgacctgaagcagaccagcgacaacctgagcgaggagtgccagctggccagaaagagcagcggcaccggcaccgagcccgtggccaagctgaagaacggccaggagggcgagatcggccacttcgacagcgtgcccaacatccaggacgactgcaacggcttccaggacagcgacgacttcgccgacttcagcagcgccggccccagccaggtggtggactggaacgccttcgaggacgagcagaaggacagctgcagctgggccgccttcggcgaccagcaggccaccgagagccaccacagaaaggaggcctggcagagccacagaaccgacgagaacatcgacacccccggcacccccaagacccacagcgtgcccagcgccaccagcaagggcgccgtggccagcggccacctgcaggagagcgccaccagcgtgcagaccgccctgctgaacagactggagagaatcttcgaggcctgcttccccagcatcctggtgcccgacgccgaggaggaggtgaccagcctgaagcacctgctggagaccagcaccctgcccatcaagaccagagaggccctgcccgagagcggcgagctgctggacgtgtggaccgagctgcaggacatccacgacgcccacggcctgagataccagtggggcggcagccacagcaacaagaagctgctgagcagcctgggcatcgacaccagaaacatcctgttcaccggcaacaagaagcagcccgtgatcgtgcccatgtacgccgccggcctgggcatgctggagcccaccaaggagcccctgaagcccctgagcgccgccgagaagatcgccagcatcggccagaccgccaccatgagccccgacatgaacacctgcaccagcgaccagttccaggagagcctgccccccgtgcagttcgactggagcagcagcggcctgaccaaccccctggacggcgtggaccccgagctgtacgagctgaccaccagcaagctggagatcagcaccagcagcctgaaggtgaccgacgccttcgccagactgatgagcaccgtggagaagaccagcaccagcaccagcagaaagcccaagagagaggagcacctgagcgaggaggccatcaaggtgatcgccggcctgcccgacctgaccttcatgcacgccaaggtgctgatgttccccgccaccctgacccccagcaccagcagccaggagaaggccgacggctag

SEQ ID NO: 9289 - DNA, 306 bp, Homo sapiens
  source 1..306: mol_type = genomic DNA
atggtgtgcgagaagtgcgagaagaagctgggcaccgtgatcacccccgacacctggaaggacggcgccagaaacaccaccgagagcggcggcagaaagctgaacgagaacaaggccctgaccagcaagaaggccagattcgacccctacggcaagaacaagttcagcacctgcagaatctgcaagagcagcgtgcaccagcccggcagccactactgccagggctgcgcctacaagaagggcatctgcgccatgtgcggcaagaaggtgctggacaccaagaactacaagcagaccagcgtgtag

SEQ ID NO: 9290 - DNA, 1467 bp, Homo sapiens
  source 1..1467: mol_type = genomic DNA
atgaacttcacccccacccacacccccgtgtgcagaaagagaaccgtggtgagcaagagaggcgtggccgtgagcggccccaccaagagaagaggcatggccgacagcctggagagcacccccctgcccagccccgaggacagactggccaagctgcaccccagcaaggagctgctggagtactaccagaagaagatggccgagtgcgaggccgagaacgaggacctgctgaagaagctggagctgtacaaggaggcctgcgagggccagcacaagctggagtgcgacctgcagcagagagaggaggagatcgccgagctgcagaaggccctgagcgacatgcaggtgtgcctgttccaggagagagagcacgtgctgagactgtacagcgagaacgacagactgagaatcagagagctggaggacaagaagaagatccagaacctgctggccctggtgggcaccgacgccggcgaggtgacctacttctgcaaggagcccccccacaaggtgaccatcctgcagaagaccatccaggccgtgggcgagtgcgagcagagcgagagcagcgccttcaaggccgaccccaagatcagcaagagaagacccagcagagagagaaaggagagcagcgagcactaccagagagacatccagaccctgatcctgcaggtggaggccctgcaggcccagctgggcgagcagaccaagctgagcagagagcagatcgagggcctgatcgaggacagaagaatccacctggaggagatccaggtgcagcaccagagaaaccagaacaagatcaaggagctgaccaagaacctgcaccacacccaggagctgctgtacgagagcaccaaggacttcctgcagctgagaagcgagaaccagaacaaggagaagagctggatgctggagaaggacaacctgatgagcaagatcaagcagtacagagtgcagtgcaagaagaaggaggacaagatcggcaaggtgctgcccgtgatgcacgagagccaccacgcccagagcgagtacatcaagagcctgaaggacaagctggtgcaggagaagaagctgagcaacatgtaccaggagcagtgcatcagcctggaggaggagctggccagaatcagagaggaggagggcatgagaagagagatcttcaaggacagaaccaacaagatgggcaagagactgcagatcatgaccaagagatacgaggccctggagagaagaagaatcctggaggtggagggcttcaagaccgacatcaaggtgctgagacagaagctgaaggacctggagcagatgctgtacaaggccaccgtgaacgccagagccaaccaggacctggccctgctgtgcgaggtgagagacagcaacagaagagcccacaagatccagggcgagctgaagaacctgaagagcaaggtgttcggcctggagaacgagctgagactgtgctag

SEQ ID NO: 9291 - DNA, 258 bp, Homo sapiens
  source 1..258: mol_type = genomic DNA
atgagcaaggtgagcttcaagatcaccctgaccagcgaccccagactgccctacaaggtgctgagcgtgcccgagagcacccccttcaccgccgtgctgaagttcgccgccgaggagttcaaggtgcccgccgccaccagcgccatcatcaccaacgacggcatcggcatcaaccccgcccagaccgccggcaacgtgttcctgaagcacggcagcgagctgagaatcatccccagagacagagtgggcagctgctag

SEQ ID NO: 9292 - DNA, 585 bp, Homo sapiens
  source 1..585: mol_type = genomic DNA
atggacgaggacggcctgcccctgatgggcagcggcatcgacctgaccaaggtgcccgccatccagcagaagagaaccgtggccttcctgaaccagttcgtggtgcacaccgtgcagttcctgaacagattcagcaccgtgtgcgaggagaagctggccgacctgagcctgagaatccagcagatcgagaccaccctgaacatcctggacgccaagctgagcagcatccccggcctggacgacgtgaccgtggaggtgagccccctgaacgtgaccagcgtgaccaacggcgcccaccccgaggccaccagcgagcagccccagcagaacagcacccaggacagcggcctgcaggagagcgaggtgagcgccgagaacatcctgaccgtggccaaggaccccagatacgccagatacctgaagatggtgcaggtgggcgtgcccgtgatggccatcagaaacaagatgatcagcgagggcctggaccccgacctgctggagagacccgacgcccccgtgcccgacggcgagagcgagaagaccgtggaggagagcagcgacagcgagagcagcttcagcgactag

SEQ ID NO: 9293 - DNA, 2226 bp, Homo sapiens
  source 1..2226: mol_type = genomic DNA
atgggcccccccggccccgccctgcccgccaccatgaacaacagcagcagcgagaccagaggccacccccacagcgccagcagccccagcgagagagtgttccccatgcccctgcccagaaaggcccccctgaacatccccggcacccccgtgctggaggacttcccccagaacgacgacgagaaggagagactgcagagaagaagaagcagagtgttcgacctgcagttcagcaccgacagccccagactgctggccagccccagcagcagaagcatcgacatcagcgccaccatccccaagttcaccaacacccagatcaccgagcactacagcacctgcatcaagctgagcaccgagaacaagatcaccaccaagaacgccttcggcctgcacctgatcgacttcatgagcgagatcctgaagcagaaggacaccgagcccaccaacttcaaggtggccgccggcaccctggacgccagcaccaagatctacgccgtgagagtggacgccgtgcacgccgacgtgtacagagtgctgggcggcctgggcaaggacgcccccagcctggaggaggtggagggccacgtggccgacggcagcgccaccgagatgggcaccaccaagaaggccgtgaagcccaagaagaagcacctgcacagaaccatcgagcagaacatcaacaacctgaacgtgagcgaggccgacagaaagtgcgagatcgaccccatgttccagaagaccgccgccagcttcgacgagtgcagcaccgccggcgtgttcctgagcaccctgcactgccaggactacagaagcgagctgctgttccccagcgacgtgcagaccctgagcaccggcgagcccctggagctgcccgagctgggctgcgtggagatgaccgacctgaaggcccccctgcagcagtgcgccgaggacagacagatctgccccagcctggccggcttccagttcacccagtgggacagcgagacccacaacgagagcgtgagcgccctggtggacaagttcaagaagaacgaccaggtgttcgacatcaacgccgaggtggacgagagcgactgcggcgacttccccgacggcagcctgggcgacgacttcgacgccaacgacgagcccgaccacaccgccgtgggcgaccacgaggagttcagaagctggaaggagccctgccaggtgcagagctgccaggaggagatgatcagcctgggcgacggcgacatcagaaccatgtgccccctgctgagcatgaagcccggcgagtacagctacttcagccccagaaccatgagcatgtgggccggccccgaccactggagattcagacccagaagaaagcaggacgcccccagccagagcgagaacaagaagaagagcaccaagaaggacttcgagatcgacttcgaggacgacatcgacttcgacgtgtacttcagaaagaccaaggccgccaccatcctgaccaagagcaccctggagaaccagaactggagagccaccaccctgcccaccgacttcaactacaacgtggacaccctggtgcagctgcacctgaagcccggcaccagactgctgaagatggcccagggccacagagtggagaccgagcactacgaggagatcgaggactacgactacaacaaccccaacgacaccagcaacttctgccccggcctgcaggccgccgacagcgacgacgaggacctggacgacctgttcgtgggccccgtgggcaacagcgacctgagcccctacccctgccacccccccaagaccgcccagcagaacggcgacacccccgaggcccagggcctggacatcaccacctacggcgagagcaacctggtggccgagccccagaaggtgaacaagatcgagatccactacgccaagaccgccaagaagatggacatgaagaagctgaagcagagcatgtggagcctgctgaccgccctgagcggcaaggaggccgacgccgaggccaaccacagagaggccggcaaggaggccgccctggccgaggtggccgacgagaagatgctgagcggcctgaccaaggacctgcagagaagcctgccccccgtgatggcccagaacctgagcatccccctggccttcgcctgcctgctgcacctggccaacgagaagaacctgaagctggagggcaccgaggacctgagcgacgtgctggtgagacagggcgactag

SEQ ID NO: 9294 - DNA, 510 bp, Homo sapiens
  source 1..510: mol_type = genomic DNA
atgaagggcagcagaatcgagctgggcgacgtgaccccccacaacatcaagcagctgaagagactgaaccaggtgatcttccccgtgagctacaacgacaagttctacaaggacgtgctggaggtgggcgagctggccaagctggcctacttcaacgacatcgccgtgggcgccgtgtgctgcagagtggaccacagccagaaccagaagagactgtacatcatgaccctgggctgcctggccccctacagaagactgggcatcggcaccaagatgctgaaccacgtgctgaacatctgcgagaaggacggcaccttcgacaacatctacctgcacgtgcagatcagcaacgagagcgccatcgacttctacagaaagttcggcttcgagatcatcgagaccaagaagaactactacaagagaatcgagcccgccgacgcccacgtgctgcagaagaacctgaaggtgcccagcggccagaacgccgacgtgcagaagaccgacaactag

SEQ ID NO: 9295 - DNA, 1245 bp, Homo sapiens
  source 1..1245: mol_type = genomic DNA
atggccgccgccccccccagctactgcttcgtggccttcccccccagagccaaggacggcctggtggtgttcggcaagaacagcgccagacccagagacgaggtgcaggaggtggtgtacttcagcgccgccgaccacgagcccgagagcaaggtggagtgcacctacatcagcatcgaccaggtgcccagaacctacgccatcatgatcagcagacccgcctggctgtggggcgccgagatgggcgccaacgagcacggcgtgtgcatcgccaacgaggccatcaacaccagagagcccgccgccgagatcgaggccctgctgggcatggacctggtgagactgggcctggagagaggcgagaccgccaaggaggccctggacgtgatcgtgagcctgctggaggagcacggccagggcggcaactacttcgaggacgccaacagctgccacagcttccagagcgcctacctgatcgtggacagagacgaggcctgggtgctggagaccatcggcaagtactgggccgccgagaaggtgaccgagggcgtgagatgcatctgcagccagctgagcctgaccaccaagatggacgccgagcaccccgagctgagaagctacgcccagagccagggctggtggaccggcgagggcgagttcaacttcagcgaggtgttcagccccgtggaggaccacctggactgcggcgccggcaaggacagcctggagaagcaggaggagagcatcaccgtgcagaccatgatgaacaccctgagagacaaggccagcggcgtgtgcatcgacagcgagttcttcctgaccaccgccagcggcgtgagcgtgctgccccagaacagaagcagcccctgcatccactacttcaccggcacccccgaccccagcagaagcatcttcaagcccttcatcttcgtggacgacgtgaagctggtgcccaagacccagagcccctgcttcggcgacgacgaccccgccaagaaggagcccagattccaggagaagcccgacagaagacacgagctgtacaaggcccacgagtgggccagagccatcatcgagagcgaccaggagcagggcagaaagctgagaagcaccatgctggagctggagaagcagggcctggaggccatggaggagatcctgaccagcagcgagcccctggaccccgccgaggtgggcgacctgttctacgactgcgtggacaccgagatcaagttcttcaagtag

SEQ ID NO: 9296 - DNA, 2031 bp, Homo sapiens
  source 1..2031: mol_type = genomic DNA
atgagcgaccagatcaagttcatcatggacagcctgaacaaggagcccttcagaaagaactacaacctgatcaccttcgacagcctggagcccatgcagctgctgcaggtgctgagcgacgtgctggccgagatcgaccccaagcagctggtggacatcagagaggagatgcccgagcagaccgccaagagaatgctgagcctgctgggcatcctgaagtacaagcccagcggcaacgccaccgacatgagcaccttcagacagggcctggtgatcggcagcaagcccgtgatctaccccgtgctgcactggctgctgcagagaaccaacgagctgaagaagagagcctacctggccagattcctgatcaagctggaggtgcccagcgagttcctgcaggacgagaccgtggccgacaccaacaagcagtacgaggagctgatggaggccttcaagaccctgcacaaggagtacgagcagctgaagatcagcggcttcagcaccgccgagatcagaaaggacatcagcgccatggaggaggagaaggaccagctgatcaagagagtggagcacctgaagaagagagtggagaccgcccagaaccaccagtggatgctgaagatcgccagacagctgagagtggagaaggagagagaggagtacctggcccagcagaagcaggagcagaagaaccagctgttccacgccgtgcagagactgcagagagtgcagaaccagctgaagagcatgagacaggccgccgccgacgccaagcccgagagcctgatgaagagactggaggaggagatcaagttcaacctgtacatggtgaccgagaagttccccaaggagctggagaacaagaagaaggagctgcacttcctgcagaaggtggtgagcgagcccgccatgggccacagcgacctgctggagctggagagcaagatcaacgagatcaacaccgagatcaaccagctgatcgagaagaagatgatgagaaacgagcccatcgagggcaagctgagcctgtacagacagcaggccagcatcatcagcagaaagaaggaggccaaggccgaggagctgcaggaggccaaggagaagctggccagcctggagagagaggccagcgtgaagagaaaccagaccagagagttcgacggcaccgaggtgctgaagggcgacgagttcaagagatacgtgaacaagctgagaagcaagagcaccgtgttcaagaagaagcaccagatcatcgccgagctgaaggccgagttcggcctgctgcagagaaccgaggagctgctgaagcagagacacgagaacatccagcagcagctgcagaccatggaggagaagaagggcatcagcggctacagctacacccaggaggagctggagagagtgagcgccctgaagagcgaggtggacgagatgaagggcagaaccctggacgacatgagcgagatggtgaagaagctgtacagcctggtgagcgagaagaagagcgccctggccagcgtgatcaaggagctgagacagctgagacagaagtaccaggagctgacccaggagtgcgacgagaagaagagccagtacgacagctgcgccgccggcctggagagcaacagaagcaagctggagcaggaggtgagaagactgagagaggagtgcctgcaggaggagagcagataccactacaccaactgcatgatcaagaacctggaggtgcagctgagaagagccaccgacgagatgaaggcctacatcagcagcgaccagcaggagaagagaaaggccatcagagagcagtacaccaagaacaccgccgagcaggagaacctgggcaagaagctgagagagaagcagaaggtgatcagagagagccacggccccaacatgaagcaggccaagatgtggagagacctggagcagctgatggagtgcaagaagcagtgcttcctgaagcagcagagccagaccagcatcggccaggtgatccaggagggcggcgaggacagactgatcctgtag

SEQ ID NO: 9297 - DNA, 948 bp, Homo sapiens
  source 1..948: mol_type = genomic DNA
atggccttccccgagcccaagcccagaccccccgagctgccccagaagagactgaagaccctggactgcggccagggcgccgtgagagccgtgagattcaacgtggacggcaactactgcctgacctgcggcagcgacaagaccctgaagctgtggaaccccctgagaggcaccctgctgagaacctacagcggccacggctacgaggtgctggacgccgccggcagcttcgacaacagcagcctgtgcagcggcggcggcgacaaggccgtggtgctgtgggacgtggccagcggccaggtggtgagaaagttcagaggccacgccggcaaggtgaacaccgtgcagttcaacgaggaggccaccgtgatcctgagcggcagcatcgacagcagcatcagatgctgggactgcagaagcagaagacccgagcccgtgcagaccctggacgaggccagagacggcgtgagcagcgtgaaggtgagcgaccacgagatcctggccggcagcgtggacggcagagtgagaagatacgacctgagaatgggccagctgttcagcgactacgtgggcagccccatcacctgcacctgcttcagcagagacggccagtgcaccctggtgagcagcctggacagcaccctgagactgctggacaaggacaccggcgagctgctgggcgagtacaagggccacaagaaccaggagtacaagctggactgctgcctgagcgagagagacacccacgtggtgagctgcagcgaggacggcaaggtgttcttctgggacctggtggagggcgccctggccctggccctgcccgtgggcagcggcgtggtgcagagcctggcctaccaccccaccgagccctgcctgctgaccgccatgggcggcagcgtgcagtgctggagagaggaggcctacgaggccgaggacggcgccggctag

SEQ ID NO: 9298 - DNA, 1803 bp, Homo sapiens
  source 1..1803: mol_type = genomic DNA
atggtgctgatcctgggcagaagactgaacagagaggacctgggcgtgagagacagccccgccaccaagagaaaggtgttcgagatggaccccaagagcctgaccggccacgagttcttcgacttcagcagcggcagcagccacgccgagaacatcctgcagatcttcaacgagttcagagacagcagactgttcaccgacgtgatcatctgcgtggagggcaaggagttcccctgccacagagccgtgctgagcgcctgcagcagctacttcagagccatgttctgcaacgaccacagagagagcagagagatgctggtggagatcaacggcatcctggccgaggccatggagtgcttcctgcagtacgtgtacaccggcaaggtgaagatcaccaccgagaacgtgcagtacctgttcgagaccagcagcctgttccagatcagcgtgctgagagacgcctgcgccaagttcctggaggagcagctggacccctgcaactgcctgggcatccagagattcgccgacacccacagcctgaagaccctgttcaccaagtgcaagaacttcgccctgcagaccttcgaggacgtgagccagcacgaggagttcctggagctggacaaggacgagctgatcgactacatctgcagcgacgagctggtgatcggcaaggaggagatggtgttcgaggccgtgatgagatgggtgtacagagccgtggacctgagaagacccctgctgcacgagctgctgacccacgtgagactgcccctgctgcaccccaactacttcgtgcagaccgtggaggtggaccagctgatccagaacagccccgagtgctaccagctgctgcacgaggccagaagataccacatcctgggcaacgagatgatgagccccagaaccagacccagaagaagcaccggctacagcgaggtgatcgtggtggtgggcggctgcgagagagtgggcggcttcaacctgccctacaccgagtgctacgaccccgtgaccggcgagtggaagagcctggccaagctgcccgagttcaccaagagcgagtacgccgtgtgcgccctgagaaacgacatcctggtgagcggcggcagaatcaacagcagagacgtgtggatctacaacagccagctgaacatctggatcagagtggccagcctgaacaagggcagatggagacacaagatggccgtgctgctgggcaaggtgtacgtggtgggcggctacgacggccagaacagactgagcagcgtggagtgctacgacagcttcagcaacagatggaccgaggtggcccccctgaaggaggccgtgagcagccccgccgtgaccagctgcgtgggcaagctgttcgtgatcggcggcggccccgacgacaacacctgcagcgacaaggtgcagagctacgaccccgagaccaacagctggctgctgagagccgccatccccatcgccaagagatgcatcaccgccgtgagcctgaacaacctgatctacgtggccggcggcctgaccaaggccatctactgctacgaccccgtggaggactactggatgcacgtgcagaacaccttcagcagacaggagaactgcggcatgagcgtgtgcaacggcaagatctacatcctgggcggcagaagagagaacggcgaggccaccgacaccatcctgtgctacgaccccgccaccagcatcatcaccggcgtggccgccatgcccagacccgtgagctaccacggctgcgtgaccatccacagatacaacgagaagtgcttcaagctgtag

SEQ ID NO: 9299 - DNA, 810 bp, Homo sapiens
  source 1..810: mol_type = genomic DNA
atgaaccaggaggacctggaccccgacagcaccaccgacgtgggcgacgtgaccaacaccgaggaggagctgatcagagagtgcgaggagatgtggaaggacatggaggagtgccagaacaagctgagcctgatcggcaccgagaccctgaccgacagcaacgcccagctgagcctgctgatcatgcaggtgaagtgcctgaccgccgagctgagccagtggcagaagaagacccccgagaccatccccctgaccgaggacgtgctgatcaccctgggcaaggaggagttccagaagctgagacaggacctggagatggtgctgagcaccaaggagagcaagaacgagaagctgaaggaggacctggagagagagcagagatggctggacgagcagcagcagatcatggagagcctgaacgtgctgcacagcgagctgaagaacaaggtggagaccttcagcgagagcagaatcttcaacgagctgaagaccaagatgctgaacatcaaggagtacaaggagaagctgctgagcaccctgggcgagttcctggaggaccacttccccctgcccgacagaagcgtgaagaagaagaagaagaacatccaggagagcagcgtgaacctgatcaccctgcacgagatgctggagatcctgatcaacagactgttcgacgtgccccacgacccctacgtgaagatcagcgacagcttctggcccccctacgtggagctgctgctgagaaacggcatcgccctgagacaccccgaggaccccaccagaatcagactggaggccttccaccagtag

SEQ ID NO: 9300 - DNA, 1041 bp, Homo sapiens
  source 1..1041: mol_type = genomic DNA
atgtgcgagggccccagcagaatcagcggccccatcccccccgaccccaccctgtgccccgacaactacagaagacccaccagcgcccagggcagactggagggcaacgccctgaagctggacctgctgaccagcgacagagccctggacaccaccgcccccagaggcccctgcatcggccccggcgccggcgagatcctggagagaggccagagaggcgtgggcgacgtgctgctgcagctggagggcatcagcctgggccccggcgccagcctgaagagaaaggaccccaaggaccacgagaaggagaacctgagaagaatcagagagatccagaagagattcagagagcaggagagaagcagagagcagggccagcccagacccctgaaggccctgtggagaagccccaagtacgacaaggtggagagcagagtgaaggcccagctgcaggagcccggccccgccagcggcaccgagagcgcccacttcctgagagcccacagcagatgcggccccggcctgccccccccccacgtgagcagcccccagcccaccccccccggccccgaggccaaggagcccggcctgggcgtggacttcatcagacacaacgccagagccgccaagagagcccccagaagacacagctgcagcctgcaggtgctggcccaggtgctggagcagcagagacaggcccaggagcactacaacgccacccagaagggccacgtgccccactacctgctggagagaagagacctgtggagaagagaggccgaggccagaaagcagagccagcccgaccccgccatgccccccggccacaccagaatgcccgagaaccagagactggagaccctgaccaagctgctgcagagccagagccagctgctgagagagctggtgctgctgcccgccggcgccgacagcctgagagcccagagccacagagccgagctggacagaaagctggtgcaggtggaggaggccatcaagatcttcagcagacccaaggtgttcgtgaagatggacgactag

SEQ ID NO: 9301 - DNA, 1824 bp, Homo sapiens
  source 1..1824: mol_type = genomic DNA
atggccgccaacgtgttccccttcagagacgccagagccgcccccgaccccgtgctggaggccggccccgtggcccacggccccctgcccgtgcccctggtgctggacaacggcagcttccaggtgagagccggctgggcctgccccggccaggaccccggccccgagcccagactgcagttcagagccgtgtgcgccagaggcagaggcggcgccagaggcgccagcggcccccaggtgggcaacgccctgggcagcctggagcccctgagatggatgctgagaagccccttcgacagaaacgtgcccgtgaacctggagctgcaggagctgctgctggactacagcttccagcacctgggcgtgagcagccagggctgcgtggaccaccccatcgtgctgaccgaggccgtgtgcaaccccctgtacagcagacagatgatgagcgagctgctgttcgagtgctacggcatccccaaggtggcctacggcatcgacagcctgttcagcttctaccacaacaagcccaagaacagcatgtgcagcggcctgatcatcagcagcggctaccagtgcacccacgtgctgcccatcctggagggcagactggacgccaagaactgcaagagaatcaacctgggcggcagccaggccgccggctacctgcagagactgctgcagctgaagtaccccggccacctggccgccatcaccctgagcagaatggaggagatcctgcacgagcacagctacatcgccgaggactacgtggaggagctgcacaagtggagatgccccgactactacgagaacaacgtgcacaagatgcagctgcccttcagcagcaagctgctgggcagcaccctgaccagcgaggagaagcaggagagaagacagcagcagctgagaagactgcaggagctgaacgccagaagaagagaggagaagctgcagctggaccaggagagactggacagactgctgtacgtgcaggagctgctggaggacggccagatggaccagttccacaaggccctgatcgagctgaacatggacagccccgaggagctgcagagctacatccagaagctgagcatcgccgtggagcaggccaagcagaagatcctgcaggccgaggtgaacctggaggtggacgtggtggacagcaagcccgagacccccgacctggagcagctggagcccagcctggaggacgtggagagcatgaacgacttcgaccccctgttcagcgaggagacccccggcgtggagaagcccgtgaccaccgtgcagcccgtgttcaacctggccgcctaccaccagctgttcgtgggcaccgagagaatcagagcccccgagatcatcttccagcccagcctgatcggcgaggagcaggccggcatcgccgagaccctgcagtacatcctggacagataccccaaggacatccaggagatgctggtgcagaacgtgttcctgaccggcggcaacaccatgtaccccggcatgaaggccagaatggagaaggagctgctggagatgagacccttcagaagcagcttccaggtgcagctggccagcaaccccgtgctggacgcctggtacggcgccagagactgggccctgaaccacctggacgacaacgaggtgtggatcaccagaaaggagtacgaggagaagggcggcgagtacctgaaggagcactgcgccagcaacatctacgtgcccatcagactgcccaagcaggccagcagaagcagcgacgcccaggccagcagcaagggcagcgccgccggcggcggcggcgccggcgagcaggcctag

SEQ ID NO: 9302 - DNA, 1383 bp, Homo sapiens
  source 1..1383: mol_type = genomic DNA
atggccagcagagaggaggtgctggccctgcaggccgaggtggcccagagagaggaggagctgaacagcctgaagcagaagctggccagcgccctgctggccgagcaggagccccagcccgagagactggtgcccgtgagccccctgccccccaaggccgccctgagcagagacgagatcctgagatacagcagacagctggtgctgcccgagctgggcgtgcacggccagctgagactgggcaccgcctgcgtgctgatcgtgggctgcggcggcctgggctgccccctggcccagtacctggccgccgccggcgtgggcagactgggcctggtggactacgacgtggtggagatgagcaacctggccagacaggtgctgcacggcgaggccctggccggccaggccaaggccttcagcgccgccgccagcctgagaagactgaacagcgccgtggagtgcgtgccctacacccaggccctgacccccgccaccgccctggacctggtgagaagatacgacgtggtggccgactgcagcgacaacgtgcccaccagatacctggtgaacgacgcctgcgtgctggccggcagacccctggtgagcgccagcgccctgagattcgagggccagatcaccgtgtaccactacgacggcggcccctgctacagatgcatcttcccccagcccccccccgccgagaccgtgaccaactgcgccgacggcggcgtgctgggcgtggtgaccggcgtgctgggctgcctgcaggccctggaggtgctgaagatcgccgccggcctgggccccagctacagcggcagcctgctgctgttcgacgccctgagaggccacttcagaagcatcagactgagaagcagaagactggactgcgccgcctgcggcgagagacccaccgtgaccgacctgctggactacgaggccttctgcggcagcagcgccaccgacaagtgcagaagcctgcagctgctgagccccgaggagagagtgagcgtgaccgactacaagagactgctggacagcggcgccttccacctgctgctggacgtgagaccccaggtggaggtggacatctgcagactgccccacgccctgcacatccccctgaagcacctggagagaagagacgccgagagcctgaagctgctgaaggaggccatctgggaggagaagcagggcacccaggagggcgccgccgtgcccatctacgtgatctgcaagctgggcaacgacagccagaaggccgtgaagatcctgcagagcctgagcgccgcccaggagctggaccccctgaccgtgagagacgtggtgggcggcctgatggcctgggccgccaagatcgacggcaccttcccccagtactag

SEQ ID NO: 9303 - DNA, 1041 bp, Homo sapiens
  source 1..1041: mol_type = genomic DNA
atggagagcgtgagctgcagcgccgccgccgtgagaaccggcgacatggagagccagagagacctgagcctggtgcccgagagactgcagagaagagagcaggagagacagctggaggtggagagaagaaagcagaagagacagaaccaggaggtggagaaggagaacagccacttcttcgtggccaccttcgtgagagagagagccgccgtggaggagctgctggagagagccgagagcgtggagagactggaggaggccgccagcagactgcagggcctgcagaagctgatcaacgacagcgtgttcttcctggccgcctacgacctgagacagggccaggaggccctggccagactgcaggccgccctggccgagagaagaagaggcctgcagcccaagaagagattcgccttcaagaccagaggcaaggacgccgccagcagcaccaaggtggacgccgcccccggcatcccccccgccgtggagagcatccaggacagccccctgcccaagaaggccgagggcgacctgggccccagctgggtgtgcggcttcagcaacctggagagccaggtgctggagaagagagccagcgagctgcaccagagagacgtgctgctgaccgagctgagcaactgcaccgtgagactgtacggcaaccccaacaccctgagactgaccaaggcccacagctgcaagctgctgtgcggccccgtgagcaccagcgtgttcctggaggactgcagcgactgcgtgctggccgtggcctgccagcagctgagaatccacagcaccaaggacaccagaatcttcctgcaggtgaccagcagagccatcgtggaggactgcagcggcatccagttcgccccctacacctggagctaccccgagatcgacaaggacttcgagagcagcggcctggacagaagcaagaacaactggaacgacgtggacgacttcaactggctggccagagacatggccagccccaactggagcatcctgcccgaggaggagagaaacatccagtgggactag

SEQ ID NO: 9304 - DNA, 747 bp, Homo sapiens
  source 1..747: mol_type = genomic DNA
atgacccccaagggccccgccatgtgcagcatgcccctgaccagcgccgactgcttcagcaacgacatccacaagctggacaccagcaccatgacctggaccctgatctgcaccaagggcagccccgccagatggagagacttccacagcgccaccatgctgggcagccacatgtacgtgttcggcggcagagccgacagattcggccccttccacagcaacaacgagatctactgcaacagaatcagagtgttcgacaccagaaccgaggcctggctggactgcccccccacccccgtgctgcccgagggcagaagaagccacagcgccttcggctacaacggcgagctgtacatcttcggcggctacaacgccagactgaacagacacttccacgacctgtggaagttcaaccccgtgagcttcacctggaagaagatcgagcccaagggcaagggcccctgccccagaagaagacagtgctgctgcatcgtgggcgacaagatcgtgctgttcggcggcaccagccccagccccgaggagggcctgggcgacgagttcgacctgatcgaccacagcgacctgcacatcctggacttcagccccagcctgaagaccctgtgcaagctggccgtgatccagtacaacctggaccagagctgcctgccccacgacatcagatgggagctgaacgccatgaccaccaacagcaacatcagcagacccatcgtgagcagccacggctag

SEQ ID NO: 9305 - DNA, 1401 bp, Homo sapiens
  source 1..1401: mol_type = genomic DNA
atggagtacgagagctactacttcgtgaagttccagaagtaccccaagatcgtgaagaagagcagcgacaccgccgagaacaacctgccccagagaagcagaggcaagaccagaagaatgatgaacgacagctgccagaacctgcccaagatcaaccagcagagacccagaagcaagaccaccgccggcaagaccggcgacaccaagagcctgaacaaggagcaccccaaccaggaggtggtggacaacaccagactggagagcgccaacttcggcctgcacatcagcagaatcagaaaggacagcggcgaggagaacgcccaccccagaagaggccagatcatcgacttccagggcctgctgaccgacgccatcaagggcgccaccagcgagctggccctgaacaccttcgaccacaaccccgaccccagcgagagactgctgaagcccctgagcgccttcatcggcatgaacagcgagatgagagagctggccgccgtggtgagcagagacatctacctgcacaaccccaacatcaagtggaacgacatcatcggcctggacgccgccaagcagctggtgaaggaggccgtggtgtaccccatcagatacccccagctgttcaccggcatcctgagcccctggaagggcctgctgctgtacggcccccccggcaccggcaagaccctgctggccaaggccgtggccaccgagtgcaagaccaccttcttcaacatcagcgccagcaccatcgtgagcaagtggagaggcgacagcgagaagctggtgagagtgctgttcgagctggccagataccacgcccccagcaccatcttcctggacgagctggagagcgtgatgagccagagaggcaccgccagcggcggcgagcacgagggcagcctgagaatgaagaccgagctgctggtgcagatggacggcctggccagaagcgaggacctggtgttcgtgctggccgccagcaacctgccctgggagctggactgcgccatgctgagaagactggagaagagaatcctggtggacctgcccagcagagaggccagacaggccatgatctaccactggctgccccccgtgagcaagagcagagccctggagctgcacaccgagctggagtacagcgtgctgagccaggagaccgagggctacagcggcagcgacatcaagctggtgtgcagagaggccgccatgagacccgtgagaaagatcttcgacgccctggagaaccaccagagcgagagcagcgacctgcccagaatccagctggacatcgtgaccaccgccgacttcctggacgtgctgacccacaccaagcccagcgccaagaacctggcccagagatacagcgactggcagagagagttcgagagcgtgtag

SEQ ID NO: 9306 - DNA, 6402 bp, Homo sapiens
  source 1..6402: mol_type = genomic DNA
atggacgaggtggagcaggaccagcacgaggccagactgaaggagctgttcgacagcttcgacaccaccggcaccggcagcctgggccaggaggagctgaccgacctgtgccacatgctgagcctggaggaggtggcccccgtgctgcagcagaccctgctgcaggacaacctgctgggcagagtgcacttcgaccagttcaaggaggccctgatcctgatcctgagcagaaccctgagcaacgaggagcacttccaggagcccgactgcagcctggaggcccagcccaagtacgtgagaggcggcaagagatacggcagaagaagcctgcccgagttccaggagagcgtggaggagttccccgaggtgaccgtgatcgagcccctggacgaggaggccagacccagccacatccccgccggcgactgcagcgagcactggaagacccagagaagcgaggagtacgaggccgagggccagctgagattctggaaccccgacgacctgaacgccagccagagcggcagcagccccccccaggactggatcgaggagaagctgcaggaggtgtgcgaggacctgggcatcaccagagacggccacctgaacagaaagaagctggtgagcatctgcgagcagtacggcctgcagaacgtggacggcgagatgctggaggaggtgttccacaacctggaccccgacggcaccatgagcgtggaggacttcttctacggcctgttcaagaacggcaagagcctgacccccagcgccagcaccccctacagacagctgaagagacacctgagcatgcagagcttcgacgagagcggcagaagaaccaccaccagcagcgccatgaccagcaccatcggcttcagagtgttcagctgcctggacgacggcatgggccacgccagcgtggagagaatcctggacacctggcaggaggagggcatcgagaacagccaggagatcctgaaggccctggacttcagcctggacggcaacatcaacctgaccgagctgaccctggccctggagaacgagctgctggtgaccaagaacagcatccaccaggccgccctggccagcttcaaggccgagatcagacacctgctggagagagtggaccaggtggtgagagagaaggagaagctgagaagcgacctggacaaggccgagaagctgaagagcctgatggccagcgaggtggacgaccaccacgccgccatcgagagaagaaacgagtacaacctgagaaagctggacgaggagtacaaggagagaatcgccgccctgaagaacgagctgagaaaggagagagagcagatcctgcagcaggccggcaagcagagactggagctggagcaggagatcgagaaggccaagaccgaggagaactacatcagagacagactggccctgagcctgaaggagaacagcagactggagaacgagctgctggagaacgccgagaagctggccgagtacgagaacctgaccaacaagctgcagagaaacctggagaacgtgctggccgagaagttcggcgacctggaccccagcagcgccgagttcttcctgcaggaggagagactgacccagatgagaaacgagtacgagagacagtgcagagtgctgcaggaccaggtggacgagctgcagagcgagctggaggagtacagagcccagggcagagtgctgagactgcccctgaagaacagccccagcgaggaggtggaggccaacagcggcggcatcgagcccgagcacggcctgggcagcgaggagtgcaaccccctgaacatgagcatcgaggccgagctggtgatcgagcagatgaaggagcagcaccacagagacatctgctgcctgagactggagctggaggacaaggtgagacactacgagaagcagctggacgagaccgtggtgagctgcaagaaggcccaggagaacatgaagcagagacacgagaacgagacccacaccctggagaagcagatcagcgacctgaagaacgagatcgccgagctgcagggccaggccgccgtgctgaaggaggcccaccacgaggccacctgcagacacgaggaggagaagaagcagctgcaggtgaagctggaggaggagaagacccacctgcaggagaagctgagactgcagcacgagatggagctgaaggccagactgacccaggcccaggccagcttcgagagagagagagagggcctgcagagcagcgcctggaccgaggagaaggtgagaggcctgacccaggagctggagcagttccaccaggagcagctgaccagcctggtggagaagcacaccctggagaaggaggagctgagaaaggagctgctggagaagcaccagagagagctgcaggagggcagagagaagatggagaccgagtgcaacagaagaaccagccagatcgaggcccagttccagagcgactgccagaaggtgaccgagagatgcgagagcgccctgcagagcctggagggcagatacagacaggagctgaaggacctgcaggagcagcagagagaggagaagagccagtgggagttcgagaaggacgagctgacccaggagtgcgccgaggcccaggagctgctgaaggagaccctgaagagagagaagaccaccagcctggtgctgacccaggagagagagatgctggagaagacctacaaggagcacctgaacagcatggtggtggagagacagcagctgctgcaggacctggaggacctgagaaacgtgagcgagacccagcagagcctgctgagcgaccagatcctggagctgaagagcagccacaagagagagctgagagagagagaggaggtgctgtgccaggccggcgccagcgagcagctggccagccagagactggagagactggagatggagcacgaccaggagagacaggagatgatgagcaagctgctggccatggagaacatccacaaggccacctgcgagaccgccgacagagagagagccgagatgagcaccgagatcagcagactgcagagcaagatcaaggagatgcagcaggccaccagccccctgagcatgctgcagagcggctgccaggtgatcggcgaggaggaggtggagggcgacggcgccctgagcctgctgcagcagggcgagcagctgctggaggagaacggcgacgtgctgctgagcctgcagagagcccacgagcaggccgtgaaggagaacgtgaagatggccaccgagatcagcagactgcagcagagactgcagaagctggagcccggcctggtgatgagcagctgcctggacgagcccgccaccgagttcttcggcaacaccgccgagcagaccgagcagttcctgcagcagaacagaaccaagcaggtggagggcgtgaccagaagacacgtgctgagcgacctggaggacgacgaggtgagagacctgggcagcaccggcaccagcagcgtgcagagacaggaggtgaagatcgaggagagcgaggccagcgtggagggcttcagcgagctggagaacagcgaggagaccagaaccgagagctgggagctgaagaaccagatcagccagctgcaggagcagctgatgatgctgtgcgccgactgcgacagagccagcgagaagaagcaggacctgctgttcgacgtgagcgtgctgaagaagaagctgaagatgctggagagaatccccgaggccagccccaagtacaagctgctgtacgaggacgtgagcagagagaacgactgcctgcaggaggagctgagaatgatggagaccagatacgacgaggccctggagaacaacaaggagctgaccgccgaggtgttcagactgcaggacgagctgaagaagatggaggaggtgaccgagaccttcctgagcctggagaagagctacgacgaggtgaagatcgagaacgagggcctgaacgtgctggtgctgagactgcagggcaagatcgagaagctgcaggagagcgtggtgcagagatgcgactgctgcctgtgggaggccagcctggagaacctggagatcgagcccgacggcaacatcctgcagctgaaccagaccctggaggagtgcgtgcccagagtgagaagcgtgcaccacgtgatcgaggagtgcaagcaggagaaccagtacctggagggcaacacccagctgctggagaaggtgaaggcccacgagatcgcctggctgcacggcaccatccagacccaccaggagagacccagagtgcagaaccaggtgatcctggaggagaacaccaccctgctgggcttccaggacaagcacttccagcaccaggccaccatcgccgagctggagctggagaagaccaagctgcaggagctgaccagaaagctgaaggagagagtgaccatcctggtgaagcagaaggacgtgctgagccacggcgagaaggaggaggagctgaaggccatgatgcacgacctgcagatcacctgcagcgagatgcagcagaaggtggagctgctgagatacgagagcgagaagctgcagcaggagaacagcatcctgagaaacgagatcaccaccctgaacgaggaggacagcatcagcaacctgaagctgggcaccctgaacggcagccaggaggagatgtggcagaagaccgagaccgtgaagcaggagaacgccgccgtgcagaagatggtggagaacctgaagaagcagatcagcgagctgaagatcaagaaccagcagctggacctggagaacaccgagctgagccagaagaacagccagaaccaggagaagctgcaggagctgaaccagagactgaccgagatgctgtgccagaaggagaaggagcccggcaacagcgccctggaggagagagagcaggagaagttcaacctgaaggaggagctggagagatgcaaggtgcagagcagcaccctggtgagcagcctggaggccgagctgagcgaggtgaagatccagacccacatcgtgcagcaggagaaccacctgctgaaggacgagctggagaagatgaagcagctgcacagatgccccgacctgagcgacttccagcagaagatcagcagcgtgctgagctacaacgagaagctgctgaaggagaaggaggccctgagcgaggagctgaacagctgcgtggacaagctggccaagagcagcctgctggagcacagaatcgccaccatgaagcaggagcagaagagctgggagcaccagagcgccagcctgaagagccagctggtggccagccaggagaaggtgcagaacctggaggacaccgtgcagaacgtgaacctgcagatgagcagaatgaagagcgacctgagagtgacccagcaggagaaggaggccctgaagcaggaggtgatgagcctgcacaagcagctgcagaacgccggcggcaagagctgggcccccgagatcgccacccaccccagcggcctgcacaaccagcagaagagactgagctgggacaagctggaccacctgatgaacgaggagcagcagctgctgtggcaggagaacgagagactgcagaccatggtgcagaacaccaaggccgagctgacccacagcagagagaaggtgagacagctggagagcaacctgctgcccaagcaccagaagcacctgaaccccagcggcaccatgaaccccaccgagcaggagaagctgagcctgaagagagagtgcgaccagttccagaaggagcagagccccgccaacagaaaggtgagccagatgaacagcctggagcaggagctggagaccatccacctggagaacgagggcctgaagaagaagcaggtgaagctggacgagcagctgatggagatgcagcacctgagaagcaccgccacccccagccccagcccccacgcctgggacctgcagctgctgcagcagcaggcctgccccatggtgcccagagagcagttcctgcagctgcagagacagctgctgcaggccgagagaatcaaccagcacctgcaggaggagctggagaacagaaccagcgagaccaacaccccccagggcaaccaggagcagctggtgaccgtgatggaggagagaatgatcgaggtggagcagaagctgaagctggtgaagagactgctgcaggagaaggtgaaccagctgaaggagcagctgtgcaagaacaccaaggccgacgccatggtgaaggacctgtacgtggagaacgcccagctgctgaaggccctggaggtgaccgagcagagacagaagaccgccgagaagaagaactacctgctggaggagaagatcgccagcctgagcaacatcgtgagaaacctgacccccgcccccctgaccagcaccccccccctgagaagctag

SEQ ID NO: 9307 - DNA, 1713 bp, Homo sapiens
  source 1..1713: mol_type = genomic DNA
atggccggcggcgccagagaggtgctgaccctgcagctgggccacttcgccggcttcgtgggcgcccactggtggaaccagcaggacgccgccctgggcagagccaccgacagcaaggagccccccggcgagctgtgccccgacgtgctgtacagaaccggcagaaccctgcacggccaggagacctacacccccagactgatcctgatggacctgaagggcagcctgagcagcctgaaggaggagggcggcctgtacagagacaagcagctggacgccgccatcgcctggcagggcaagctgaccacccacaaggaggagctgtaccccaagaacccctacctgcaggacttcctgagcgccgagggcgtgctgagcagcgacggcgtgtggagagtgaagagcatccccaacggcaagggcagcagccccctgcccaccgccaccacccccaagcccctgatccccaccgaggccagcatcagagtgtggagcgacttcctgagagtgcacctgcaccccagaagcatctgcatgatccagaagtacaaccacgacggcgaggccggcagactggaggccttcggccagggcgagagcgtgctgaaggagcccaagtaccaggaggagctggaggacagactgcacttctacgtggaggagtgcgactacctgcagggcttccagatcctgtgcgacctgcacgacggcttcagcggcgtgggcgccaaggccgccgagctgctgcaggacgagtacagcggcagaggcatcatcacctggggcctgctgcccggcccctaccacagaggcgaggcccagagaaacatctacagactgctgaacaccgccttcggcctggtgcacctgaccgcccacagcagcctggtgtgccccctgagcctgggcggcagcctgggcctgagacccgagccccccgtgagcttcccctacctgcactacgacgccaccctgcccttccactgcagcgccatcctggccaccgccctggacaccgtgaccgtgccctacagactgtgcagcagccccgtgagcatggtgcacctggccgacatgctgagcttctgcggcaagaaggtggtgaccgccggcgccatcatccccttccccctggcccccggccagagcctgcccgacagcctgatgcagttcggcggcgccaccccctggacccccctgagcgcctgcggcgagcccagcggcaccagatgcttcgcccagagcgtggtgctgagaggcatcgacagagcctgccacaccagccagctgacccccggcacccccccccccagcgccctgcacgcctgcaccaccggcgaggagatcctggcccagtacctgcagcagcagcagcccggcgtgatgagcagcagccacctgctgctgaccccctgcagagtggcccccccctacccccacctgttcagcagctgcagcccccccggcatggtgctggacggcagccccaagggcgccgccgtggagagcatccccgtgttcggcgccctgtgcagcagcagcagcctgcaccagaccctggaggccctggccagagacctgaccaagctggacctgagaagatgggccagcttcatggacgccggcgtggagcacgacgacgtggccgagctgctgcaggagctgcagagcctggcccagtgctaccagggcggcgacagcctggtggactag

SEQ ID NO: 9308 - DNA, 1791 bp, Homo sapiens
  source 1..1791: mol_type = genomic DNA
atgaacagaacctggcccagaagaatctggggcagcagccaggacgaggccgagctgatcagagaggacatccagggcgccctgcacaactacagaagcggcagaggcgagagaagagccgccgccctgagagccacccaggaggagctgcagagagacagaagccccgccgccgagaccccccccctgcagagaagacccagcgtgagagccgtgatcagcaccgtggagagaggcgccggcagaggcagaccccaggccaagcccatccccgaggccgaggaggcccagagacccgagcccgtgggcaccagcagcaacgccgacagcgccagccccgacctgggccccagaggccccgacctggccgtgctgcaggccgagagagaggtggacatcctgaaccacgtgttcgacgacgtggagagcttcgtgagcagactgcagaagagcgccgaggccgccagagtgctggagcacagagagagaggcagaagaagcagaagaagagccgccggcgagggcctgctgaccctgagagccaagccccccagcgaggccgagtacaccgacgtgctgcagaagatcaagtacgccttcagcctgctggccagactgagaggcaacatcgccgaccccagcagccccgagctgctgcacttcctgttcggccccctgcagatgatcgtgaacaccagcggcggccccgagttcgccagcagcgtgagaagaccccacctgaccagcgacgccgtggccctgctgagagacaacgtgacccccagagagaacgagctgtggaccagcctgggcgacagctggaccagacccggcctggagctgagccccgaggagggccccccctacagacccgagttcttcagcggctgggagccccccgtgaccgacccccagagcagagcctgggaggaccccgtggagaagcagctgcagcacgagagaagaagaagacagcagagcgccccccaggtggccgtgaacggccacagagacctggagcccgagagcgagccccagctggagagcgagaccgccggcaagtgggtgctgtgcaactacgacttccaggccagaaacagcagcgagctgagcgtgaagcagagagacgtgctggaggtgctggacgacagcagaaagtggtggaaggtgagagaccccgccggccaggagggctacgtgccctacaacatcctgaccccctaccccggccccagactgcaccacagccagagccccgccagaagcctgaacagcacccccccccccccccccgcccccgcccccgcccccccccccgccctggccagacccagatgggacagacccagatgggacagctgcgacagcctgaacggcctggaccccagcgagaaggagaagttcagccagatgctgatcgtgaacgaggagctgcaggccagactggcccagggcagaagcggccccagcagagccgtgcccggccccagagcccccgagccccagctgagccccggcagcgacgccagcgaggtgagagcctggctgcaggccaagggcttcagcagcggcaccgtggacgccctgggcgtgctgaccggcgcccagctgttcagcctgcagaaggaggagctgagagccgtgagccccgaggagggcgccagagtgtacagccaggtgaccgtgcagagaagcctgctggaggacaaggagaaggtgagcgagctggaggccgtgatggagaagcagaagaagaaggtggagggcgaggtggagatggaggtgatctag

SEQ ID NO: 9309 - DNA, 1950 bp, Homo sapiens
  source 1..1950: mol_type = genomic DNA
atgagcagcttcggcgccggcaagaccaaggaggtgatcttcagcgtggaggacggcagcgtgaagatgttcctgagaggcagacccgtgcccatgatgatccccgacgagctggcccccacctacagcctggacaccagaagcgagctgcccagctgcagactgaagctggagtgggtgtacggctacagaggcagagactgcagagccaacctgtacctgctgcccaccggcgagatcgtgtacttcgtggccagcgtggccgtgctgtacagcgtggaggagcagagacagagacactacctgggccacaacgacgacatcaagtgcctggccatccaccccgacatggtgaccatcgccaccggccaggtggccggcaccaccaaggagggcaagcccctgcccccccacgtgagaatctgggacagcgtgagcctgagcaccctgcacgtgctgggcctgggcgtgttcgacagagccgtgtgctgcgtgggcttcagcaagagcaacggcggcaacctgctgtgcgccgtggacgagagcaacgaccacatgctgagcgtgtgggactgggccaaggagaccaaggtggtggacgtgaagtgcagcaacgaggccgtgctggtggccaccttccaccccaccgaccccaccgtgctgatcacctgcggcaagagccacatctacttctggaccctggagggcggcagcctgagcaagagacagggcctgttcgagaagcacgagaagcccaagtacgtgctgtgcgtgaccttcctggagggcggcgacgtggtgaccggcgacagcggcggcaacctgtacgtgtggggcaagggcggcaacagaatcacccaggccgtgctgggcgcccacgacggcggcgtgttcggcctgtgcgccctgagagacggcaccctggtgagcggcggcggcagagacagaagagtggtgctgtggggcagcgactacagcaagctgcaggaggtggaggtgcccgaggacttcggccccgtgagaaccgtggccgagggccacggcgacaccctgtacgtgggcaccaccagaaacagcatcctgcagggcagcgtgcacaccggcttcagcctgctggtgcagggccacgtggaggagctgtggggcctggccacccaccccagcagagcccagttcgtgacctgcggccaggacaagctggtgcacctgtggagcagcgacagccaccagcccctgtggagcagaatcatcgaggaccccgccagaagcgccggcttccaccccagcggcagcgtgctggccgtgggcaccgtgaccggcagatggctgctgctggacaccgagacccacgacctggtggccatccacaccgacggcaacgagcagatcagcgtggtgagcttcagccccgacggcgcctacctggccgtgggcagccacgacaacctggtgtacgtgtacaccgtggaccagggcggcagaaaggtgagcagactgggcaagtgcagcggccacagcagcttcatcacccacctggactgggcccaggacagcagctgcttcgtgaccaacagcggcgactacgagatcctgtactgggaccccgccacctgcaagcagatcaccagcgccgacgccgtgagaaacatggagtgggccaccgccacctgcgtgctgggcttcggcgtgttcggcatctggagcgagggcgccgacggcaccgacatcaacgccgtggccagaagccacgacggcaagctgctggccagcgccgacgacttcggcaaggtgcacctgttcagctacccctgctgccagcccagagccctgagccacaagtacggcggccacagcagccacgtgaccaacgtggccttcctgtgggacgacagcatggccctgaccaccggcggcaaggacaccagcgtgctgcagtggagagtggtgtag

SEQ ID NO: 9310 - DNA, 792 bp, Homo sapiens
  source 1..792: mol_type = genomic DNA
atggccggcctggaggtgctgttcgccagcgccgcccccgccatcacctgcagacaggacgccctggtgtgcttcctgcactgggaggtggtgacccacggctacttcggcctgggcgtgggcgaccagcccggccccaacgacaagaagagcgagctgctgcccgccggctggaacaacaacaaggacctgtacgtgctgagatacgagtacaaggacggcagcagaaagctgctggtgaaggccatcaccgtggagagcagcatgatcctgaacgtgctggagtacggcagccagcaggtggccgacctgaccctgaacctggacgactacatcgacgccgagcacctgggcgacttccacagaacctacaagaacagcgaggagctgagaagcagaatcgtgagcggcatcatcacccccatccacgagcagtgggagaaggccaacgtgagcagcccccacagagagttcccccccgccaccgccagagaggtggaccccctgagaatccccccccaccacccccacaccagcagacagcccccctggtgcgaccccctgggccccttcgtggtgggcggcgaggacctggaccccttcggccccagaagaggcggcatgatcgtggaccccctgagaagcggcttccccagagccctgatcgaccccagcagcggcctgcccaacagactgccccccggcgccgtgccccccggcgccagattcgaccccttcggccccatcggcaccagcccccccggccccagacccgacagaagaggccagtag

SEQ ID NO: 9311 - DNA, 273 bp, Homo sapiens
  source 1..273: mol_type = genomic DNA
atggacaacatgagccccagactgagagccttcctgagcgagcccatcggcgagaaggacgtgtgctgggtggacggcatcagccacgagctggccatcaacctggtgaccaagggcatcaacaaggcctacatcctgctgggccagttcctgctgatgcacaagaacgaggccgagttccagagatggctgatctgctgcttcggcgccaccgagtgcgaggcccagcagaccagccactgcctgaaggagtggtgcgcctgcttcctgtag

SEQ ID NO: 9312 - DNA, 888 bp, Homo sapiens
  source 1..888: mol_type = genomic DNA
atgcccgtgcacaccctgagccccggcgcccccagcgcccccgccctgccctgcagactgagaaccagagtgcccggctacctgctgagaggccccgccgacggcggcgccagaaagcccagcgccgtggagagactggaggccgacaaggccaagtacgtgaagagcctgcacgtggccaacaccagacaggagcccgtgcagcccctgctgagcaagcagcccctgttcagccccgagaccagaagaaccgtgctgacccccagcagaagagccctgcccggcccctgcagaagaccccagctggacctggacatcctgagcagcctgatcgacctgtgcgacagccccgtgagccccgccgaggccagcagaacccccggcagagccgagggcgccggcagacccccccccgccaccccccccagacccccccccagcaccagcgccgtgagaagagtggacgtgagacccctgcccgccagccccgccagaccctgccccagccccggccccgccgccgccagcagccccgccagaccccccggcctgcagagaagcaagagcgacctgagcgagagattcagcagagccgccgccgacctggagagattcttcaacttctgcggcctggaccccgaggaggccagaggcctgggcgtggcccacctggccagagccagcagcgacatcgtgagcctggccggccccagcgccggccccggcagcagcgagggcggctgcagcagaagaagcagcgtgaccgtggaggagagagccagagagagagtgccctacggcgtgagcgtggtggagagaaacgccagagtgatcaagtggctgtacggcctgagacaggccagagagagccccgccgccgagggctag

SEQ ID NO: 9313 - DNA, 582 bp, Homo sapiens
  source 1..582: mol_type = genomic DNA
atgcccaccaccagcagacccgccctggacgtgaagggcggcaccagccccgccaaggaggacgccaaccaggagatgagcagcgtggcctacagcaacctggccgtgaaggacagaaaggccgtggccatcctgcactaccccggcgtggccagcaacggcaccaaggccagcggcgcccccaccagcagcagcggcagccccatcggcagccccaccaccaccccccccaccaagccccccagcttcaacctgcaccccgccccccacctgctggccagcatgcacctgcagaagctgaacagccagtaccagggcatggccgccgccacccccggccagcccggcgaggccggccccctgcagaactgggacttcggcgcccaggccggcggcgccgagagcctgagccccagcgccggcgcccagagccccgccatcatcgacagcgaccccgtggacgaggaggtgctgatgagcctggtggtggagctgggcctggacagagccaacgagctgcccgagctgtggctgggccagaacgagttcgacttcaccgccgacttccccagcagctgctag

SEQ ID NO: 9314 - DNA, 1077 bp, Homo sapiens
  source 1..1077: mol_type = genomic DNA
atggccgccgtgctgaagcccgtgctgctgggcctgagagacgcccccgtgcacggcagccccaccggccccggcgcctggaccgccagcaagctgggcggcatccccgacgccctgcccaccgtggccgcccccagacccgtgtgccagagatgcggccagcccctggccctggtggtgcaggtgtactgccccctggagggcagccccttccacagactgctgcacgtgttcgcctgcgcctgccccggctgcagcaccggcggcgccagaagctggaaggtgttcagaagccagtgcctgcaggtgcccgagagagaggcccaggacgcccagaagcagggcaacagcctggccgccgaggactggtgcgagggcgccgacgactggggcagcgacaccgaggagggccccagcccccagttcaccctggacttcggcaacgacgccagcagcgccaaggacgtggactggaccgccagactgcaggacctgagactgcaggacgccgtgctgggcgccgcccaccccgtgccccccggcctgcccctgttcctgccctactacatctgcgtggccgacgaggacgactacagagacttcgtgaacctggaccacgcccacagcctgctgagagactaccagcagagagagggcatcgccatggaccagctgctgagccagagcctgcccaacgacggcgacgagaagtacgagaagaccatcatcaagagcggcgaccagaccttctacaagttcatgaagagaatcgccgcctgccaggagcagatcctgagatacagctggagcggcgagcccctgttcctgacctgccccaccagcgaggtgaccgagctgcccgcctgcagccagtgcggcggccagagaatcttcgagttccagctgatgcccgccctggtgagcatgctgaagagcgccaacctgggcctgagcgtggagttcggcaccatcctggtgtacacctgcgagaagagctgctggccccccaaccaccagacccccatggaggagttctgcatcatccaggaggaccccgacgagctgctgttcaagtag

SEQ ID NO: 9315 - DNA, 1779 bp, Homo sapiens
  source 1..1779: mol_type = genomic DNA
atggccagcgtggtggtgaagaccatctggcagagcaaggagatccacgaggccggcgacacccccaccggcgtggagagctgcagccagctggtgcccgaggcccccagaagagtgaccagcagagccaagggcatccccaagaagaagaaggccgtgagcttccacggcgtggagccccagatgagccaccagcccatgcactggtgcctgaacctgaagagaagcagcgcctgcaccaacgtgagcctgctgaacctggccgccatggagcccaccgacagcaccggcaccgacagcaccgtggaggacctgagcggccagctgaccctggccggcccccccgccagccccaccctgccctgggaccccgacgacgccgacatcaccgagatcctgagcggcgtgaacagcggcctggtgagagccaaggacagcatcaccagcctgaaggagaagaccaacagagtgaaccagcacgtgcagagcctgcagagcgagtgcagcgtgctgagcgagaacctggagagaagaagacaggaggccgaggagctggagggctactgcatccagctgaaggagaactgctggaaggtgaccagaagcgtggaggacgccgagatcaagaccaacgtgctgaagcagaacagcgccctgctggaggagaagctgagatacctgcagcagcagctgcaggacgagacccccagaagacaggaggccgagctgcaggagcccgaggagaagcaggagcccgaggagaagcaggagcccgaggagaagcagaagcccgaggccggcctgagctggaacagcctgggccccgccgccaccagccagggctgccccggcccccccggcagccccgacaagcccagcagaccccacggcctggtgcccgccggctggggcatgggccccagagccggcgagggcccctacgtgagcgagcaggagctgcagaagctgttcaccggcatcgaggagctgagaagagaggtgagcagcctgaccgccagatggcaccaggaggagggcgccgtgcaggaggccctgagactgctgggcggcctgggcggcagagtggacggcttcctgggccagtgggagagagcccagagagagcaggcccagaccgccagagacctgcaggagctgagaggcagagccgacgagctgtgcaccatggtggagagaagcgccgtgagcgtggccagcctgagaagcgagctggagggcctgggccccctgaagcccatcctggaggagttcggcagacagttccagaacagcagaagaggccccgacctgagcatgaacctggacagaagccaccagggcaactgcgccagatgcgccagccagggcagccagctgagcaccgagagcctgcagcagctgctggacagagccctgaccagcctggtggacgaggtgaagcagagaggcctgacccccgcctgccccagctgccagagactgcacaagaagatcctggagctggagagacaggccctggccaagcacgtgagagccgaggccctgagcagcaccctgagactggcccaggacgaggccctgagagccaagaacctgctgctgaccgacaagatgaagcccgaggagaagatggccaccctggaccacctgcacctgaagatgtgcagcctgcacgaccacctgagcaacctgcccctggagggcagcaccggcaccatgggcggcggcagcagcgccggcaccccccccaagcagggcggcagcgcccccgagcagtag

SEQ ID NO: 9316 - DNA, 2541 bp, Homo sapiens
  source 1..2541: mol_type = genomic DNA
atgagcagcagccacttcgccagcagacacagaaaggacatcagcaccgagatgatcagaaccaagatcgcccacagaaagagcctgagccagaaggagaacagacacaaggagtacgagagaaacagacacttcggcctgaaggacgtgaacatccccaccctggagggcagaatcctggtggagctggacgagaccagccagggcctggtgcccgagaagaccaacgtgaagcccagagccatgaagaccatcctgggcgaccagagaaagcagatgctgcagaagtacaaggaggagaagcagctgcagaagctgaaggagcagagagagaaggccaagagaggcatcttcaaggtgggcagatacagacccgacatgccctgcttcctgctgagcaaccagaacgccgtgaaggccgagcccaagaaggccatccccagcagcgtgagaatcaccagaagcaaggccaaggaccagatggagcagaccaagatcgacaacgagagcgacgtgagagccatcagacccggccccagacagaccagcgagaagaaggtgagcgacaaggagaagaaggtggtgcagcccgtgatgcccaccagcctgagaatgaccagaagcgccacccaggccgccaagcaggtgcccagaaccgtgagcagcaccaccgccagaaagcccgtgaccagagccgccaacgagaacgagcccgagggcaaggtgcccagcaagggcagacccgccaagaacgtggagaccaagcccgacaagggcatcagctgcaaggtggacagcgaggagaacaccctgaacagccagaccaacgccaccagcggcatgaaccccgacggcgtgctgagcaagatggagaacctgcccgagatcaacaccgccaagatcaagggcaagaacagcttcgcccccaaggacttcatgttccagcccctggacggcctgaagacctaccaggtgacccccatgacccccagaagcgccaacgccttcctgacccccagctacacctggacccccctgaagaccgaggtggacgagagccaggccaccaaggagatcctggcccagaagtgcaagacctacagcaccaagaccatccagcaggacagcaacaagctgccctgccccctgggccccctgaccgtgtggcacgaggagcacgtgctgaacaagaacgaggccaccaccaagaacctgaacggcctgcccatcaaggaggtgcccagcctggagagaaacgagggcagaatcgcccagccccaccacggcgtgccctacttcagaaacatcctgcagagcgagaccgagaagctgaccagccactgcttcgagtgggacagaaagctggagctggacatccccgacgacgccaaggacctgatcagaaccgccgtgggccagaccagactgctgatgaaggagagattcaagcagttcgagggcctggtggacgactgcgagtacaagagaggcatcaaggagaccacctgcaccgacctggacggcttctgggacatggtgagcttccagatcgaggacgtgatccacaagttcaacaacctgatcaagctggaggagagcggctggcaggtgaacaacaacatgaaccacaacatgaacaagaacgtgttcagaaagaaggtggtgagcggcatcgccagcaagcccaagcaggacgacgccggcagaatcgccgccagaaacagactggccgccatcaagaacgccatgagagagagaatcagacaggaggagtgcgccgagaccgccgtgagcgtgatccccaaggaggtggacaagatcgtgttcgacgccggcttcttcagagtggagagccccgtgaagctgttcagcggcctgagcgtgagcagcgagggccccagccagagactgggcacccccaagagcgtgaacaaggccgtgagccagagcagaaacgagatgggcatcccccagcagaccaccagccccgagaacgccggcccccagaacaccaagagcgagcacgtgaagaagaccctgttcctgagcatccccgagagcagaagcagcatcgaggacgcccagtgccccggcctgcccgacctgatcgaggagaaccacgtggtgaacaagaccgacctgaaggtggactgcctgagcagcgagagaatgagcctgcccctgctggccggcggcgtggccgacgacatcaacaccaacaagaaggagggcatcagcgacgtggtggagggcatggagctgaacagcagcatcaccagccaggacgtgctgatgagcagccccgagaagaacaccgccagccagaacagcatcctggaggagggcgagaccaagatcagccagagcgagctgttcgacaacaagagcctgaccaccgagtgccacctgctggacagccccggcctgaactgcagcaaccccttcacccagctggagagaagacaccaggagcacgccagacacatcagcttcggcggcaacctgatcaccttcagccccctgcagcccggcgagttctag

SEQ ID NO: 9317 - DNA, 1128 bp, Homo sapiens
  source 1..1128: mol_type = genomic DNA
atggccagcgccccctggcccgagagagtgcccagactgctggcccccagactgcccagctaccccccccccccccccaccgtgggcctgagaagcatggagcaggaggagacctacctggagctgtacctggaccagtgcgccgcccaggacggcctggccccccccagaagccccctgttcagccccgtggtgccctacgacatgtacatcctgaacgccagcaaccccgacaccgccttcaacagcaaccccgaggtgaaggagaccagcggcgacttcagcagcgtggacctgagcttcctgcccgacgaggtgacccaggagaacaaggaccagcccgtgatcagcaagcacgagaccgaggagaacagcgagagccagagcccccagagcagactgcccagccccagcgagcaggacgtgggcctgggcctgaacagcagcagcctgagcaacagccacagccagctgcaccccggcgacaccgacagcgtgcagcccagccccgagaagcccaacagcgacagcctgagcctggccagcatcacccccatgacccccatgacccccatcagcgagtgctgcggcatcgtgccccagctgcagaacatcgtgagcaccgtgaacctggcctgcaagctggacctgaagaagatcgccctgcacgccaagaacgccgagtacaaccccaagagattcgccgccgtgatcatgagaatcagagagcccagaaccaccgccctgatcttcagcagcggcaagatggtgtgcaccggcgccaagagcgaggagcagagcagactggccgccagaaagtacgccagagtggtgcagaagctgggcttccccgccagattcctggacttcaagatccagaacatggtgggcagctgcgacgtgagattccccatcagactggagggcctggtgctgacccaccagcagttcagcagctacgagcccgagctgttccccggcctgatctacagaatggtgaagcccagaatcgtgctgctgatcttcgtgagcggcaaggtggtgctgaccggcgccaaggagagaagcgagatctacgaggccttcgagaacatctaccccatcctgaagggcttcaagaaggcctag

SEQ ID NO: 9318 - DNA, 633 bp, Homo sapiens
  source 1..633: mol_type = genomic DNA
atgcaggccgagggccagggcaccggcggcagcaccggcgacgccgacggccccggcggccccggcatccccgacggccccggcggcaacgccggcggccccggcgaggccggcgccaccggcggcagaggccccagaggcgccggcgccgccagagccagcggccccagaggcggcgcccccagaggcccccacggcggcgccgccagcgcccaggacggcagatgcccctgcggcgccagaagacccgacagcagactgctgcagctgcacatcaccatgcccttcagcagccccatggaggccgagctggtgagaagaatcctgagcagagacgccgcccccctgcccagacccggcgccgtgctgaaggacttcaccgtgagcggcaacctgctgttcatgagcgtgagagaccaggacagagagggcgccggcagaatgagagtggtgggctggggcctgggcagcgccagccccgagggccagaaggccagagacctgagaacccccaagcacaaggtgagcgagcagagacccggcacccccggcccccccccccccgagggcgcccagggcgacggctgcagaggcgtggccttcaacgtgatgttcagcgccccccacatctag

SEQ ID NO: 9319 - DNA, 582 bp, Homo sapiens
  source 1..582: mol_type = genomic DNA
atggtggtgctgagagccggcaagaagaccttcctgccccccctgtgcagagccttcgcctgcagaggctgccagctggcccccgagagaggcgccgagagaagagacaccgcccccagcggcgtgagcagattctgcccccccagaaagagctgccacgactggatcggcccccccgacaagtacagcaacctgagacccgtgcacttctacatccccgagaacgagagccccctggagcagaagctgagaaagctgagacaggagacccaggagtggaaccagcagttctgggccaaccagaacctgaccttcagcaaggagaaggaggagttcatccacagcagactgaagaccaagggcctgggcctgagaaccgagagcggccagaaggccaccctgaacgccgaggagatggccgacttctacaaggagttcctgagcaagaacttccagaagcacatgtactacaacagagactggtacaagagaaacttcgccatcaccttcttcatgggcaaggtggccctggagagaatctggaacaagctgaagcagaagcagaagaagagaagcaactag

SEQ ID NO: 9320 - DNA, 1383 bp, Homo sapiens
  source 1..1383: mol_type = genomic DNA
atggccaacgaccccctggagggcttccacgaggtgaacctggccagccccaccagccccgacctgctgggcgtgtacgagagcggcacccaggagcagaccaccagccccagcgtgatctacagaccccaccccagcgccctgagcagcgtgcccatccaggccaacgccctggacgtgagcgagctgcccacccagcccgtgtacagcagccccagaagactgaactgcgccgagatcagcagcatcagcttccacgtgaccgaccccgccccctgcagcaccagcggcgtgaccgccggcctgaccaagctgaccaccagaaaggacaactacaacgccgagagagagttcctgcagggcgccaccatcaccgaggcctgcgacggcagcgacgacatcttcggcctgagcaccgacagcctgagcagactgagaagccccagcgtgctggaggtgagagagaagggctacgagagactgaaggaggagctggccaaggcccagagagagctgaagctgaaggacgaggagtgcgagagactgagcaaggtgagagaccagctgggccaggagctggaggagctgaccgccagcctgttcgaggaggcccacaagatggtgagagaggccaacatcaagcaggccaccgccgagaagcagctgaaggaggcccagggcaagatcgacgtgctgcaggccgaggtggccgccctgaagaccctggtgctgagcagcagccccaccagccccacccaggagcccctgcccggcggcaagacccccttcaagaagggccacaccagaaacaagagcaccagcagcgccatgagcggcagccaccaggacctgagcgtgatccagcccatcgtgaaggactgcaaggaggccgacctgagcctgtacaacgagttcagactgtggaaggacgagcccaccatggacagaacctgccccttcctggacaagatctaccaggaggacatcttcccctgcctgaccttcagcaagagcgagctggccagcgccgtgctggaggccgtggagaacaacaccctgagcatcgagcccgtgggcctgcagcccatcagattcgtgaaggccagcgccgtggagtgcggcggccccaagaagtgcgccctgaccggccagagcaagagctgcaagcacagaatcaagctgggcgacagcagcaactactactacatcagccccttctgcagatacagaatcaccagcgtgtgcaacttcttcacctacatcagatacatccagcagggcctggtgaagcagcaggacgtggaccagatgttctgggaggtgatgcagctgagaaaggagatgagcctggccaagctgggctacttcaaggaggagctgtag

SEQ ID NO: 9321 - DNA, 981 bp, Homo sapiens
  source 1..981: mol_type = genomic DNA
atggccaccctggtggagctgcccgacagcgtgctgctggagatcttcagctacctgcccgtgagagacagaatcagaatcagcagagtgtgccacagatggaagagactggtggacgacagatggctgtggagacacgtggacctgaccctgtacaccatgagacccaaggtgatgtggcacctgctgagaagatacatggccagcagactgcacagcctgagaatgggcggctacctgttcagcggcagccaggccccccagctgagccccgccctgctgagagccctgggccagaagtgccccaacctgaagagactgtgcctgcacgtggccgacctgagcatggtgcccatcaccagcctgcccagcaccctgagaaccctggagctgcacagctgcgagatcagcatggcctggctgcacaagcagcaggaccccaccgtgctgcccctgctggagtgcatcgtgctggacagagtgcccgccttcagagacgagcacctgcagggcctgaccagattcagagccctgagaagcctggtgctgggcggcacctacagagtgaccgagaccggcctggacgccggcctgcaggagctgagctacctgcagagactggaggtgctgggctgcaccctgagcgccgacagcaccctgctggccatcagcagacacctgagagacgtgagaaagatcagactgaccgtgagaggcctgagcgcccccggcctggccgtgctggagggcatgcccgccctggagagcctgtgcctgcagggccccctggtgacccccgagatgcccagccccaccgagatcctgagcagctgcctgaccatgcccaagctgagagtgctggagctgcagggcctgggctgggagggccaggaggccgagaagatcctgtgcaagggcctgccccactgcatggtgatcgtgagagcctgccccaaggagagcatggactggtggatgtag

SEQ ID NO: 9322 - DNA, 3090 bp, Homo sapiens
  source 1..3090: mol_type = genomic DNA
atggccagcgaggccgtgaaggtggtggtgagatgcagacccatgaaccagagagagagagagctgagatgccagcccgtggtgaccgtggactgcgccagagcccagtgctgcatccagaaccccggcgccgccgacgagccccccaagcagttcaccttcgacggcgcctaccacgtggaccacgtgaccgagcagatctacaacgagatcgcctaccccctggtggagggcgtgaccgagggctacaacggcaccatcttcgcctacggccagaccggcagcggcaagagcttcaccatgcagggcctgcccgacccccccagccagagaggcatcatccccagagccttcgagcacgtgttcgagagcgtgcagtgcgccgagaacaccaagttcctggtgagagccagctacctggagatctacaacgaggacgtgagagacctgctgggcgccgacaccaagcagaagctggagctgaaggagcaccccgagaagggcgtgtacgtgaagggcctgagcatgcacaccgtgcacagcgtggcccagtgcgagcacatcatggagaccggctggaagaacagaagcgtgggctacaccctgatgaacaaggacagcagcagaagccacagcatcttcaccatcagcatcgagatgagcgccgtggacgagagaggcaaggaccacctgagagccggcaagctgaacctggtggacctggccggcagcgagagacagagcaagaccggcgccaccggcgagagactgaaggaggccaccaagatcaacctgagcctgagcgccctgggcaacgtgatcagcgccctggtggacggcagatgcaagcacgtgccctacagagacagcaagctgaccagactgctgcaggacagcctgggcggcaacaccaagaccctgatggtggcctgcctgagccccgccgacaacaactacgacgagaccctgagcaccctgagatacgccaacagagccaagaacatcagaaacaagcccagaatcaacgaggaccccaaggacgccctgctgagagagtaccaggaggagatcaagaagctgaaggccatcctgacccagcagatgagccccagcagcctgagcgccctgctgagcagacaggtgccccccgaccccgtgcaggtggaggagaagctgctgccccagcccgtgatccagcacgacgtggaggccgagaagcagctgatcagagaggagtacgaggagagactggccagactgaaggccgactacaaggccgagcaggagagcagagccagactggaggaggacatcaccgccatgagaaacagctacgacgtgagactgagcaccctggaggagaacctgagaaaggagaccgaggccgtgctgcaggtgggcgtgctgtacaaggccgaggtgatgagcagagccgagttcgccagcagcgccgagtacccccccgccttccagtacgagaccgtggtgaagcccaaggtgttcagcaccaccgacaccctgcccagcgacgacgtgagcaagacccaggtgagcagcagattcgccgagctgcccaaggtggagcccagcaagagcgagatcagcctgggcagcagcgagagcagcagcctggaggagaccagcgtgagcgaggccttccccggccccgaggagcccagcaacgtggaggtgagcatgcccaccgaggagagcagaagcagatacttcctggacgagtgcctgggccaggaggccgccggccacctgctgggcgagcagaactacctgccccaggaggagccccaggaggtgcccctgcagggcctgctgggcctgcaggaccccttcgccgaggtggaggccaagctggccagactgagcagcaccgtggccagaaccgacgccccccaggccgacgtgcccaaggtgcccgtgcaggtgcccgcccccaccgacctgctggagcccagcgacgccagacccgaggccgaggccgccgacgacttcccccccagacccgaggtggacctggccagcgaggtggccctggaggtggtgagaaccgccgagcccggcgtgtggctggaggcccaggcccccgtggccctggtggcccagcccgagcccctgcccgccaccgccggcgtgaagagagagagcgtgggcatggaggtggccgtgctgaccgacgaccccctgcccgtggtggaccagcagcaggtgctggccagactgcagctgctggagcagcaggtggtgggcggcgagcaggccaagaacaaggacctgaaggagaagcacaagagaagaaagagatacgccgacgagagaagaaagcagctggtggccgccctgcagaacagcgacgaggacagcggcgactgggtgctgctgaacgtgtacgacagcatccaggaggaggtgagagccaagagcaagctgctggagaagatgcagagaaagctgagagccgccgaggtggagatcaaggacctgcagagcgagttccagctggagaagatcgactacctggccaccatcagaagacaggagagagacagcatgctgctgcagcagctgctggagcaggtgcagcccctgatcagaagagactgcaactacagcaacctggagaagatcctgagagagagctgctgggacgaggacaacggcttctggaagatcccccaccccgtgatcaccaagaccagcctgcccgtggccgtgagcaccggcccccagaacaagcccgccagaaagaccagcgccgccgacaacggcgagcccaacatggaggacgacagatacagactgatgctgagcagaagcaacagcgagaacatcgccagcaactacttcagaagcaagagagccagccagatcctgagcaccgacgccagaaagagcctgacccaccacaacagcccccccggcctgagctgccccctgagcaacaacagcgccatcccccccacccaggcccccgagatgccccagcccagacccttcagactggagagcctggacatccccttcaccaaggccaagagaaagaagagcaagagcaacttcggcagcgagcccctgtag

SEQ ID NO: 9323 - DNA, 417 bp, Homo sapiens
  source 1..417: mol_type = genomic DNA
atgatcctgcagcagcccctgcagagaggcccccagggcggcgcccagagactgcccagagccgccctgggcgtgacctggggcctggacgccagcagccccctgagaggcgccgtgcccatgagcaccaagagaagactggaggaggagcaggagcccctgagaaagcagttcctgagcgaggagaacatggccacccacttcagccagctgagcctgcacaacgaccacccctactgcagcccccccatgaccttcagccccgccctgccccccctgagaagcccctgcagcgagctgctgctgtggagataccccggcagcctgatccccgaggccctgagactgctgagactgggcgacacccccagccccccctaccccgccacccccgccggcgacatcatggagctgtag

SEQ ID NO: 9324 - DNA, 573 bp, Homo sapiens
  source 1..573: mol_type = genomic DNA
atgttccaggtgcccgacagcgagggcggcagagccggcagcagagccatgaagccccccggcggcgagagcagcaacctgttcggcagccccgaggaggccacccccagcagcagacccaacagaatggccagcaacatcttcggccccaccgaggagccccagaacatccccaagagaaccaacccccccggcggcaagggcagcggcatcttcgacgagagcacccccgtgcagaccagacagcacctgaacccccccggcggcaagaccagcgacatcttcggcagccccgtgaccgccaccagcagactggcccaccccaacaagcccaaggaccacgtgttcctgtgcgagggcgaggagcccaagagcgacctgaaggccgccagaagcatccccgccggcgccgagcccggcgagaagggcagcgccagaaaggccggccccgccaaggagcaggagcccatgcccaccgtggacagccacgagcccagactgggccccagacccagaagccacaacaaggtgctgaacccccccggcggcaagagcagcatcagcttctactag

SEQ ID NO: 9325 - DNA, 690 bp, Homo sapiens
  source 1..690: mol_type = genomic DNA
atgacctgctgcagccaggtgccccccagaagaagacccagcctggccctgagccccagactggactgcaacggcctgaacggcgtgcccggcagcatctgggacttcgtgagcggcagcttcagccccagccccagccccatcctgagcgccggcccccccagcagcagcagcgccagccccaacggcgccgagctggccagagtgagaagacagctggacgaggccaagagaaagatcagacagtgggaggagagctggcagcaggtgaagcaggtgtgcgacgcctggcagagagaggcccaggaggccaaggagagagccagagtggccgacagcgacagacagctggccctgcagaagaaggaggaggtggaggcccaggtgaagcagctgcaggaggagctggagggcctgggcgtggccagcaccctgcccggcctgagaggctgcggcgacatcggcaccatccccctgcccaagctgcacagcctgcagagccagctgagactggacctggaggccgtggacggcgtgatcttccagctgagagccaagcagtgcgtggcctgcagagagagagcccacggcgccgtgctgagaccctgccagcaccacatcctgtgcgagccctgcgccgccaccgcccccgagtgcccctactgcaagggccagcccctgcagtggtag

SEQ ID NO: 9326 - DNA, 5460 bp, Homo sapiens
  source 1..5460: mol_type = genomic DNA
atggccagcatcacccagctgttcgacgacctgtgcgaggccctgctgcccgccgccaagacccacctgggccagagaagcgtgaacagaaagagagccaagagaagcctgaagaaggtggcctacaacgccctgttcaccaacctgttccaggacgagacccagcagctgcagcccgacatgagcaagctgcccgccagaaacaagatcctgatgctgagcttcgacctgagagtgggcggcctgggccccaaggccgacagactggaggagctggtggaggagctggaggccgccccctgctgccccctgctggaggtgggcagcgtgctggacctgctggtgcagctggccggcagcggccccccccaggtgctgcccagaaagagagactacttcctgaacaacaagcacgtgggcagaaacgtgccctacagcggctacgactgcgacgacctgagcgtgttcgagatggacgtgcagagcctgatcagcagagaggagtgcctgtgccacagcatgatccaggagaccctgcaggtgatggaggccgcccccggcaccggcctgcccaccgtgggcctgttcagcttcggcgacccctgcggcgacagattcgagagagacaccagagtgagcctgttcggcgccctggtgcacagcagaacctacgacatggacgtgagactgggcctgccccccgtgcccgacaacgccgacctgagcggcctggccatcaaggtgccccccagcgtggaccagtgggaggacgagggcttccagagcgccagcaacctgacccccgacagccagagcgagcccagcgtgacccccgacgtggacctgtgggaggccgccctgacctacgaggccagcaagagaagatgctgggagagagtgggctgcccccccggccacagagaggagccctacctgaccgaggccggcagagacgccttcgacaagttctgcagactgcaccagggcgagctgcagctgctggccggcggcgtgctgcaggccccccagcccgtgctggtgaaggagtgcgagctggtgaaggacgtgctgaacgtgctgatcggcgtggtgagcgccaccttcagcctgtgccagcccgcccaggccttcgtggtgaagagaggcgtgcacgtgagcggcgccagccccgagagcatcagcagcctgctgagcgaggtggccgagtacggcacctgctacaccagactgagccacttcagcctgcagcccgtgctggacagcctgtacagcaagggcctggtgttccaggccttcaccagcggcctgagaagatacctgcagtactacagagcctgcgtgctgagcaccccccccaccctgagcctgctgaccatcggcttcctgttcaagaagctgggcagacagctgagatacctggccgagctgtgcggcgtgggcgccgtgctgcccggcacctgcggcggcggccccagagccgccttccccaccggcgtgaagctgctgagctacctgtaccaggaggccctgcacaactgcagcaacgagcactaccccgtgctgctgagcctgctgaagaccagctgcgagccctacaccagattcatccacgactgggtgtacagcggcgtgttcagagacgcctacggcgagttcatgatccaggtgaaccacgagtacctgagcttcagagacaagctgtactggacccacggctacgtgctgatcagcaaggaggtggaggactgcgtgcccgtgttcctgaagcacatcgcccacgacatctacgtgtgcggcaagaccatcaacctgctgaagctgtgctgccccagacactacctgtgctggagcgacgtgcccgtgcccagaatcagcgtgatcttcagcctggaggagctgaaggagatcgagaaggactgcgccgtgtacgtgggcagaatggagagagtggccagacacagcagcgtgagcaaggaggagaaggagctgagaatggagatcgccaagcaggagctgatcgcccacgccagagaggccgccagcagagtgctgagcgccctgagcgacagacagatgagcgagagaatggccctggacgccagaaagagagagcagttccagagactgaaggagcagttcgtgaaggaccaggagagaagacaggccgccagacaggaggagctggacgacgacttcagctacgccagagagctgagagacagagagagaagactgaagagcctggaggaggagctggagagaaaggccagacaggccctggtggaccactacagcaagctgagcgccgaggccgccagaagagagcagaaggccctgtggagaatccagagacacagactggagagcgccagactgagattcctgctggaggacgagaagcacatccaggagatgctgaaggccgtgagcgaggcccaccagccccaggagccccccgacgtgctgctgagcgtgcacccccaggtgaccagccccggccccgagcaccccgagggcggccagggctgcgacagcggcagcgccgagcagcacagccccgcctgggacggctggaacagacccggcctgctgaccccccagcccctgaagcccctggccgtgggcgccggcggcagaggcctgcagcaggccgagggcgccagacccttcagcgacagcctgagcatcggcgacttcctgcccgtgggccccggcgccgagcccagcgtgcagaccggcatggtgcccctgctggaggtggccctgcagaccatcaacctggacctgccccccagcgcccccggcgaggcccccgccgccgccagcacccagcccagcagaccccaggagtacgacttcagcaccgtgctgagacccgccgtggccaccagccccgcccccggccccctgcaggccgccgagtgcagcctgggcagcagcggcctgcagctgtgggaggacagctgcggcaagatggacgcctgcggcagcgccagcagagagaccctgctgcccagccacccccccagaagagccgccctggaggagggcagcagccagcccaccgagagactgttcggccaggtgagcggcggcggcctgcccaccggcgactacgccagcgagatcgcccccaccagacccagatggaacacccacggccacgtgagcgacgccagcatcagagtgggcgagaacgtgagcgacgtggcccccacccagcccagatggaacacccacggccacgtgagcaacgccagcatcagcctgggcgagagcgtgagcgacgtggcccccaccagacccagatggaacatccacggccacgtgagcaacgccagcatcagagtgggcgagaacgtgagcgacgtggcccccaccagacccagatggaacacccacggccacgtgagcaacgccagcatcagagtgggcgagaacgtgagcgacgtggcccccaccagacccagatggaacacccacggccacgtgagcgacgccagcatcagcctgggcgagagcgtgagcgacatggcccccgccagacccagatggaacacccacggccacgtgagcgacgccagcatcagcctgggcgagagcgtgagcgacatggcccccaccagacccagatggaacacccacggccacgtgagcgacaccagcatcagagtgggcgagaacgtgagcgacgtggcccccatcagaagcagatgcaacacccacggccacgtgagcgacgccagcatcagcctgggcgagcccgtgagcgacgtggtgagcaccagacccagatggaacacccacgtgcccatcccccccccccacatggtgctgggcgccctgagccccgaggccgagcccaacacccccagaccccagcagagcccccccggccacaccagccagagcgccctgagcctgggcgcccagagcaccgtgctggactgcggccccagactgcccgtggaggtgggccccagcctgagcagccccagcagcggctgcggcgagggcagcatcagcgtgggcgagaacgtgagcgacgtggcccccacccagccctggtggcccaacacccccggcgacagcgtgagcgaggagctgggccccggcagaagcggcgacaccgaggacctgagccccaactggcccctgaacagccaggaggacaccgccgcccagagcagccccggcagaggcgaggaggccgaggccagcgccgccgaggcccagggcggcgagcaggcctacctggccggcctggccggccagtaccacctggagagataccccgacagctacgagagcatgagcgagccccccatcgcccacctgctgagacccgtgctgcccagagccttcgccttccccgtggacccccaggtgcagagcgccgccgacgagaccgccgtgcagctgagcgagctgctgaccctgcccgtgctgatgaagagaagcatcaccgcccccctggccgcccacatcagcctggtgaacaaggccgccgtggactacttcttcgtggagctgcacctggaggcccactacgaggccctgagacacttcctgctgatggaggacggcgagttcgcccagagcctgagcgacctgctgttcgagaagctgggcgccggccagacccccggcgagctgctgaaccccctggtgctgaacagcgtgctgagcaaggccctgcagtgcagcctgcacggcgacaccccccacgccagcaacctgagcctggccctgaagtacctgcccgaggtgttcgcccccaacgcccccgacgtgctgagctgcctggagctgagatacaaggtggactggcccctgaacatcgtgatcaccgagggctgcgtgagcaagtacagcggcgtgttcagcttcctgctgcagctgaagctgatgatgtgggccctgaaggacgtgtgcttccacctgaagagaaccgccctgctgagccacatggccggcagcgtgcagttcagacagctgcagctgttcaagcacgagatgcagcacttcgtgaaggtgatccagggctacatcgccaaccagatcctgcacgtgacctggtgcgagttcagagccagactggccaccgtgggcgacctggaggagatccagagagcccacgccgagtacctgcacaaggccgtgttcagaggcctgctgaccgagaaggccgcccccgtgatgaacgtgatccacagcatcttcagcctggtgctgaagttcagaagccagctgatcagccaggcctggggcccccccggcggccccagaggcgccgagcaccccaacttcgccctgatgcagcagagctacaacaccttcaagtactacagccacttcctgttcaaggtggtgaccaagctggtgaacagaggctaccagccccacctggaggacttcctgctgagaatcaacttcaacaactactaccaggacgcctag

SEQ ID NO: 9327 - DNA, 2250 bp, Homo sapiens
  source 1..2250: mol_type = genomic DNA
atgagcggcagccacacccccgcctgcggccccttcagcgccctgacccccagcatctggccccaggagatcctggccaagtacacccagaaggaggagagcgccgagcagcccgagttctactacgacgagttcggcttcagagtgtacaaggaggagggcgacgagcccggcagcagcctgctggccaacagccccctgatggaggacgccccccagagactgagatggcaggcccacctggagttcacccacaaccacgacgtgggcgacctgacctgggacaagatcgccgtgagcctgcccagaagcgagaagctgagaagcctggtgctggccggcatcccccacggcatgagaccccagctgtggatgagactgagcggcgccctgcagaagaagagaaacagcgagctgagctacagagagatcgtgaagaacagcagcaacgacgagaccatcgccgccaagcagatcgagaaggacctgctgagaaccatgcccagcaacgcctgcttcgccagcatgggcagcatcggcgtgcccagactgagaagagtgctgagagccctggcctggctgtaccccgagatcggctactgccagggcaccggcatggtggccgcctgcctgctgctgttcctggaggaggaggacgccttctggatgatgagcgccatcatcgaggacctgctgcccgccagctacttcagcaccaccctgctgggcgtgcagaccgaccagagagtgctgagacacctgatcgtgcagtacctgcccagactggacaagctgctgcaggagcacgacatcgagctgagcctgatcaccctgcactggttcctgaccgccttcgccagcgtggtggacatcaagctgctgctgagaatctgggacctgttcttctacgagggcagcagagtgctgttccagctgaccctgggcatgctgcacctgaaggaggaggagctgatccagagcgagaacagcgccagcatcttcaacaccctgagcgacatccccagccagatggaggacgccgagctgctgctgggcgtggccatgagactggccggcagcctgaccgacgtggccgtggagacccagagaagaaagcacctggcctacctgatcgccgaccagggccagctgctgggcgccggcaccctgaccaacctgagccaggtggtgagaagaagaacccagagaagaaagagcaccatcaccgccctgctgttcggcgaggacgacctggaggccctgaaggccaagaacatcaagcagaccgagctggtggccgacctgagagaggccatcctgagagtggccagacacttccagtgcaccgaccccaagaactgcagcgtggagctgacccccgactacagcatggagagccaccagagagaccacgagaactacgtggcctgcagcagaagccacagaagaagagccaaggccctgctggacttcgagagacacgacgacgacgagctgggcttcagaaagaacgacatcatcaccatcgtgagccagaaggacgagcactgctgggtgggcgagctgaacggcctgagaggctggttccccgccaagttcgtggaggtgctggacgagagaagcaaggagtacagcatcgccggcgacgacagcgtgaccgagggcgtgaccgacctggtgagaggcaccctgtgccccgccctgaaggccctgttcgagcacggcctgaagaagcccagcctgctgggcggcgcctgccacccctggctgttcatcgaggaggccgccggcagagaggtggagagagacttcgccagcgtgtacagcagactggtgctgtgcaagaccttcagactggacgaggacggcaaggtgctgacccccgaggagctgctgtacagagccgtgcagagcgtgaacgtgacccacgacgccgtgcacgcccagatggacgtgaagctgagaagcctgatctgcgtgggcctgaacgagcaggtgctgcacctgtggctggaggtgctgtgcagcagcctgcccaccgtggagaagtggtaccagccctggagcttcctgagaagccccggctgggtgcagatcaagtgcgagctgagagtgctgtgctgcttcgccttcagcctgagccaggactgggagctgcccgccaagagagaggcccagcagcccctgaaggagggcgtgagagacatgctggtgaagcaccacctgttcagctgggacgtggacggctag

SEQ ID NO: 9328 - DNA, 2097 bp, Homo sapiens
  source 1..2097: mol_type = genomic DNA
atgctgagccccaagatcagacaggccagaagagccagaagcaagagcctggtgatgggcgagcagagcagaagccccggcagaatgccctgcccccacagactgggccccgtgctgaaggccggctggctgaagaagcagagaagcatcatgaagaactggcagcagagatggttcgtgctgagaggcgaccagctgttctactacaaggacaaggacgagatcaagccccagggcttcatcagcctgcagggcacccaggtgaccgagctgccccccggccccgaggaccccggcaagcacctgttcgagatcagccccggcggcgccggcgagagagagaaggtgcccgccaaccccgaggccctgctgctgatggccagcagccagagagacatggaggactgggtgcaggccatcagaagagtgatctgggcccccctgggcggcggcatcttcggccagagactggaggagaccgtgcaccacgagagaaagtacggccccagactggcccccctgctggtggagcagtgcgtggacttcatcagagagagaggcctgaccgaggagggcctgttcagaatgcccggccaggccaacctggtgagagacctgcaggacagcttcgactgcggcgagaagcccctgttcgacagcaccaccgacgtgcacaccgtggccagcctgctgaagctgtacctgagagagctgcccgagcccgtggtgcccttcgccagatacgaggacttcctgagctgcgcccagctgctgaccaaggacgagggcgagggcaccctggagctggccaagcaggtgagcaacctgccccaggccaactacaacctgctgagatacatctgcaagttcctggacgaggtgcaggcctacagcaacgtgaacaagatgagcgtgcagaacctggccaccgtgttcggccccaacatcctgagaccccaggtggaggaccccgtgaccatcatggagggcaccagcctggtgcagcacctgatgaccgtgctgatcagaaagcacagccagctgttcaccgcccccgtgcccgagggccccaccagccccagaggcggcctgcagtgcgccgtgggctggggcagcgaggaggtgaccagagacagccagggcgagcccggcggccccggcctgcccgcccacagaaccagcagcctggacggcgccgccgtggccgtgctgagcagaaccgcccccaccggccccggcagcagatgcagccccggcaagaaggtgcagaccctgcccagctggaagagcagcttcagacagcccagaagcctgagcggcagccccaagggcggcggcagcagcctggaggtgcccatcatcagcagcggcggcaactggctgatgaacggcctgagcagcctgagaggccacagaagagccagcagcggcgacagactgaaggacagcggcagcgtgcagagactgagcacctacgacaacgtgcccgcccccggcctggtgcccggcatccccagcgtggccagcatggcctggagcggcgccagcagcagcgagagcagcgtgggcggcagcctgagcagctgcaccgcctgcagagccagcgacagcagcgccagaagcagcctgcacaccgactgggccctggagcccagccccctgcccagcagcagcgaggaccccaagagcctggacctggaccacagcatggacgaggccggcgccggcgccagcaacagcgagcccagcgagcccgacagccccaccagagagcacgccagaagaagcgaggccctgcagggcctggtgaccgagctgagagccgagctgtgcagacagagaaccgagtacgagagaagcgtgaagagaatcgaggagggcagcgccgacctgagaaagagaatgagcagactggaggaggagctggaccaggagaagaagaagtacatcatgctggagatcaagctgagaaacagcgagagagccagagaggacgccgagagaagaaaccagctgctgcagagagagatggaggagttcttcagcaccctgggcagcctgaccgtgggcgccaagggcgccagagcccccaagtag

SEQ ID NO: 9329 - DNA, 180 bp, Homo sapiens
  source 1..180: mol_type = genomic DNA
atgaccagaggcaaccagagagagctggccagacagaagaacatgaagaagcagagcgacagcgtgaagggcaagagaagagacgacggcctgagcgccgccgccagaaagcagagagacagcgagatcatgcagcagaagcagaagaaggccaacgagaagaaggaggagcccaagtag

SEQ ID NO: 9330 - DNA, 372 bp, Homo sapiens
  source 1..372: mol_type = genomic DNA
atggccagatacgaggaggtgagcgtgagcggcttcgaggagttccacagagccgtggagcagcacaacggcaagaccatcttcgcctacttcaccggcagcaaggacgccggcggcaagagctggtgccccgactgcgtgcaggccgagcccgtggtgagagagggcctgaagcacatcagcgagggctgcgtgttcatctactgccaggtgggcgagaagccctactggaaggaccccaacaacgacttcagaaagaacctgaaggtgaccgccgtgcccaccctgctgaagtacggcaccccccagaagctggtggagagcgagtgcctgcaggccaacctggtggagatgctgttcagcgaggactag

SEQ ID NO: 9331 - DNA, 1401 bp, Homo sapiens
  source 1..1401: mol_type = genomic DNA
atgggctggatcaccgaggacctgatcagaagaaacgccgagcacaacgactgcgtgatcttcagcctggaggagctgagcctgcaccagcaggagatcgagagactggagcacatcgacaagtggtgcagagacctgaagatcctgtacctgcagaacaacctgatcggcaagatcgagaacgtgagcaagctgaagaagctggagtacctgaacctggccctgaacaacatcgagaagatcgagaacctggagggctgcgaggagctggccaagctggacctgaccgtgaacttcatcggcgagctgagcagcatcaagaacctgcagcacaacatccacctgaaggagctgttcctgatgggcaacccctgcgccagcttcgaccactacagagagttcgtggtggccaccctgccccagctgaagtggctggacggcaaggagatcgagcccagcgagagaatcaaggccctgcaggactacagcgtgatcgagccccagatcagagagcaggagaaggaccactgcctgaagagagccaagctgaaggaggaggcccagagaaagcaccaggaggaggacaagaacgaggacaagagaagcaacgccggcttcgacggcagatggtacaccgacatcaacgccaccctgagcagcctggagagcaaggaccacctgcaggcccccgacaccgaggagcacaacaccaagaagctggacaacagcgaggacgacctggagttctggaacaagccctgcctgttcacccccgagagcagactggagaccctgagacacatggagaagcagagaaagaagcaggagaagctgagcgagaagaagaagaaggtgaagccccccagaaccctgatcaccgaggacggcaaggccctgaacgtgaacgagcccaagatcgacttcagcctgaaggacaacgagaagcagatcatcctggacctggccgtgtacagatacatggacaccagcctgatcgacgtggacgtgcagcccacctacgtgagagtgatgatcaagggcaagcccttccagctggtgctgcccgccgaggtgaagcccgacagcagcagcgccaagagaagccagaccaccggccacctggtgatctgcatgcccaaggtgggcgaggtgatcaccggcggccagagagccttcaagagcatgaagaccaccagcgacagaagcagagagcagaccaacaccagaagcaagcacatggagaagctggaggtggaccccagcaagcacagcttccccgacgtgaccaacatcgtgcaggagaagaagcacacccccagaagaagacccgagcccaagatcatccccagcgaggaggaccccaccttcgaggacaaccccgaggtgccccccctgatctag

SEQ ID NO: 9332 - DNA, 1050 bp, Homo sapiens
  source 1..1050: mol_type = genomic DNA
atggaggacccccagagcaaggagcccgccggcgaggccgtggccctggccctgctggagagccccagacccgagggcggcgaggagccccccagacccagccccgaggagacccagcagtgcaagttcgacggccaggagaccaagggcagcaagttcatcaccagcagcgccagcgacttcagcgaccccgtgtacaaggagatcgccatcaccaacggctgcatcaacagaatgagcaaggaggagctgagagccaagctgagcgagttcaagctggagaccagaggcgtgaaggacgtgctgaagaagagactgaagaactactacaagaagcagaagctgatgctgaaggagagcaacttcgccgacagctactacgactacatctgcatcatcgacttcgaggccacctgcgaggagggcaacccccccgagttcgtgcacgagatcatcgagttccccgtggtgctgctgaacacccacaccctggagatcgaggacaccttccagcagtacgtgagacccgagatcaacacccagctgagcgacttctgcatcagcctgaccggcatcacccaggaccaggtggacagagccgacaccttcccccaggtgctgaagaaggtgatcgactggatgaagctgaaggagctgggcaccaagtacaagtacagcctgctgaccgacggcagctgggacatgagcaagttcctgaacatccagtgccagctgagcagactgaagtacccccccttcgccaagaagtggatcaacatcagaaagagctacggcaacttctacaaggtgcccagaagccagaccaagctgaccatcatgctggagaagctgggcatggactacgacggcagaccccactgcggcctggacgacagcaagaacatcgccagaatcgccgtgagaatgctgcaggacggctgcgagctgagaatcaacgagaagatgcacgccggccagctgatgagcgtgagcagcagcctgcccatcgagggcaccccccccccccagatgccccacttcagaaagtag

SEQ ID NO: 9333 - DNA, 843 bp, Homo sapiens
  source 1..843: mol_type = genomic DNA
atgctgagcgccgtggccagaggctaccagggctggttccacccctgcgccagactgagcgtgagaatgagcagcaccggcatcgacagaaagggcgtgctggccaacagagtggccgtggtgaccggcagcaccagcggcatcggcttcgccatcgccagaagactggccagagacggcgcccacgtggtgatcagcagcagaaagcagcagaacgtggacagagccatggccaagctgcagggcgagggcctgagcgtggccggcatcgtgtgccacgtgggcaaggccgaggacagagagcagctggtggccaaggccctggagcactgcggcggcgtggacttcctggtgtgcagcgccggcgtgaaccccctggtgggcagcaccctgggcaccagcgagcagatctgggacaagatcctgagcgtgaacgtgaagagccccgccctgctgctgagccagctgctgccctacatggagaacagaagaggcgccgtgatcctggtgagcagcatcgccgcctacaaccccgtggtggccctgggcgtgtacaacgtgagcaagaccgccctgctgggcctgaccagaaccctggccctggagctggcccccaaggacatcagagtgaactgcgtggtgcccggcatcatcaagaccgacttcagcaaggtgttccacggcaacgagagcctgtggaagaacttcaaggagcaccaccagctgcagagaatcggcgagagcgaggactgcgccggcatcgtgagcttcctgtgcagccccgacgccagctacgtgaacggcgagaacatcgccgtggccggctacagcaccagactgtag

SEQ ID NO: 9334 - DNA, 909 bp, Homo sapiens
  source 1..909: mol_type = genomic DNA
atggtgaccgagcaggaggtggacgccatcggccagaccctggtggaccccaagcagcccctgcaggccagattcagagccctgttcaccctgagaggcctgggcggccccggcgccatcgcctggatcagccaggccttcgacgacgacagcgccctgctgaagcacgagctggcctactgcctgggccagatgcaggacgccagagccatccccatgctggtggacgtgctgcaggacaccagacaggagcccatggtgagacacgaggccggcgaggccctgggcgccatcggcgaccccgaggtgctggagatcctgaagcagtacagcagcgaccccgtgatcgaggtggccgagacctgccagctggccgtgagaagactggagtggctgcagcagcacggcggcgagcccgccgccggcccctacctgagcgtggaccccgccccccccgccgaggagagagacgtgggcagactgagagaggccctgctggacgagagcagacccctgttcgagagatacagagccatgttcgccctgagaaacgccggcggcgaggaggccgccctggccctggccgagggcctgcactgcggcagcgccctgttcagacacgaggtgggctacgtgctgggccagctgcagcacgaggccgccgtgccccagctggccgccgccctggccagatgcaccgagaaccccatggtgagacacgagtgcgccgaggccctgggcgccatcgccagacccgcctgcctggccgccctgcaggcccacgccgacgaccccgagagagtggtgagagagagctgcgaggtggccctggacatgtacgagcacgagaccggcagagccttccagtacgccgacggcctggagcagctgagaggcgcccccagctag

SEQ ID NO: 9335 - DNA, 3384 bp, Homo sapiens
  source 1..3384: mol_type = genomic DNA
atggaggtgcaggtgagccaggccagcctgggcttcgagctgaccagcgtggagaagagcctgagagagtggagcagactgagcagagaggtgatcgcctggctgtgccccagcagccccaacttcatcctgaacttcccccccccccccagcgccagcagcgtgagcatggtgcagctgttcagcagccccttcggctaccagagccccagcggccacagcgaggaggagagagagggcaacatgaagagcgccaagccccaggtgaaccacagccagcacggcgagagccagagagccctgagccccctgcagagcaccctgagcagcgccgccagccccagccaggcctacgagacctacatcgagaacggcctgatctgcctgaagcacaagatcagaaacatcgagaagaagaagctgaagctggaggactacaaggacagactgaagagcggcgagcacctgaaccccgaccagctggaggccgtggagaagtacgaggaggtgctgcacaacctggagttcgccaaggagctgcagaagaccttcagcggcctgagcctggacctgctgaaggcccagaagaaggcccagagaagagagcacatgctgaagctggaggccgagaagaagaagctgagaaccatcctgcaggtgcagtacgtgctgcagaacctgacccaggagcacgtgcagaaggacttcaagggcggcctgaacggcgccgtgtacctgcccagcaaggagctggactacctgatcaagttcagcaagctgacctgccccgagagaaacgagagcctgagcgtggaggaccagatggagcagagcagcctgtacttctgggacctgctggagggcagcgagaaggccgtggtgggcaccacctacaagcacctgaaggacctgctgagcaagctgctgaacagcggctacttcgagagcatccccgtgcccaagaacgccaaggagaaggaggtgcccctggaggaggagatgctgatccagagcgagaagaagacccagctgagcaagaccgagagcgtgaaggagagcgagagcctgatggagttcgcccagcccgagatccagccccaggagttcctgaacagaagatacatgaccgaggtggactacagcaacaagcagggcgaggagcagccctgggaggccgactacgccagaaagcccaacctgcccaagagatgggacatgctgaccgagcccgacggccaggagaagaagcaggagagcttcaagagctgggaggccagcggcaagcaccaggaggtgagcaagcccgccgtgagcctggagcagagaaagcaggacaccagcaagctgagaagcaccctgcccgaggagcagaagaagcaggagatcagcaagagcaagcccagccccagccagtggaagcaggacacccccaagagcaaggccggctacgtgcaggaggagcagaagaagcaggagacccccaagctgtggcccgtgcagctgcagaaggagcaggaccccaagaagcagacccccaagagctggacccccagcatgcagagcgagcagaacaccaccaagagctggaccacccccatgtgcgaggagcaggacagcaagcagcccgagacccccaagagctgggagaacaacgtggagagccagaagcacagcctgaccagccagagccagatcagccccaagagctggggcgtggccaccgccagcctgatccccaacgaccagctgctgcccagaaagctgaacaccgagcccaaggacgtgcccaagcccgtgcaccagcccgtgggcagcagcagcaccctgcccaaggaccccgtgctgagaaaggagaagctgcaggacctgatgacccagatccagggcacctgcaacttcatgcaggagagcgtgctggacttcgacaagcccagcagcgccatccccaccagccagccccccagcgccacccccggcagccccgtggccagcaaggagcagaacctgagcagccagagcgacttcctgcaggagcccctgcaggccaccagcagccccgtgacctgcagcagcaacgcctgcctggtgaccaccgaccaggccagcagcggcagcgagaccgagttcatgaccagcgagacccccgaggccgccatcccccccggcaagcagcccagcagcctggccagccccaacccccccatggccaagggcagcgagcagggcttccagagcccccccgccagcagcagcagcgtgaccatcaacaccgcccccttccaggccatgcagaccgtgttcaacgtgaacgcccccctgccccccagaaaggagcaggagatcaaggagagcccctacagccccggctacaaccagagcttcaccaccgccagcacccagacccccccccagtgccagctgcccagcatccacgtggagcagaccgtgcacagccaggagaccgccgccaactaccaccccgacggcaccatccaggtgagcaacggcagcctggccttctaccccgcccagaccaacgtgttccccagacccacccagcccttcgtgaacagcagaggcagcgtgagaggctgcaccagaggcggcagactgatcaccaacagctacagaagccccggcggctacaagggcttcgacacctacagaggcctgcccagcatcagcaacggcaactacagccagctgcagttccaggccagagagtacagcggcgccccctacagccagagagacaacttccagcagtgctacaagagaggcggcaccagcggcggccccagagccaacagcagagccggctggagcgacagcagccaggtgagcagccccgagagagacaacgagaccttcaacagcggcgacagcggccagggcgacagcagaagcatgacccccgtggacgtgcccgtgaccaaccccgccgccaccatcctgcccgtgcacgtgtaccccctgccccagcagatgagagtggccttcagcgccgccagaaccagcaacctggcccccggcaccctggaccagcccatcgtgttcgacctgctgctgaacaacctgggcgagaccttcgacctgcagctgggcagattcaactgccccgtgaacggcacctacgtgttcatcttccacatgctgaagctggccgtgaacgtgcccctgtacgtgaacctgatgaagaacgaggaggtgctggtgagcgcctacgccaacgacggcgcccccgaccacgagaccgccagcaaccacgccatcctgcagctgttccagggcgaccagatctggctgagactgcacagaggcgccatctacggcagcagctggaagtacagcaccttcagcggctacctgctgtaccaggactag

SEQ ID NO: 9336 - DNA, 2448 bp, Homo sapiens
  source 1..2448: mol_type = genomic DNA
atggaggtgagagccagcctgcagaaggtgagcggcagcagcgacagcgtggccaccatgaacagcgaggagttcgtgctggtgccccagtacgccgacgacaacagcaccaagcacgaggagaagccccagctgaagatcgtgagcaacggcgacgagcagctggagaaggccatggaggagatcctgagagacagcgagaagagacccagcagcctgctggtggactgccagagcagcagcgagatcagcgaccacagcttcggcgacatccccgccagccagaccaacaagcccagcctgcagctgatcctggaccccagcaacaccgagatcagcacccccagacccagcagccccggcggcctgcccgaggaggacagcgtgctgttcaacaagctgacctacctgggctgcatgaaggtgagcagccccagaaacgaggtggaggccctgagagccatggccaccatgaagagcagcagccagtaccccttccccgtgaccctgtacgtgcccaacgtgcccgagggcagcgtgagaatcatcgaccagagcagcaacgtggagatcgccagcttccccatctacaaggtgctgttctgcgccagaggccacgacggcaccaccgagagcaactgcttcgccttcaccgagagcagccacggcagcgaggagttccagatccacgtgttcagctgcgagatcaaggaggccgtgagcagaatcctgtacagcttctgcaccgccttcaagagaagcagcagacaggtgagcgacgtgaaggacagcgtgatccccacccccgacagcgacgtgttcaccttcagcgtgagcctggaggtgaaggaggacgacggcaagggcaacttcagccccgtgcccaaggacagagacaagttctacttcaagctgaagcagggcatcgagaagaaggtggtgatcaccgtgcagcagctgagcaacaaggagctggccatcgagagatgcttcggcatgctgctgagccccggcagaaacgtgaagaacagcgacatgcacctgctggacatggagagcatgggcaagagctacgacggcagagcctacgtgatcaccggcatgtggaaccccaacgcccccgtgttcctggccctgaacgaggagacccccaaggacaagcaggtgtacatgaccgtggccgtggacatggtggtgaccgaggtggtggagcccgtgagattcctgctggagaccgtggtgagagtgtaccccgccaacgagagattctggtacttcagcagaaagaccttcaccgagaccttcttcatgagactgaagcagagcgagggcaagggccacaccaacgccggcgacgccatctacgaggtggtgagcctgcagagagagagcgacaaggaggagcccgtgacccccaccagcggcggcggccccatgagcccccaggacgacgaggccgaggaggagagcgacaacgagctgagcagcggcaccggcgacgtgagcaaggactgccccgagaagatcctgtacagctggggcgagctgctgggcaagtggcacagcaacctgggcgccagacccaagggcctgagcaccctggtgaagagcggcgtgcccgaggccctgagagccgaggtgtggcagctgctggccggctgccacgacaaccaggccatgctggacagatacagaatcctgatcaccaaggacagcgcccaggagagcgtgatcaccagagacatccacagaaccttccccgcccacgactacttcaaggacaccggcggcgacggccaggagagcctgtacaagatctgcaaggcctacagcgtgtacgacgaggacatcggctactgccagggccagagcttcctggccgccgtgctgctgctgcacatgcccgaggagcaggccttctgcgtgctggtgaagatcatgtacgactacggcctgagagacctgtacagaaacaacttcgaggacctgcactgcaagttctaccagctggagagactgatgcaggagcagctgcccgacctgcacagccacttcagcgacctgaacctggaggcccacatgtacgccagccagtggttcctgaccctgttcaccgccaagttccccctgtgcatggtgttccacatcatcgacctgctgctgtgcgagggcctgaacatcatcttccacgtggccctggccctgctgaagaccagcaaggaggacctgctgcaggccgacttcgagggcgccctgaagttcttcagagtgcagctgcccaagagatacagagccgaggagaacgccagaagactgatggagcaggcctgcaacatcaaggtgcccaccaagaagctgaagaagtacgagaaggagtaccagaccatgagagagagccagctgcagcaggaggaccccatggacagatacaagttcgtgtacctgtag

SEQ ID NO: 9337 - DNA, 639 bp, Homo sapiens
  source 1..639: mol_type = genomic DNA
atggcccagaccgacaagcccacctgcatcccccccgagctgcccaagatgctgaaggagttcgccaaggccgccatcagagcccagccccaggacctgatccagtggggcgccgactacttcgaggccctgagcagaggcgagaccccccccgtgagagagagaagcgagagagtggccctgtgcaactgggccgagctgacccccgagctgctgaagatcctgcacagccaggtggccggcagactgatcatcagagccgaggagctggcccagatgtggaaggtggtgaacctgcccaccgacctgttcaacagcgtgatgaacgtgggcagattcaccgaggagatcgagtggctgaagttcctggccctggcctgcagcgccctgggcgtgaccatcaccaagaccctgaagatcgtgtgcgaggtgctgagctgcgaccacaacggcggcctgcccagaatccccttcagcaccttccagttcctgtacacctacatcgccgaggtggacggcgagatctgcgccagccacgtgagcagaatgctgaactacatcgagcaggaggtgatcggccccgacggcctgatcaccgtgaacgacttcacccagaaccccagagtgtggctggagtag

SEQ ID NO: 9338 - DNA, 1938 bp, Homo sapiens
  source 1..1938: mol_type = genomic DNA
atggccagcctgctgcaggaccagctgaccaccgaccaggacctgctgctgatgcaggagggcatgcccatgagaaaggtgagaagcaagagctggaagaagctgagatacttcagactgcagaacgacggcatgaccgtgtggcacgccagacaggccagaggcagcgccaagcccagcttcagcatcagcgacgtggagaccatcagaaacggccacgacagcgagctgctgagaagcctggccgaggagctgcccctggagcagggcttcaccatcgtgttccacggcagaagaagcaacctggacctgatggccaacagcgtggaggaggcccagatctggatgagaggcctgcagctgctggtggacctggtgaccagcatggaccaccaggagagactggaccagtggctgagcgactggttccagagaggcgacaagaaccaggacggcaagatgagcttccaggaggtgcagagactgctgcacctgatgaacgtggagatggaccaggagtacgccttcagcctgttccaggccgccgacaccagccagagcggcaccctggagggcgaggagttcgtgcagttctacaaggccctgaccaagagagccgaggtgcaggagctgttcgagagcttcagcgccgacggccagaagctgaccctgctggagttcctggacttcctgcaggaggagcagaaggagagagactgcaccagcgagctggccctggagctgatcgacagatacgagcccagcgacagcggcaagctgagacacgtgctgagcatggacggcttcctgagctacctgtgcagcaaggacggcgacatcttcaaccccgcctgcctgcccatctaccaggacatgacccagcccctgaaccactacttcatctgcagcagccacaacacctacctggtgggcgaccagctgtgcggccagagcagcgtggagggctacatcagagccctgaagagaggctgcagatgcgtggaggtggacgtgtgggacggccccagcggcgagcccgtggtgtaccacggccacaccctgaccagcagaatcctgttcaaggacgtggtggccaccgtggcccagtacgccttccagaccagcgactaccccgtgatcctgagcctggagacccactgcagctgggagcagcagcagaccatggccagacacctgaccgagatcctgggcgagcagctgctgagcaccaccctggacggcgtgctgcccacccagctgcccagccccgaggagctgagaagaaagatcctggtgaagggcaagaagctgaccctggaggaggacctggagtacgaggaggaggaggccgagcccgagctggaggagagcgagctggccctggagagccagttcgagaccgagcccgagccccaggagcagaacctgcagaacaaggacaagaagaagaagagcaagcccatcctgtgccccgccctgagcagcctggtgatctacctgaagagcgtgagcttcagaagcttcacccacagcaaggagcactaccacttctacgagatcagcagcttcagcgagaccaaggccaagagactgatcaaggaggccggcaacgagttcgtgcagcacaacacctggcagctgagcagagtgtaccccagcggcctgagaaccgacagcagcaactacaacccccaggagctgtggaacgccggctgccagatggtggccatgaacatgcagaccgccggcctggagatggacatctgcgacggccacttcagacagaacggcggctgcggctacgtgctgaagcccgacttcctgagagacatccagagcagcttccaccccgagaagcccatcagccccttcaaggcccagaccctgagcatcccctacagacacctgcagctgatcttccccatcaacagcgtgtag

SEQ ID NO: 9339 - DNA, 7554 bp, Homo sapiens
  source 1..7554: mol_type = genomic DNA
atggtgggcgagagacacgccggcgacctgatggtgcccctgggccccagactgcaggcctaccccgaggagctgatcagacagagacccggccacgacggccaccccgagtacctgatcagatggagcgtgctgaagtgcggcgaggtgggcaaggtgggcgtggaggagggcaaggccgagcacatcctgatgtggctgagcgcccccgaggtgtacgccaactgccccggcctgctgggcgagagagccctgagcaagggcctgcagcacgagcccgccggcgtgagcggcagcttccccagagaccccggcggcctggacgaggtggccatgggcgagatggaggccgacgtgcaggccctggtgagaagagccgccagacagctggccgagagcggcacccccagcctgaccgccgccgtgctgcacaccatccacgtgctgagcgcctacgccagcatcggccccctgaccggcgtgttcagagagaccggcgccctggacctgctgatgcacatgctgtgcaaccccgagccccagatcagaagaagcgccggcaagatgctgcaggccctggccgcccacgacgccggcagcagagcccacgtgctgctgagcctgagccagcaggacggcatcgagcagcacatggacttcgacagcagatacaccctgctggagctgttcgccgagaccaccagcagcgaggagcactgcatggccttcgagggcatccacctgccccagatccccggcaagctgctgttcagcctggtgaagagatacctgtgcgtgaccagcctgctggaccagctgaacagcagccccgagctgggcgccggcgaccagagcagcccctgcgccaccagagagaagagcagaggccagagagagctggagttcagcatggccgtgggcaacctgatcagcgagctggtgagaagcatgggctgggccagaaacctgagcgagcagggcatgagcccccccagacccaccagaagcatcttccagccctacatcagcggccccagcctgctgctgcccaccatcgtgaccacccccagaagacagggctgggtgttcagacagagaagcgagttcagcagcagaagcggctacggcgagtacgtgcagcagaccctgcagcccggcatgagagtgagaatgctggacgactacgaggagatcagcgccggcgacgagggcgagttcagacagagcaacaacggcatcccccccgtgcaggtgttctggcagagcaccggcagaacctactgggtgcactggcacatgctggagatcctgggccccgaggaggccaccgaggacaaggccagcgccgccgtggagaagggcgccggcgccaccgtgctgggcaccgccttccccagctgggactggaaccccatggacggcctgtaccccctgccctacctgcagcccgagccccagaagaacgagagagtgggctacctgacccaggccgagtggtgggagctgctgttcttcatcaagaagctggacctgtgcgagcagcagcccatcttccagaacctgtggaagaacctggacgagaccctgggcgagaaggccctgggcgagatcagcgtgagcgtggagatggccgagagcctgctgcaggtgctgagcagcagattcgagggcagcaccctgaacgacctgctgaacagccagatctacaccaagtacggcctgctgagcaacgagcccagcagcagcagcaccagcagaaaccacagctgcacccccgaccccgaggaggagagcaagagcgaggccagcttcagcgaggaggagaccgagagcctgaaggccaaggccgaggcccccaagaccgaggccgagcccaccaagaccagaaccgagacccccatggcccagagcgacagccagctgttcaaccagctgctggtgaccgagggcatgaccctgcccaccgagatgaaggaggccgccagcgagatggccagagccctgagaggccccggccccagaagcagcctggaccagcacgtggccgccgtggtggccaccgtgcagatcagcagcctggacaccaacctgcagctgagcggcctgagcgccctgagccaggccgtggaggaggtgaccgagagagaccaccccctggtgagacccgacagaagcctgagagagaagctggtgaagatgctggtggagctgctgaccaaccaggtgggcgagaagatggtggtggtgcaggccctgagactgctgtacctgctgatgaccaagcacgagtggagacccctgttcgccagagagggcggcatctacgccgtgctggtgtgcatgcaggagtacaagaccagcgtgctggtgcagcaggccggcctggccgccctgaagatgctggccgtggccagcagcagcgagatccccaccttcgtgaccggcagagacagcatccacagcctgttcgacgcccagatgaccagagagatcttcgccagcatcgacagcgccaccagacccggcagcgagagcctgctgctgaccgtgcccgccgccgtgatcctgatgctgaacaccgagggctgcagcagcgccgccagaaacggcctgctgctgctgaacctgctgctgtgcaaccaccacaccctgggcgaccagatcatcacccaggagctgagagacaccctgttcagacacagcggcatcgcccccagaaccgagcccatgcccaccaccagaaccatcctgatgatgctgctgaacagatacagcgagccccccggcagccccgagagagccgccctggagacccccatcatccagggccaggacggcagccccgagctgctgatcagaagcctggtgggcggccccagcgccgagctgctgctggacctggagagagtgctgtgcagagagggcagccccggcggcgccgtgagacccctgctgaagagactgcagcaggagacccagcccttcctgctgctgctgagaaccctggacgcccccggccccaacaagaccctgctgctgagcgtgctgagagtgatcaccagactgctggacttccccgaggccatggtgctgccctggcacgaggtgctggagccctgcctgaactgcctgagcggccccagcagcgacagcgagatcgtgcaggagctgacctgcttcctgcacagactggccagcatgcacaaggactacgccgtggtgctgtgctgcctgggcgccaaggagatcctgagcaaggtgctggacaagcacagcgcccagctgctgctgggctgcgagctgagagacctggtgaccgagtgcgagaagtacgcccagctgtacagcaacctgaccagcagcatcctggccggctgcatccagatggtgctgggccagatcgaggaccacagaagaacccaccagcccatcaacatccccttcttcgacgtgttcctgagacacctgtgccagggcagcagcgtggaggtgaaggaggacaagtgctgggagaaggtggaggtgagcagcaacccccacagagccagcaagctgaccgaccacaaccccaagacctactgggagagcaacggcagcaccggcagccactacatcaccctgcacatgcacagaggcgtgctggtgagacagctgaccctgctggtggccagcgaggacagcagctacatgcccgccagagtggtggtgttcggcggcgacagcaccagctgcatcggcaccgagctgaacaccgtgaacgtgatgcccagcgccagcagagtgatcctgctggagaacctgaacagattctggcccatcatccagatcagaatcaagagatgccagcagggcggcatcgacaccagagtgagaggcgtggaggtgctgggccccaagcccaccttctggcccctgttcagagagcagctgtgcagaagaacctgcctgttctacaccatcagagcccaggcctggagcagagacatcgccgaggaccacagaagactgctgcagctgtgccccagactgaacagagtgctgagacacgagcagaacttcgccgacagattcctgcccgacgacgaggccgcccaggccctgggcaagacctgctgggaggccctggtgagccccctggtgcagaacatcaccagccccgacgccgagggcgtgagcgccctgggctggctgctggaccagtacctggagcagagagagaccagcagaaaccccctgagcagagccgccagcttcgccagcagagtgagaagactgtgccacctgctggtgcacgtggagcccccccccggccccagccccgagcccagcaccagacccttcagcaagaacagcaagggcagagacagaagccccgcccccagccccgtgctgcccagcagcagcctgagaaacatcacccagtgctggctgagcgtggtgcaggagcaggtgagcagattcctggccgccgcctggagagcccccgacttcgtgcccagatactgcaagctgtacgagcacctgcagagagccggcagcgagctgttcggccccagagccgccttcatgctggccctgagaagcggcttcagcggcgccctgctgcagcagagcttcctgaccgccgcccacatgagcgagcagttcgccagatacatcgaccagcagatccagggcggcctgatcggcggcgcccccggcgtggagatgctgggccagctgcagagacacctggagcccatcatggtgctgagcggcctggagctggccaccaccttcgagcacttctaccagcactacatggccgacagactgctgagcttcggcagcagctggctggagggcgccgtgctggagcagatcggcctgtgcttccccaacagactgccccagctgatgctgcagagcctgagcaccagcgaggagctgcagagacagttccacctgttccagctgcagagactggacaagctgttcctggagcaggaggacgaggaggagaagagactggaggaggaggaggaggaggaggaggaggaggaggccgagaaggagctgttcatcgaggaccccagccccgccatcagcatcctggtgctgagccccagatgctggcccgtgagccccctgtgctacctgtaccaccccagaaagtgcctgcccaccgagttctgcgacgccctggacagattcagcagcttctacagccagagccagaaccaccccgtgctggacatgggcccccacagaagactgcagtggacctggctgggcagagccgagctgcagttcggcaagcagatcctgcacgtgagcaccgtgcagatgtggctgctgctgaagttcaaccagaccgaggaggtgagcgtggagaccctgctgaaggacagcgacctgagccccgagctgctgctgcaggccctggtgcccctgaccagcggcaacggccccctgaccctgcacgagggccaggacttcccccacggcggcgtgctgagactgcacgagcccggcccccagagaagcggcgaggccctgtggctgatccccccccaggcctacctgaacgtggagaaggacgagggcagaaccctggagcagaagagaaacctgctgagctgcctgctggtgagaatcctgaaggcccacggcgagaagggcctgcacatcgaccagctggtgtgcctggtgctggaggcctggcagaagggccccaacccccccggcaccctgggccacaccgtggccggcggcgtggcctgcaccagcaccgacgtgctgagctgcatcctgcacctgctgggccagggctacgtgaagagaagagacgacagaccccagatcctgatgtacgccgcccccgagcccatgggcccctgcagaggccaggccgacgtgcccttctgcggcagccagagcgagaccagcaagcccagccccgaggccgtggccaccctggccagcctgcagctgcccgccggcagaaccatgagcccccaggaggtggagggcctgatgaagcagaccgtgagacaggtgcaggagaccctgaacctggagcccgacgtggcccagcacctgctggcccacagccactggggcgccgagcagctgctgcagagctacagcgaggaccccgagcccctgctgctggccgccggcctgtgcgtgcaccaggcccaggccgtgcccgtgagacccgaccactgccccgtgtgcgtgagccccctgggctgcgacgacgacctgcccagcctgtgctgcatgcactactgctgcaagagctgctggaacgagtacctgaccaccagaatcgagcagaacctggtgctgaactgcacctgccccatcgccgactgccccgcccagcccaccggcgccttcatcagagccatcgtgagcagccccgaggtgatcagcaagtacgagaaggccctgctgagaggctacgtggagagctgcagcaacctgacctggtgcaccaacccccagggctgcgacagaatcctgtgcagacagggcctgggctgcggcaccacctgcagcaagtgcggctgggccagctgcttcaactgcagcttccccgaggcccactaccccgccagctgcggccacatgagccagtgggtggacgacggcggctactacgacggcatgagcgtggaggcccagagcaagcacctggccaagctgatcagcaagagatgccccagctgccaggcccccatcgagaagaacgagggctgcctgcacatgacctgcgccaagtgcaaccacggcttctgctggagatgcctgaagagctggaagcccaaccacaaggactactacaactgcagcgccatggtgagcaaggccgccagacaggagaagagattccaggactacaacgagagatgcaccttccaccaccaggccagagagttcgccgtgaacctgagaaacagagtgagcgccatccacgaggtgcccccccccagaagcttcaccttcctgaacgacgcctgccagggcctggagcaggccagaaaggtgctggcctacgcctgcgtgtacagcttctacagccaggacgccgagtacatggacgtggtggagcagcagaccgagaacctggagctgcacaccaacgccctgcagatcctgctggaggagaccctgctgagatgcagagacctggccagcagcctgagactgctgagagccgactgcctgagcaccggcatggagctgctgagaagaatccaggagagactgctggccatcctgcagcacagcgcccaggacttcagagtgggcctgcagagccccagcgtggaggcctgggaggccaagggccccaacatgcccggcagccagccccaggccagcagcggccccgaggccgaggaggaggaggaggacgacgaggacgacgtgcccgagtggcagcaggacgagttcgacgaggagctggacaacgacagcttcagctacgacgagagcgagaacctggaccaggagaccttcttcttcggcgacgaggaggaggacgaggacgaggcctacgactag

SEQ ID NO: 9340 - DNA, 1476 bp, Homo sapiens
  source 1..1476: mol_type = genomic DNA
atggaggagatccccgcccaggaggccgccggcagccccagagtgcagttccagagcctggagacccagagcgagtgcctgagccccgagccccagttcgtgcaggacaccgacatggagcagggcctgaccggcgacggcgagaccagagaggagaacaagctgctgatccccaagcagaagatcagcgaggaggtgcacagctacaaggtgagagtgggcagactgaagcacgacatcacccaggtgcccgagaccagagaggtgtacaagagcgaggacagactggagagactgcaggagatcctgagaaagttcctgtacctggagagagagttcagacagatcaccatcagcaaggagaccttcaccagcgagaagaacaacgagtgccacgagcccgagaagagcttcagcctggacagcaccatcgacgccgaccagagagtgctgagaatccagaacaccgacgacaacgacaagtacgacatgagcttcaaccagaacagcgccagcggcaagcacgagcacctgaacctgaccgaggacttccagagcagcgagtgcaaggagagcctgatggacctgagccacctgaacaagtgggagagcatccccaacaccgagaagagctacaagtgcgacgtgtgcggcaagatcttccaccagagcagcgccctgaccagacaccagagaatccacaccagagagaagccctacaagtgcaaggagtgcgagaagagcttcagccagagcagcagcctgagcagacacaagagaatccacaccagagagaagccctacaagtgcgaggccagcgacaagagctgcgaggccagcgacaagagctgcagccccagcagcggcatcatccagcacaagaagatccacaccagagccaagagctacaagtgcagcagctgcgagagagtgttcagcagaagcgtgcacctgacccagcaccagaagatccacaaggagatgccctgcaagtgcaccgtgtgcggcagcgacttctgccacaccagctacctgctggagcaccagagagtgcaccacgaggagaaggcctacgagtacgacgagtacggcctggcctacatcaagcagcagggcatccacttcagagagaagccctacacctgcagcgagtgcggcaaggacttcagactgaacagccacctgatccagcaccagagaatccacaccggcgagaaggcccacgagtgcaacgagtgcggcaaggccttcagccagaccagctgcctgatccagcaccacaagatgcacagaaaggagaagagctacgagtgcaacgagtacgagggcagcttcagccacagcagcgacctgatcctgcagcaggaggtgctgaccagacagaaggccttcgactgcgacgtgtgggagaagaacagcagccagagagcccacctggtgcagcaccagagcatccacaccaaggagaacagctag

SEQ ID NO: 9341 - DNA, 2709 bp, Homo sapiens
  source 1..2709: mol_type = genomic DNA
atgagcgagttcagaatccaccacgacgtgaacgagctgctgagcctgctgagagtgcacggcggcgacggcgccgaggtgtacatcgacctgctgcagaagaacagaaccccctacgtgaccaccaccgtgagcgcccacagcgccaaggtgaagatcgccgagttcagcagaacccccgaggacttcctgaagaagtacgacgagctgaagagcaagaacaccagaaacctggaccccctggtgtacctgctgagcaagctgaccgaggacaaggagaccctgcagtacctgcagcagaacgccaaggagagagccgagctggccgccgccgccgtgggcagcagcaccaccagcatcaacgtgcccgccgccgccagcaagatcagcatgcaggagctggaggagctgagaaagcagctgggcagcgtggccaccggcagcaccctgcagcagagcctggagctgaagagaaagatgctgagagacaagcagaacaagaagaacagcggccagcacctgcccatcttccccgcctgggtgtacgagagacccgccctgatcggcgacttcctgatcggcgccggcatcagcaccgacaccgccctgcccatcggcaccctgcccctggccagccaggagagcgccgtggtggaggacctgctgtacgtgctggtgggcgtggacggcagatacgtgagcgcccagcccctggccggcagacagagcagaaccttcctggtggaccccaacctggacctgagcatcagagagctggtgcacagaatcctgcccgtggccgccagctacagcgccgtgaccagattcatcgaggagaagagcagcttcgagtacggccaggtgaaccacgccctggccgccgccatgagaaccctggtgaaggagcacctgatcctggtgagccagctggagcagctgcacagacagggcctgctgagcctgcagaagctgtggttctacatccagcccgccatgagaaccatggacatcctggccagcctggccaccagcgtggacaagggcgagtgcctgggcggcagcaccctgagcctgctgcacgacagaagcttcagctacaccggcgacagccaggcccaggagctgtgcctgtacctgaccaaggccgccagcgccccctacttcgaggtgctggagaagtggatctacagaggcatcatccacgacccctacagcgagttcatggtggaggagcacgagctgagaaaggagagaatccaggaggactacaacgacaagtactgggaccagagatacaccatcgtgcagcagcagatccccagcttcctgcagaagatggccgacaagatcctgagcaccggcaagtacctgaacgtggtgagagagtgcggccacgacgtgacctgccccgtggccaaggagatcatctacaccctgaaggagagagcctacgtggagcagatcgagaaggccttcaactacgccagcaaggtgctgctggacttcctgatggaggagaaggagctggtggcccacctgagaagcatcaagagatacttcctgatggaccagggcgacttcttcgtgcacttcatggacctggccgaggaggagctgagaaagcccgtggaggacatcaccccccccagactggaggccctgctggagctggccctgagaatgagcaccgccaacaccgaccccttcaaggacgacctgaagatcgacctgatgccccacgacctgatcacccagctgctgagagtgctggccatcgagaccaagcaggagaaggccatggcccacgccgaccccaccgagctggccctgagcggcctggaggccttcagcttcgactacatcgtgaagtggcccctgagcctgatcatcaacagaaaggccctgaccagataccagatgctgttcagacacatgttctactgcaagcacgtggagagacagctgtgcagcgtgtggatcagcaacaagaccgccaagcagcacagcctgcacagcgcccagtggttcgccggcgccttcaccctgagacagagaatgctgaacttcgtgcagaacatccagtactacatgatgttcgaggtgatggagcccacctggcacatcctggagaagaacctgaagagcgccagcaacatcgacgacgtgctgggccaccacaccggcttcctggacacctgcctgaaggactgcatgctgaccaaccccgagctgctgaaggtgttcagcaagctgatgagcgtgtgcgtgatgttcaccaactgcatgcagaagttcacccagagcatgaagctggacggcgagctgggcggccagaccctggagcacagcaccgtgctgggcctgcccgccggcgccgaggagagagccagaaaggagctggccagaaagcacctggccgagcacgccgacaccgtgcagctggtgagcggcttcgaggccaccatcaacaagttcgacaagaacttcagcgcccacctgctggacctgctggccagactgagcatctacagcaccagcgactgcgagcacggcatggccagcgtgatcagcagactggacttcaacggcttctacaccgagagactggagagactgagcgccgagagaagccagaaggccaccccccaggtgcccgtgctgagaggcccccccgcccccgcccccagagtggccgtgaccgcccagtag

SEQ ID NO: 9342 - DNA, 2289 bp, Homo sapiens
  source 1..2289: mol_type = genomic DNA
atggccatgcaggagaagtaccccaccgagggcatcagccacgtgaccagccccagcagcgacgtgatccagaagggcagcagcctgggcaccgagtggcagacccccgtgatcagcgagcccttcagaagcagattcagcagatgcagcagcgtggccgacagcggcgacaccgccatcggcaccagctgcagcgacatcgccgaggacttctgcagcagcagcggcagcccccccttccagcccatcaagagccacgtgaccatccccaccgcccacgtgatgcccagcaccctgggcaccagccccgccaagcccaacagcacccccgtgggccccagcagcagcaagctgcccctgagcggcctggccgagagcgtgggcatgaccagaaacggcgacctgggcgccatgaagcacagccccggcctgagcagagacctgatgtacttcagcggcgccaccggcgagaacggcatcgagcagagctggttccccgccgtgggccacgagagacaggaggaggccagaaagttcgacatccccagcatggagagcaccctgaaccagagcgccatgatggagaccctgtacagcgacccccaccacagagtgagattccacaaccccagaaccagcaccagcaaggagctgtacagagtgctgcccgaggccaagaaggcccccggcagcggcgccgtgttcgagagaaacggcccccacagcaacagcagcggcgtgctgcccctgggcctgcagcccgcccccggcctgagcaagcccctgcccagccaggtgtggcagcccagccccgacacctggcaccccagagagcagagctgcgagctgagcacctgcagacagcagctggagctgatcagactgcagatggagcagatgcagctgcagaacggcgccatctgccaccaccccgccgccttcggccccagcctgcccatcctggagcccgcccagtggatcagcatcctgaacagcaacgagcacctgctgaaggagaaggagctgctgatcgacaagcagagaaagcacatcagccagctggagcagaaggtgagagagagcgagctgcaggtgcacagcgccctgctgggcagacccgcccccttcggcgacgtgtgcctgctgagactgcaggagctgcagagagagaacaccttcctgagagcccagttcgcccagaagaccgaggccctgagcagagagaagatcgacctggagaagaagctgagcgccagcgaggtggaggtgcagctgatcagagagagcctgaaggtggccctgcagaagcacagcgaggaggtgaagaagcaggaggagagagtgaagggcagagacaagcacatcaacaacctgaagaagaagtgccagaaggagagcgagcagaacagagagaagcagcagagaatcgagaccctggagagatacctggccgacctgcccaccctggaggaccaccagaagcagagccagcagctgaaggacagcgagctgaagagcaccgagctgcaggagaaggtgaccgagctggagagcctgctggaggagacccaggccatctgcagagagaaggagatccagctggagagcctgagacagagagaggccgagttcagcagcgccggccacagcctgcaggacaagcagagcgtggaggagaccagcggcgagggccccgaggtggagatggagagctggcagaagagatacgacagcctgcagaagatcgtggagaagcagcagcagaagatggaccagctgagaagccaggtgcagagcctggagcaggaggtggcccaggaggagggcaccagccaggccctgagagaggaggcccagagaagagacagcgccctgcagcagctgagaaccgccgtgaaggagctgagcgtgcagaaccaggacctgatcgagaagaacctgaccctgcaggagcacctgagacaggcccagcccggcagcccccccagccccgacaccgcccagctggccctggagctgcaccaggagctggccagctgcctgcaggacctgcaggccgtgtgcagcatcgtgacccagagagcccagggccacgaccccaacctgagcctgctgctgggcatccacagcgcccagcaccccgagacccagctggacctgcagaagcccgacgtgatcaagagaaagctggaggaggtgcagcagctgagaagagacatcgaggacctgagaaccaccatgagcgacagatacgcccaggacatgggcgagaactgcgtgacccagtag

SEQ ID NO: 9343 - DNA, 1443 bp, Homo sapiens
  source 1..1443: mol_type = genomic DNA
atgatcgtggccgacagcgagtgcagagccgagctgaaggactacctgagattcgcccccggcggcgtgggcgacagcggccccggcgaggagcagagagagagcagagccagaagaggccccagaggccccagcgccttcatccccgtggaggaggtgctgagagagggcgccgagagcctggagcagcacctgggcctggaggccctgatgagcagcggcagagtggacaacctggccgtggtgatgggcctgcaccccgactacttcaccagcttctggagactgcactacctgctgctgcacaccgacggccccctggccagcagctggagacactacatcgccatcatggccgccgccagacaccagtgcagctacctggtgggcagccacatggccgagttcctgcagaccggcggcgaccccgagtggctgctgggcctgcacagagcccccgagaagctgagaaagctgagcgagatcaacaagctgctggcccacagaccctggctgatcaccaaggagcacatccaggccctgctgaagaccggcgagcacacctggagcctggccgagctgatccaggccctggtgctgctgacccactgccacagcctgagcagcttcgtgttcggctgcggcatcctgcccgagggcgacgccgacggcagccccgccccccaggcccccaccccccccagcgagcagagcagcccccccagcagagaccccctgaacaacagcggcggcttcgagagcgccagagacgtggaggccctgatggagagaatgcagcagctgcaggagagcctgctgagagacgagggcaccagccaggaggagatggagagcagattcgagctggagaagagcgagagcctgctggtgacccccagcgccgacatcctggagcccagcccccaccccgacatgctgtgcttcgtggaggaccccaccttcggctacgaggacttcaccagaagaggcgcccaggccccccccaccttcagagcccaggactacacctgggaggaccacggctacagcctgatccagagactgtaccccgagggcggccagctgctggacgagaagttccaggccgcctacagcctgacctacaacaccatcgccatgcacagcggcgtggacaccagcgtgctgagaagagccatctggaactacatccactgcgtgttcggcatcagatacgacgactacgactacggcgaggtgaaccagctgctggagagaaacctgaaggtgtacatcaagaccgtggcctgctaccccgagaagaccaccagaagaatgtacaacctgttctggagacacttcagacacagcgagaaggtgcacgtgaacctgctgctgctggaggccagaatgcaggccgccctgctgtacgccctgagagccatcaccagatacatgacctag

SEQ ID NO: 9344 - DNA, 633 bp, Homo sapiens
  source 1..633: mol_type = genomic DNA
atgcccggcgtgaagctgaccacccaggcctactgcaagatggtgctgcacggcgccaagtacccccactgcgccgtgaacggcctgctggtggccgagaagcagaagcccagaaaggagcacctgcccctgggcggccccggcgcccaccacaccctgttcgtggactgcatccccctgttccacggcaccctggccctggcccccatgctggaggtggccctgaccctgatcgacagctggtgcaaggaccacagctacgtgatcgccggctactaccaggccaacgagagagtgaaggacgccagccccaaccaggtggccgagaaggtggccagcagaatcgccgagggcttcagcgacaccgccctgatcatggtggacaacaccaagttcaccatggactgcgtggcccccaccatccacgtgtacgagcaccacgagaacagatggagatgcagagacccccaccacgactactgcgaggactggcccgaggcccagagaatcagcgccagcctgctggacagcagaagctacgagaccctggtggacttcgacaaccacctggacgacatcagaaacgactggaccaaccccgagatcaacaaggccgtgctgcacctgtgctag

SEQ ID NO: 9345 - DNA, 1059 bp, Homo sapiens
  source 1..1059: mol_type = genomic DNA
atgaccgaggccggcaagctgcccctgcccctgccccccagactggactggttcgtgcacacccagatgggccagctggcccaggacggcgtgcccgagtggttccacggcgccatcagcagagaggacgccgagaacctgctggagagccagcccctgggcagcttcctgatcagagtgagccacagccacgtgggctacaccctgagctacaaggcccagagcagctgctgccacttcatggtgaagctgctggacgacggcaccttcatgatccccggcgagaaggtggcccacaccagcctggacgccctggtgaccttccaccagcagaagcccatcgagcccagaagagagctgctgacccagccctgcagacagaaggaccccgccaacgtggactacgaggacctgttcctgtacagcaacgccgtggccgaggaggccgcctgccccgtgagcgcccccgaggaggccagccccaagcccgtgctgtgccaccagagcaaggagagaaagcccagcgccgagatgaacagaatcaccaccaaggaggccaccagcagctgcccccccaagagccccctgggcgagaccagacagaagctgtggagaagcctgaagatgctgcccgagagaggccagagagtgagacagcagctgaagagccacctggccaccgtgaacctgagcagcctgctggacgtgagaagaagcaccgtgatcagcggccccggcaccggcaagggcagccaggaccacagcggcgaccccaccagcggcgacagaggctacaccgacccctgcgtggccaccagcctgaagagccccagccagccccaggcccccaaggacagaaaggtgcccaccagaaaggccgagagaagcgtgagctgcatcgaggtgacccccggcgacagaagctggcaccagatggtggtgagagccctgagcagccaggagagcaagcccgagcaccagggcctggccgagcccgagaacgaccagctgcccgaggagtaccagcagcccccccccttcgcccccggctactgctag

SEQ ID NO: 9346 - DNA, 480 bp, Homo sapiens
  source 1..480: mol_type = genomic DNA
atgacccactgctgcagcccctgctgccagcccacctgctgcagaaccacctgctggaagcccaccaccgtgaccacctgcagcagcaccccctgctgccagcccagctgctgcgtgagcagctgctgccagccctgctgcagacccacctgctgccagaacacctgctgccagcccatctgcgtgaccagctgctgccagcccagctgctgcagcaccccctgctgccagcccacctgctgcggccagaccagctgcggcagcagctgcggccagagcagcagctgcgcccccgtgtactgcagaagaacctgctaccaccccaccaccgtgtgcctgcccggctgcctgaaccagagctgcggcagcaactgctgccagccctgctgcagacccgcctgctgcgagaccacctgctgcagaaccacctgcttccagcccacctgcgtgagcagctgctgccagcccagctgctgctag

SEQ ID NO: 9347 - DNA, 615 bp, Homo sapiens
  source 1..615: mol_type = genomic DNA
atggaccccaaggacagaaagaagatccagttcagcgtgcccgccccccccagccagctggaccccagacaggtggagatgatcagaagaagaagacccacccccgccatgctgttcagactgagcgagcacagcagccccgaggaggaggccagcccccaccagagagccagcggcgagggccaccacctgaagagcaagagacccaacccctgcgcctacaccccccccagcctgaaggccgtgcagagaatcgccgagagccacctgcagagcatcagcaacctgaacgagaaccaggccagcgaggaggaggacgagctgggcgagctgagagagctgggctaccccagagaggaggacgaggaggaggaggaggacgacgaggaggaggaggaggaggaggacagccaggccgaggtgctgaaggtgatcagacagagcgccggccagaagaccacctgcggccagggcctggagggcccctgggagagacccccccccctggacgagagcgagagagacggcggcagcgaggaccaggtggaggaccccgccctgagcgagcccggcgaggagccccagagacccagccccagcgagcccggcacctag
